United States Patent Application Publication US 2015/0315605 A1 - sequence listing, part 15

SEQ ID NO: 23573 - DNA, 2706 bp, Zea Mays
ctctgtctctcgccagcagccatgacatcttcaaaccatacccagccacgccctacaacgtctcatccctacaatctacgccgcctccctggctcctaaagaagaatacgaaggtcttgttccggacatttcggattccatgggctttgatgacaaggggagcttatctagttcagaaaatcataggaatatgtcatatgaagtcagtattttcttttatgttataatgattaggttcttgatctctgtgagccgttctttaccagcattattgcactgtacatgctaatgaaccagtgaaatgcctattgctttgctttcattactaactttaaaagatcatacttcttccacatttgttgaactccactttttacgtttacctatatgtttttacccattgcaggttattgatatgaaaagggggaaactagagccaaaggaaaaggtttgtgaagaacctgaaaaggcaattcattttacgaagttagacgagacaaatatcgcaacccaaaaggtttgggatcatgtattcaaccccttcagcaatttcttggctttgtacaggccagtgtgacacagggtgcatacagttagttcttaagaatttctagtgtattgtgacatcctgcattcccaggaaacatgttaactcatgttctctcagtgcggataaattgaagcatgtacaatggaggtgcttgaaaacaccttttttttttcttcaccaaccattagcacctgattcttaaaaggcggattcgatgctttttttcgaacaacgcaagagagttgcatgtcatttcattaagaaaagagaaccaaatacacagagaggaaagagacctcctgaacacacaacacactaacacaactcctctagagctaaaacaacaacatgaccatgaccacacactagttagcacccagctgagaggggtctgcacacttcttaagaggagctcttgctgaccggcggccccggctatgagttggatacgatgcttacgttagcatcaatgcttaatgtgtgttaacatattggtttaagcttatctaagaacctatttgcaactttgcattgtaggaatgaacttctctatcaatgcctagtgatatgacaacgttctctctccctaagcacctgtgtttaagcatcttgcattgtacatgcccttagagcaactccatccttgattccttggcagtgcctttgctttaaacttacagctagtgaaccaacttttgttatactatactggcatgatgatatgtatacacattcattcctaatcaaaaccctgttaatggaaggttcataaattgatttttttatttatttatctaaaacctctgttcgactgtcacctgattgctccctactaacttttgaggttctgaagggttctaaagataaaagaaaggaaacctttgcagaaggcaacactcaggaggaatgcaagtattattcaacacctggaggatgcaaattcggtaaaacttgcaaatacctccaccgtgagggaaatggagggaaaacagaggttgaaaaagctgagctaaactttctaggtcttccactgcgaccaggtgaaaaggagtgcccatactatatgcgcactgggagctgcaaatttgcgactaactgcaagtttcaccacccagatcctactaatgcatcttcaaaagaaccagggttggaacatgagaatggcgatgtaccactgcaaaatgtccaaggatcctctcagcctagccttcagatgtggcctgaccagagagcattgaatgaacagcatgttccttttcttgctccagcaccgtcatacagtggagggatggttccacctcaaggaatgtatccatcttctgattggagtgggtatcatcaggtacctttgaatccatattaccctcccggtgttcctttcccgcattttccagctgcccatatgaatcacccgatgtacaaggctgcagatataccaggacatcaaccaccaccatctgatgagtatcccgagagacctggccaacctgaatgccagcatttcgttaagagcggtttctgtaaatacaggatgaaatgcagatatcaccatccaaggtcgcgccagtctgcaccaccaccagcaggtcttagccccatcggcttgcctatcaaacctgatcaacctgtgtgcacttactatggacgctatggcttctgcaagtatgggccagcctgcatgttcaaccaccccttcaacttcgggcctcccgtgccggcagcaggaccacccctccctgggcagtaccctacgcatggaaacttcgcctagcaggcacgtgacgagcgattttctgagtcgccacgattgcttgtaataacctcctccacctgtaaagtagcgtagacaaaagctgtacgtggttggcagtagacatccagcatgtaggcgcaacgaagttgcatggagatgggtacgttacagttggtattgcaaactttacgctgtacaagttacagtccatacataagctgccatcgcatttaaaatcctggttgctgagtactccctcggtctgtctacatgatttagtcgttttagatttatcaactttgacagattatattgtatgtgttttatagtattttacaacataaacataaagacttgacttagggcaaacctagaacgaattaaatcatgtggatggagggag

SEQ ID NO: 23574 - DNA, 2421 bp, Zea Mays
ctttgtcggtaggtcctttttccggggagaattcgcctgagttccttggaataaaagaagatttgcgatccttaagcctcacgttccttgatctgctggtgtggaagttgatcttgatcatgttcccgttcgtcgtcttcatggacaatttgatttggagatggggccggaaatgatagagcaggatggatggtaggaaaaggaaggggaaattcaggaattctctcaggcgtatggctatggagtgcctgtgctctggtgagcagttgaaggcgtcagatgagaccatgcggtcatctgattctacgatcacaaaggatttctcggccagtgggtactcttctcggaatggagagattgagcagtaccttgataatggcaacatagaggaagccgagttgtcgctccgggagggcatttgcctaaattatgaggaagcaagggcattgctaggaaggctagaatatcaacggggtcatgtagaggcagcactccgtgtctttgatgggatagacatatctgcattagttcctaagatgaaaatctcaattgctagaaaaacagaccgtcggaagactcattcacagtgggattccccaccaatgcccttgcatgctgtcagccttctcatggaggccatatatcttaaagcaagagcacttcatgatcttgggaaagataaagaagctgcacaagaatgtagaatgatattggatattgtggaagcagctgtacctgagggcttgccagcaggctttgggaaaggctgtaaattgaacgaaataatatgcaaggctgtagagttgctccctgagctgtggaaatcaggggggttttcacttgaaaccatttcttcatataggaggtcacttcttaataattggaatcttgatggagagacaatagcaaggatacaaaagaaatttgctgtttttctcctatatagtggttgtgaagcacgccctccaaatcttcattctcagttggacggttcatttgtacctcgcaacaatattgaagaggctatccttcttttgatgattcttttgaggaagtccaatctcaagaggattgagcaagatccctctgtgatgcatcaccttacttttgcactgtccatgtcaggacagctaattccactggctggacagtttgaagaattgttacctggtgtgttagacaaaaaagaatggttgtacagcgttgcattgtgttatttagcagaagaagatgatctgagtgccctgaatctactcaaaattatactaaaatctggagaggactccgttcaactcatagaactgcttctagcttcaaaggcttgcattgagatgagtattcatactgaaggtgctttttatgcaaggagagccattgcaaatatgcagggaggatgcaaaccaatggcaggacttgcaaacctattgcttggtgttgcactttctaatcaggctagaagtgcaatatctgatacagatagagcttcttggcagtgcgaagcactggaagcccttgggaatgctgaaaaaaatatacatgggaaagattctagggcattatacagtctcagccttgaaaatgctgtgcagaggaaattagaattagctgccttttatgcaaagaggctggtgaaacttgaggctggatcagagttgaggagttggctccttttagctcgaatacttagtgctcaaaagctgtttgctgatgctgaaacagttgttgatgctgctctagatcaaactgggaaatggtgtcaaggagatttattgcgaaccaaagccagaattcaggctgcacaggggcaatttagagaagcggttgaaacatacacccaacttcttgctatcattcaacttagaacgaaaagtttaactgctggagtttgcttgccaaagggcaacaaggatgataaaggcctggaaacagagacctggtatgatctagctctcttatacctaggtatggcacaatggagggatgcagaggtttgtgtattgaagataagatccatcagtccttattctgcattggcttggcatgctacaggaaaaatatatgaagcaaaaggtcttagaaaagaagctttgggagcttttttcagagccttagatcttgatcctaaacatgtcccaagtttaatatcaactgccactgttctacaacaacttggtgacaggccattgccttctatacggtgcttcctgactgatgcattacaactggatagaactaatcatgttgcgtggttcaatcttggccttctttacaaagaggaaggtggcaggtcagcagctgaggctgctgaatgcttccaagctgctgcttttcttaaagaaactgcaccttcagaacctttcagatgacatctacaggggctatagatatattggtctctatccagcactaatgaaatggtac

SEQ ID NO: 23575 - DNA, 326 bp, Zea Mays
ccctttcctttcccctggtctggtggtggtggcggctttgttcacttgtgctctctggggtccgtccgtcggctggagcggttcgacgggaaaggagacgttacggctgggttgctggacagtcgatcagagtttaacgggaggaagaagagagagagagagggatcgatgctatgcagcagttaccacttcactcctcctttgctccgtggccgcttacctcacctacatataaaatacaagcaaggaagtagcagcagcggtaacggacagatctgcctgcagctgttgcgcgtttatggcgagcgagtgagcggagcacgagc

SEQ ID NO: 23576 - DNA, 901 bp, Zea Mays
ccacgcccgcccgccgcaatccccagtccccaaccgccctccgcaatcccctaccgcccgccgtgatacccgccgccgcggcagccgcccgccgcaacctctgcctagataaggatagggggcgccctcctccctcgatcatccgcacttgtgtagccatcgcgccatctacaccggccaccgccacacgaaggttcgtctctggccttgcggcttgcgacctcgaggtgaccgagcccgcgggctccatgacgacaacggtgacgccggaggcaaagatggcggcgcagcagcaggcccccgcgtcgcgctcctcctcccgacctcgccgtcgagtccctattcccgccggacctcgatatcttcgcaggccgctggaccccgccggggcgggtgaccgatgcagtgcgctctcgatccgtgcagagcgcaggtggttggatggccgcccgtgcgcaactaccggaagaataccctcgccgccgcgaccgcctccaggagcaaggcgccgacggaggaggccgcatccggagctgggcccatgtacgtgaaggtgagcatggatggcgcgccctacctcaggaaggtggacatcaagatgtactccagctacgaggacctctccctggcgctcgagaagatgttcagctgcttcatcgctggtcaaagtggtctgcataaatcatcgagcaaagacagactgactaatggctcaaaggtggatgccctcaaagatcaggagtatgtccttacatatgaggataaggatgcagactggatgcttgtcggtgatcttccctgggaattaccttcagagttggaggagctcaccattagggcggttcttttgcctaccgacaaagaggaacggcggtggcctcacagtctcacacaggggcag

SEQ ID NO: 23577 - DNA, 1390 bp, Zea Mays
cagtgttctccggtttaggtcccttgaaagagctcggatgcaattattgttgatggaagaattgtcgaacaagaatgcgtagacatcaaaccaggcagtgagattgtctctggaccccagaaagaagggcatttaatatatacatttgaaattacagaggcagaggatcatgaaaaaaaaaatgtcaagattgttctagatatcgagaatgcaaaatgcagcatatgcctgaatttgtggcatgatgttgttactgttgctccatgcctgcacaacttctgcaatggatgtttctcagagtggttaaggaggtcttcatctaattcacgtgataaaagccagagcgctgcatgcccacaatgtaggacaacagttcaatcagttggaaggaatcacttcctgcataatattgaagaggctatattgcaagctttttcctcactacagagatctgatgaggagattgcgttgttagagtcgtatgcttcagttttgggtcaacagaaaaaccaatcaaggaaaagacgtttttcacgttctagtgatgataccgacaattcagatctaccatgtcctcaatgccgtaatgaatttggtggatttagatgcagcccaggatctgtgcacttgcaatgcagtggatgtggaggaatgatgccagccagatctaacatcagtataccacaaaaatgcttggggtgtgataaagcgttttgtggggcttattggtattcgcaaggtgtgagttcaagtcattgcaatctgatctgcaaccaggatactttgaagagtatttatcagcgacatatctctgcacttcctgacacaattcatgggggcaatccatatgaaaaagatattacagaaagatgtatacagcaatcaggcaaaacattgcaagttgtaatctcagagtggatatcaaaatttgacaacatggaaattgatcgttcaaggttgcaattgaataatgtggatgcaattacttccaggacatatatctgcaaccattgctacagcaagtttgttgatttcctgctctactggttccgtgtatcattgccccaaaatcttcttccacgtgatgctgcggagagggagagctgctggtacggtttcatgtgccgcacccagcaccatcggcctgaccacgccaagaagctgaaccacgtgtgtcgcccgacaagaggcaaccagccctagtgagacttgactgtttctgtcaccattgtcatcaccatccattgtatgtgtgtgtcatcaaaatggtcaggaagtgtggcgcgtccatgtttggaaccctttttggtttgatcctggctggacctgacaaggaaattatattgctgctggtgccggaaccgccgctctgtcggcaggtccggggggg

SEQ ID NO: 23578 - DNA, 1586 bp, Zea Mays
acggaaaatccaatcagggaaaaaatccatttccctttcttctgaagtcgtcctcttcttcccgtcgcttcgccgtgccgcacctgcgaggagaggagacttcgccgcgaagctcaccatgatctcgccggagaggagctcgtcacagagccagcggtcggcggcggcgggggcgccgttcctgtcgatctccgtcacggatcccgtaaagatgggtaccggcgtgcagtcctacatctcctaccgcgtcatcaccaagaccaacctccctgaatttgagggaccagagaaaattgttattcggcgctatagtgattttgaatggttgcatgatcggcttgctgagaggtacaaaggcatttttataccccctcttccggagaagaatgctgttgagaaattccggtttagcaaggagttcattgaattgcggcgtcaagctctggatttattcgttaacaggatagcttcacaccctgaactcaagcaaagtgatgtcttgaggacatttttgcaagcagatgaagagataatggatagggcaagatcttatgagactggtatttttaagaaaccggcagatttcatacagatgtttaagtcaaaagtcagtgatgttgttctgggaaaagaaaagcctgtggaggaatctactcctgaatatgagaagcttaaaaattacatatttgagctagaaaatcatttagcagaggcccaaaaacaagcataccgtcttgtgaaaagacacagagaacttggtcaatctttggcggactttggaaaggcgattaagcatttaggtgcttgtgaaggagatttgatggaaaaggtgttttctgaagttggttcgaagtcagagatgttgtcaataaagctgcaaagagaggcagacaaccttctctttaactttgaagaacccttgaaagattatgtgcgtgctgtacaatctataaaagccactatgcttgatcgagccaatgctttcaggcagcacttcgatttggatcaggagaggaagtataaagagcttaatcttgaaaaattgaagttcatgaaccctgaaaagtatgccgaagcagaatctgagtttcgagagttgaaagcagacagtgaggaggctactaagaagtttgaacacatagttagactaatgaatgaagagcttgctcgtttccaggagcaaaagacagctgatattggactcgcattccatgaatttgccaagggtcaggctaagctagctaaagacattgcggatgcatggcgcagcgtcctcccaaagctcgaagcttgttccacatcataaatgtgatttgtgtttcctcatgatgtttgggaatgggatagggggttggcagctggtgagtttaggctgttttttcccagcctgttttgacactgattactgtatacttgaactgcggtttggaaatgctccagctgttaggttcagttgacgtcatttcttgctgtttgagcttttaaccgtcttcttttcttagatcaactgaaatagctactggaatctcgtgatattgataatcaatgatgtaccatgatgctacttcctggaacttctttagctt

SEQ ID NO: 23579 - DNA, 3612 bp, Zea Mays
tgggccgaccggctgagtagtctgactgtacccgccgctaccatttaccacgctgtaccgtagcagagcaggcctcacgcggcgctgtcccgaccccgtcgaggcaaaaagccctggccgttccctcctcgccccgtgccgccgccgcctccgtgcgcgcccaggcttcctcctgtgacttcgctacaatgggtcatgccgtaatcaaaagaaggactacattttcatgccaacattgaagataccgccttccattattgctgggtaagttggaacagaggagtgcgtattcaagatgatggacatgaggcgccactctgtgtctgtggatgccccactgtcaagaaccttggtgcagctcaagcgagtgaggtcgctgcgggatccagcgacaaactcgatgagcaagtacgcgtctccttccgatcacatgatctgggagactgcttctagcaatggggtgactccggagcttggcaggtcagcacaccatcacctggttggggaagacgaagatgtgggagctgagcctactacaatggggtcagagcggagtttccggggaccaagcgcaaggactgcatcgtataggaaatcttctgctgtcaggatcagaggactgaacccaccaagaagcaagcaggttcaccgtgtccgccaagacggccaccgcaagtcattggattctaaccactcaaaccatagctctatccgtcaattggcagacaatatggtcagcaatgtggatgcagataaggaagagggggaagtgaattcctatgaaagaccaaaacttgcaatgccagataagtctgacgaagaggtgaaaatgccaggctgctccaaatccaggagcaagtcttctgctgcaatgagccgtgttgggagcccctgcatgtcagccagtgaggcacgctcagttgggtcaagaagaagcactttggggcatggaaccgaggatacacgactgaggtcaaatgatgtcgtgggatccaatttcagtggctgtggtataagctactgctggtcaggagcgtcaaagtaccgggagctttattctgacagcgatggtccagaccaacctctcttatccacagatgggattgaggcagcattccaaggcaatgtaccatacactgagacactgaggtgtctaagccagaagttccgccctcgttccttcagtgaactgattggcctaaatgtcgttgcccagtccctcctatattccacttgcaaaggaaaagttgctccaatgtacttgttccatggcccccggggtacaggcaagacatccacggcaaggatttttgccgcggcactgaactgtgtatctcttgaggagcaaaggccgtgtgggttctgtaaagagtgtgtcattcttttctctgggaagagcagagatgtgaaagagcttgacgctgcgaaaatggatcgtctaggccgagtgaaggcacttctcaagagcgcatcgctcgtgccatactcctcgcgcttcaaggtcttcatagtagatgagtgccacctcttgcgagaagatgcatggtcagcaatactgaagagccttgacgagccataccggcacacggtgtacattatgatcacttctgacatagaaagcctgcctcgcgcttccatcacacattgtcagaagttccattttccaaagataaaggtggcggatattgtctacaggttggagaggatctgtatagaagaaggattggaatttgaccatgatgggttgtacttcattgctgcaaagtctaatggttctcttagagattcagaaataatgcttgatcaactcagtttgcttgggaagaaggtcacaatttctcttgtgcatgaacttgtaggatctgtgtctgatgatgagttgattgaattgcttgatctagcgttgtcatccgacacaaccaataccgtaagacgagctcgagaacttatggggtcagcaatcgatcctctgcagctggtgtctcagttggccaaccttattatggacattctctcagggagatgtcaatctgcagtcacggaagtcagcaaaagtttcttgggtagatatgcattatcagaggttggaataaagaaactaagacatgcactgaagatactatcagaaactgaaaaacaattgagaacatcaaggaatcaggctacttgggttacagttgcgcttttgcagtttagcaccaatgaacctaaccctgttgctgaaacaaatgatatgcatgcacattcagtaactggatatacagatgactgggtttccaaggtgcactcaagtgccaatttttgccaggcatgtaacagcagcaagtccaactgttctgagagacactgtaggcggcttaagctcgagaacatatggaggagagccattggaaagtgtcgatctaggtcagctaaaagtttcctcaggaaagaaggcttcttatcgtcggttcacgtcaccgaagagctggccatagcagaagttggttttgaacacccagatcacctgtcaagagcggagaaaatgcaaagcctaatagaatcctctttgcaacacgttcttgggtgcaatgtggagatcagattcaaactcgtgccatgcccagtgagcaaagatgctaggttgaagagacagccgttcagctttctcaactgctctggccggaagcaagagctgtcagattcagtcgtgactgatgaagacgaagctgcgagggggcctggagcaagagagacaccgcttaaaggctacacctctagccagcaggaatcaccatacaccatgcgacgtgtcgattcgaaaccaacaacggtccacggttgcgaggatgacgcccggagtaccttgacgtcaagcagatccacggcagatgacctgacaaggacgtgcaggtcggagactggctacccaaagggtgtgcgtgagcagggccgctctgatggcacgcagcaggagcctgacctacagccgaactgcttctcgcgaacgctcaagcttcagaagaagctgctgtcttctggcgcagcgcacaccatctgtctgagggtccagccacataacaagatggatttcctgcctaagaaagagttcgatacgtacttctgcgcgtatgagccctacgagcagtgtccaagatcagattcaagagctacttacagttcaagagacgatgacttgtggagcaagaattcacgctttggctcgaatctactctgctggagagccccaaaacagtccatgtaatggaggaaagaacgagtgaactgggtggaacaaatcgattctgctacgagattttaccaattttgcccgaagctggagacatggacaccacccgcagctgcggggacaaattttgaagggaagtctaggaggggtctgtgctattcttgatcttggtaggcagctgaggattgaggaactatttagtgatgttttcttggaaatgcagatcctttataatgctagtgggcagttgtacagcgcgccagcgacgaaaccctgtgaattgttctgttattctgaattttgtaggacgatttgatgctctctctctgaatttacatgatctttttattagctgaatgattacagtgtccagaaaataggcc

SEQ ID NO: 23580 - DNA, 2656 bp, Zea Mays
gcccactgtcctatacgctaacacgggtgcccagccgccgcagtctttcgaactgaggaaccctaggcccagcactcggcgacggcggcgcgccaccggcgacgggatcagcggcatcactcccctccttccccggcgcggcggcgccccgcacctaggccctagcactgcagcactcgacaacaggatcagcggtcgcgcccccctcctccttccccggcgcggcggcgccctgtagctgcagatctgccactgtccgcctgccggtcatggagcacctccggtggcgccccacagtgaacgagcgcgacttcattgagtgtgcgctccagtctgacctccgtgttgacggccgccactcctttgacttccgcaagctcaagatcaccttcggcagggaggatggctcgtcagaggtgcagctcggggagacacacgtgatgggctacgtgaccgtgcagctggtgcagccataccgtgacaggccgaatgaggggacgctggccatattcaccgagttctcacccatggccgacccctcctttgagcctgggcgtcctggggaattagcaattgagcttggccgagttattgaccgtggcctcagggagagtcgagctgttgacatggagtccttgtgtgttgttgctgggaagcatgtctggtctgtgcgtgtggaccttcacatcttggataacggagggaatctcattgatgcagctaatatcgctgcattggcagctttatctactttccggaggcctgaatgcacggttggtggggacgatggtcagcaagttacagtgcatgatcctgaggttagggatccacttcctcttacgatacaccatatgcccatagctgtaacatttgcatattttggtgaaggtaacatcgtggttcttgatcccacatacaaggaagaagcagtaatgggagggaggatgactgctatagttaactcaaatggggatgtttgtgccattcagaaagctggtggagagggtgtcatgtcaagtgttatcatgcagtgtttaagaattgcttcggtaaaggctgctgatataacaagcaaaataaagaaagcagtagactcatacaccaccgagaaagccctaaagaaagtaaaacgtttgccaacctcggttcctcagaaaattaatgtcactaatgtaactatggacggcaaaggtgatggtgaattggaaaagcaatctgtgcagatgcatagtgatgttcagcagataagcaaaggtgatgagaaccagcaaagtataaaaaggaattcacccttgactagggaccgaattgcaaaacacaaacaaacatccacattcattggtggcccatcaaattgggacccatattctaaaggagttacattaagatccctcaaaatttctgatttgccgggtactgttaacattgtttacatgttatgggttttcttcttgcatgctaactctcagtaacacctctgtgatgtacttgcagtcatttttttggttggcatttttggtgctcattgatgattaaaatatggcatgccattctccactgtttctgctttatagccatgtttttaggagggcagacctagtgccggagaggctcccacatgaagtgggtctggagaagggataaaccatggcaagccttcgtccacaaatgtggagaggctgtttcgaacaagctctcgccactgcactatgcctgcccttcaaattctgttgtctataaattgtgattcccttttatacttatttttttagggctggtagaaatactacataaatctgtgttcctttaaattttgatgtctataattctgcctcctgccagtctagagtaatccttcagatttcagtcattttgatttgacatgtgtaacctgatgtaatcgttcttgaggaatactttgccaagatttgttctctcttgagtctggaatcacttatttgcttcgcatgatgtagatccaccaactatggtcaaggccagcagccgtgaggatgcccaaccaatgactgaatcatctaatgctgaggtgaacacatcaagtgctgtggctgctggagagtctgagtcccatgaaattggatcgccgaagagtctaaaagatgctatcaaaccaaaacataaaagaaagaagaagaaaagtgacaggagttagtttagttgcaagcctgtaattttgtatgccccagataaatcaacgacagtctacaacacctcaaactcctgattgattaggtttcatccggggtgccatacatgggttttttgtgtgttttcaatcgtgactggtgctagtagtgacaggcaaattttgtacaagctgtagaattgtattttaggaatggttcagttaagctttcagtcaactttgcagctagttctgtgatgcgtgatgtcccagcactcttacatttcattgtactgctcaccgttaatcttccattgtccaaacggtcgtaaggattgccatatttgttccaacagtcttcagttgtggtctactggtcttagcttgaaaacaacattaaatcttgtctttgctacttctttcagtctgttttcgtgaggagagtaaattaaaactgtgcataagtgtaagtttgaaccataatcgttggcttcaaacatatattcagac

SEQ ID NO: 23581 - DNA, 3105 bp, Zea Mays
cgtcgtcgctctcgcggtctcgcccccggcggccccccacgagtgtggcaacaaaagggtctcggttcggagttggactcggagtcggccagaacaatccagcgagctcgaaaaaaagggtacgaataggaaccccaatccagggccggagggcgaacgaactcaaaagcaagccgttccagtccaatccgccccagtccaaatctaatcgccgggtttaggcacaaggggcgggacgcggcgaggtttagtcggggtttgttttgtcccttccgtgcgattctgctctccgcgcgggaggcaagtactgacggaagcgaagaccaaggcggaggaggggggtccccggcggtggaagtggaacgcgccgatgcgcaagtttcaggactccatcaaggccctccaggccgacatcgatcacgccaatgcgatggcgtcggaattcctgagggactacgacggctcggtcatccagatgcgggtggcgtacagcgccgtcgcgcatttcctcctgcagtggaccgactgcaagctcgccggcgcgctcggcctcctcaaggttatgctatacaaggtgtgcgcggacggctcgtcggcgcttcctgattgggagatggaggccagcatcagggagttctacggcgtcattttcccgtcgctgctgcagcttccgagtggcatcaccgagctggacgacaggaagcagaggaagctctgcctgaagaaattcaggagcagggatgagcagctctcggaggtggacacggagagggagctcgagtgcgggatctgcctcgaggttagccccaaggtcgtgctgcccgactgtgcccacatgctctgcatgcggtgctttgaggattggtaatatctcttttctcctagcttaaaatctttggccgagtccataagcgtgcatgaagtttgatttttttatgttccacatttacacaaatttggtcatgttagcttatggatggcaaagtactatttctcacgggttctgaagcagaattacagtcaagtacttctcgtgggttctaaagcataatgttttctgaagcagaatgttgaaactctggattggggaacatgggaaatttgtttttagtggaattatatttctttatgaagtgctgttttctttttttcttttttgaaaattggtgtcaccgttttttttgaatgaggcaatttcagtgtaggtggtcggtttggagccttttgagtgtcagatggtctatctctacatctctagtcatttgacagaattttaagttcttgattcaggctgttcatcaaagcaacttgaactgaaaataccattattatgctaggaaagagtagggagctttctatcgaatcagtagtctgcttccgagttggtaacttggtaccacaaggagcagttatggctggagcatcactttcattttggttgcatgatgactctcgtcagaacagcaaacccctgcattttttgtgttatactgcctccatcctttcataattgacgccaaacagtacggaaatgaactacaaaacctcaaatagaaaaaaattatggagggagtaccatgggtgcagcggtaatatttatcttgaccttgtcgtttaagattcaagttgtagtttttttttcttcttcaaaagattcaatgtatatagtcggttagtagcagatgaagcggtctgatgaaatctggtttaatggcacttccattcagctcacctctttgttgggtcaggataagcttggctctctcttttccagtctttatcttccactggatattttgtgctttactagagataatcttccactcccttcagccaatatttgactacaccctagatattttgtgctttggatgcatcatcatcatcatcatcaagcctgacaaatctgacctttccattacccgtgctcccaacctatcatattcataccattcactcaaacaatctgtatcgaagctattataagtgatgatgatcctaatggtgggccggggtcgtcataacacaagttcgttcgctctttgcactacaggaacgagaaatcgaagtcctgccccttctgtcgcgcctgcctggaggaggtgaagccgggcagcctgtggatatacaccgacgacagcgacgtggtggacacggataccttgactagggagaacatcaggcggctgttcatgggtgtgttccttgcccagggccgtgtgagactgagcccgtggtgagcggggaagttgtgtgagcccatggatgccccagggccgcaaatagagcgcgttagtgatgtgaaggcacttcgggatcaaacagtggtggaggatgagtcaaaaacaaggtacgagtatgggtacaatttcatacccatgagtgggtacgagttttttaacgagtataattttatctcacgtacgagtataggtaagcactacttaatgggtacatatccgttgctatctctacacatgctgccatggcaaacgttggaggagggcagccgaccagcgaattttctggaaagaatcaagcgtggacttggacgaaggcaacaaggtgatcaaggagatcaacacctcaaagaaagacattagaagacccattgaattcctatcaagatcaagcaacagtccaagacacaagatagaagaagcctaaaataagaagcatgaagacaccaagaaaatagtactacatagagcatcagattttgcaccagatatatgtagtgctagtattaaagaaagggcttgaagattaagtacactagacatgtaagtgtgcaacagacatgtgaaccagatgccataccaaacatggcatccagcaagccctacagtgggtacatgggagtctacaacgcactagacgtgttaggtgacacactgaatcctgcaccaaacaacatgctcaaaaaggttgcaaatgcaaccaagacgagtaacactccctagacatgtgtagtgtggcactaatgaccacatcagatgcataagcttcaacattcggtaatggctagttcacaggctagctaatgtgaaactcgttgggcttgcccggtgtgccactagacatgttcggtcctacgcataaaag

SEQ ID NO: 23582 - DNA, 1823 bp, Zea Mays
gtgtgcataatgtatgagatcaacttatgagattatggtagaagagtggaatgcccctaagccaatgcatccttctcttttgaatgaggccttgcgatggacagctacagacggacaaaagaaagatctatggtcacccttgccatatcaggggtggaaaccatgcttaacgccatcagtttctcacaaattacctctggaaccaagtggatacatccaagtatttcttgatggtggattgaaccaacaaagaatggggatatgtgatgccattgcagttgcaaagattcttaatgctactcttgtgatcccacatcttgaagtaaaccctgtttggaaggattcaagctcatttgaagaaatttttgatgtggatcactttatcaactccctaaaagatgaagtttccattatcaaagtgcttccaaaagaattttcttggagcacaagagagtactatggcacaggcatccgtgctacaagaataaaaactgcacctcttcatgcctcagcaaattggtatttggagaatgtcagtcctatcctgcaaagctatgggattgttgcgatcgctcccttttctcaccgccttgcatttgatgatttgcctgtggatcttcaacgcttgcgttgtaaagttaacttccaagctctggtcttccgttctcacattatctcacttggagaaacacttgtgaagcgcttgaggtctccggtccgggttcattccagtaaatctatccatcaagttgtaggagacacaaatcaagctgaaaaatatgcagttttgcatctccgttttgataaggatatggctgcacattctgcatgtgactttggaggtggcagagctgaacagctagctcttgctaagtacaggcaagttatatggcaaggaagggtattaaattcacagctaactgatgaggagcttcggaacacaggacgctgcccattgaccccagaagagattgggctgttactggtagcccttggctttgacaacagaactcgactctatcttgcatctcacaaggtatatggtggagaagccaggatctctagcttgcgcaaactatttccgttgatggaggacaagaggagccttgcatctgaagatgaacttgctaatgttgaagggaaggcttctgttctagcagctcttgactattatatcagcatgcatagcgacattttcatatctgcatctcctggaaacatgcacaatgctttggtggctcaccgaagctatgagaacttgaagaccataaggccaaacatggcactgcttgggcgcacctttgcgaataagagcatggagtggccagagtttcagcaggttgtacaggcaggacacaaaggaagatacgggcaaatccggttgagaaaggcaacgcaatccatctacacttatcctgcacctgactgtatgtgccaaggataggctactggtttcaaaatttcagaaaaccaatcggttctgcagcaaatgaaggtcgaggatcgccgtctcaaatgttgcattgcggttagtacattccagctgccactagatatgcaagtttgatttttttgggacagctgctatgtactggatctcctctctctctctctctctctctctctctctctcttcacaatacagtttggtgcagatgcagtttatagatattctcatattcgtggttgtgacgggtgttaagatatcacacttgccattaacactttgcgctcttcagcttctacatctattttaatgcatcatgtattcttcagtgccgaactatgtgcttggagcgaaactgaccctgttcgaggtttag

SEQ ID NO: 23583 - DNA, 239 bp, Zea Mays
gttgtccccactgcaaccaatgctcaggagaatatgaatgcaatgaggtggatttctaggacttccaggacttcgaggagttctagacttagattagctcaatccccagtcagttgcctgtggaaggcctttatcttagctacattctgtttctagcactttgatacatgttaagtcaatgactatgtggacgtctttgacatatggttgtaataagtttaatactctttatgttatta

SEQ ID NO: 23584 - DNA, 171 bp, Zea Mays
gaataggaaaaggtagtatagaaaagcaaagataggtagcatgaataggatagatgaaacatatactaagctactacatagagggtttaacttaaaattatatgtcatgatgcatgctcgtcttattcgtcctcacaattcttgccaacacatagtggctatcacgttcta

SEQ ID NO: 23585 - DNA, 1910 bp, Zea Mays
ctcgggttcctcttcctgctgcgattcatcccgttcttgccgtctacggttcaccccggagcgcgtttcctggtcaactaaggccggcatgaagggctgctcagagcgcttgctgtttctgctgctgctgctggcatcgtcgtcgttactgtccgctgtgcagacttgccccgccgacctcgacagcaaatgcgatggtggcgcgtctgatgatgattgggagggggagttcttccccggcgtcccgaaaatcaagtatgagggtccaacaagcaagaaccctcttgcttataagtggtataacaaggaggaagtgattctcggtaagaagatgaaggattggatgcgcttcagtgttgcattctggcacacgttccgtggtactggcgctgatcctttcggtgctcctacaaagacttggccttgggaggacggcacaaattctttggccatggctaagagaagaatgagagctcactttgagttcatggagaagttgggagttgacaaatggtgcttccatgacagggatattgccccggatgggaagactcttgaagaaacaaattctaacttggatgagatagtccagctggcaaagcagctgcagctctttatgcatccacgttacatgcatggcgctgctacgagcccagaggttaaagtatatgcttatgcggctgcacaagttaagaaagctttggaggtcactcactacctaggtggtgaaaactatgtgttctggggtggaagagagggttaccaaactcttctgaatactgatatgaagagagaacttgaccatctggctaactttcttcaagctgctgttgactacaagaagaagattggattcaacggaacactattgatagagcctaaaccacaggaaccaacaaaacaccagtatgactgggatgttgcgactacgtttgcttttctacagaagtacggtcttacaggagagttcaagattaatgttgagtgcaaccatgctactctatctggacacagctgccatcatgaattggagactgcacggattaatgggctgcttggaaatatcgatgcaaacactggtgatcctcaagttggttgggacacagatcagttcatgacagacattgcagaggctactttggttatgtcaagtgtagttaagaatggtggacttgcacctggtggtttcaactttgatgccaaattgcggagggaaagtactgatgttgaggacatgtttcttgcccatatctccggaatggacaccctggcacgtggcctccgtaacgttgccaagctgattggggatggttccctagatgatcttgtccgcaagcggtaccagagctttgatagtgagattggtgccttgatcgaggctgggaaaggagactttgagacgctagaaaagaaggttctagagtggggtgagcccactgttgcatccggcaaacaggaactggcggagattctgttccagtctgccctatagatgatggtgccatgtccataggtccaggaataagcaagggtgcgccctcctccgaacacgcactcgtcctcctcaccacggggatgttatggttccgtgcgatggactacctacaatacagcatggaactgagataattaggatgtaatctgtcagaaaatttccagaattgttacctccttttgtttagagtggattagtggaatcaaactggagttagttaaagcttatcctacattttggtgtggcgatcgtgtttggtacttccttgaatgctgtttcatagtgtggcaacgatgttgctgcttagtcctacaactggtggtagtaatgtatcatagttcgaacgtttcttcacaataaattatgatctttaataaattttattagttcaaaaataaataaaaatagagttcga

SEQ ID NO: 23586 - DNA, 978 bp, Zea Mays
atggacgatcaggataggccagcccaccagcagccagccagcaacaggggccagagcccagctgccaatgggcagcggcggcccaaggggactaggttcagcggcggcccaagccgatggcgtgggggtgcggcccaggcgacgcaggctcccagcagcggcgactctttggcacggatgctggatgctgccaatgcccaatgccatgctggttggcgactctttggcgcagcggcagccaggtcgaagcggcacccacccgcaatgagcaaagcaggcggcggccccggctcggccccgggcccgacggccgcggccgcggcggccgcggtgcagaagcagaagtcgctgctgcagaaggcggacgccgacgtctccagcctcgtcgacaatttctcctccctcatcaacatcgcccgagtcaacgatccgccagtgcgcaactcgcaggaggccttccagatggagatgcgcgccgcccgcatggtacattcagcagactctctgttgaaattagtgtcggaacttaagaggacagccatcttttctgggcttgcttcattgaatgagaatgtggataggaggatcgaagtgctgggtcagcaagctgagggaactgagagaatgctggagaggattgggcaggaggcagcagcaagcctcaaggagctagaggcacactactactcatctgttgtgcggtcaccatcctatgattgaggaatcttcggaaatatggattaggcacaccgtcctgccatctggcaattcattagggtgccaattgatgtagctgtttggttcacatattgtaacgttgtaacgtgatgggtatattgtaacgttgtaacgtgatgggtgacaaataacattaaaccatatttatttaagtttaaccgtaatcagatactacattagagaatgatatcagcctattcaaagaatttgttgtcgctcgtactcgaatgtgaataatta

SEQ ID NO: 23587 - DNA, 742 bp, Zea Mays
ctcaggctacgctatgaggaactcgtgtctggtggccaaatggttctaacatttattggaaggaagcatgaggatgtgttcgctggagagtccaaccatctttacggattgcttgcgcagtcactgaaatccctagttgatgagggtgttgtggagaaagaaaaacttgagtcattctatcttccgatctactcaccgtcggttggtgaagtggaggcgatagtgaagcaacttgggttgttcaacatgaatcatgttaaagtatttgagataaattgggatccctacgatgactcagaaggtgatgatgtgcataacagtattgagagcggtgaaaatgttgctaagtgcctacgcgcagttatggagccgctggtcgcaagccaatttggagaacgcatactcgacaagttattcaaagagtacgctcgccgtgttgccaaacaccttgagactgagaaaaccaagcatgctgttcttgtcctatccatcgagaaagcaataattcatgtgtgaagtgtcttgtttctcactatatatctttccattattatcacatggtaatatatgtttgttttgaatgtgcacgtttgtgtcactagctggtgtattgaatgtcatggtgtttttgttgttttctttgtcgcttctcctatattttagatgcctgaattttaaggtgatttcaggcaacactcctgtacaaggaattaatacaaataaattgctccttttatgatcg

SEQ ID NO: 23588 - DNA, 652 bp, Zea Mays
  misc_feature (651)..(652): n is a, c, g, or t
gcaggcagcaagccgaccgcgcctgcaacgaccgcgactcagctcggcgcccaggcggaccgacgccggccacccggccaggcccgcggagccgcagccacgcgcgcccagcaagtcgagcttatctgaatttgatgatcttgtgggccaccctggattcgacaagcaagggacacgcttcaagcggctcatcaaagaccagaataatcataaggacctcgaggagggaattaaccgtctagttctttgctctggaaagtttcaggtgtactacgaactggatgaagaaagaaggaagacggagcgcactgatgttgctatatgtagagttgagcagctctgcccattcccctatgacctcatccagtggacactgaaaggcggacgtgcggattggcttatagagaaatgaacttggagcttctagtgttacccctgtcctgacagaacaatgtcacacaatagcggaaaatcgggtggacaggctgtaatgccttgtgctggatgcagttaagcaatgtatggagtttgggtatcacctccgttcttggcctgttaaacaatgtacggagtttggggttaaatgattttgtaaagtgtttgcaaatttgttcaaaacatgataatgtgtaggttttgtgaatgattttnn

SEQ ID NO: 23589 - DNA, 4295 bp, Zea Mays
ccttgatccccgctaaggtactcaccatgaaaagccgtatctgtctcggcggacaggacccgctcgtcactgagaccgggacccgcagagcattgcttgaccgctggcccgcctccgcctgttagaaccaccgggcatcgtcgacgccgccggttgcccattaaacccccgtccccgtctcgaggtgatcatcccgcagcgctacaacgcccgaactctccgtccctcactctcagtctccgacacattctacgaaccgcctcccactaccgctcattgccgccggtcgccggagacgcgctgcaccgccagctgtccgccttcgcccgccgaccccggcctgccgcagcttccccttcacccgccagggtataagctgccagtgcttgtgtcatggaagagctacagaaagacagtgcgctaccatcaaatagctctgattctgagccagaagctatggaattggatgacaatggagcaggaaaatcccatagcatcgagggaaacagggattctcctatagacactgatgaaggccagccatctatggatgttgatattaagggaaaatcatctctcaacgatgatgttaatggaaagtcttcttctgagccattttccaatcctccaatcaacatgagtgtggaaagcctagagaagttttgcaaagaagcgtcgaggtccttctttgatgaagttggtctgattagccatcagataaattcctacaatgagtttgtctcgcatgggctccaggagctttttgattcgctgggtgaagtgattgttgaacctggctatgatccttcaaagaaaggatcaggtagctggaagcatgcaatcatcaagtttgggagagtgaagcttgaaaagcctgtgttttggactggcaaagatgaggtttctgttgattttaaaccttggcatgctcgtctccagaatatgacatatgcttcaagacttagagtagaagtgactattcaggtttattctttggagaaaagtgacaaatctaaaacagggaatgatggttttgttcaaaaaaggaacttcatgaatgaaactcactggatatttattggcctccttccagttatggtgaaatcaaacttatgtttgttgcatagtcttaaggaaagtgagtgcctgtttgatgcaggtggatactttttggtcaagggaatggagaaggtatttattgctcaagagctaagatgtctaaggaggctttggattagtgaccgtccttgctggactatctcttttatgtctgaaatgaagcgtagacgtatatatattaaactagttgaatctacaaggagtgaagatttcagtgggagcaaaatcatttccatttcctttttgtatgcgacaatgccagtttggttgttgttctttgcacttggaatatcgtcagataaggaagcctttgatgtgatagatatgcaagattgcgatgcttctgttatcaacacgatatctgcaactatcaaagaatctgatgagctgtgtggaggctttcgtaaatcagataaagctcgtcaatatgttgatgagttggtaaaaagttcgaaatttcctccagtggagtcctttgatgactatatcgctaagtttctgtttcctggtattagtggaaataggaacaaagcacttttcttagggtacatggtgaaatgtctgctaatggcttttactgggaagcgtaaatgtgataataaggatgatttcaggaacaagaggctggacctacctggtgaattgcttggaagggaacttagggcacatcttaggcaagcagagagacgcatggttaaggccattcaaagagatttaaacagtgaccgtgagttacaagatcttgaacgttatatagatgcatcgattgttactaatggtctaaatcgtgccttttccactggttcttggtgccatccctacaaaagagctgaacggtgctcaggaattgttgcaactctaaggagaactaatcctcttcaaatgatgtctgacttgaggaaaacccggcagcgggttgcttatgctgggaaagctggtgatgcaagatatccgaatccatcctattggggaaaactgtgttttatgtccactccggatggtgaaaactgtggacttgtaaaaaatctagctgttacttcaattgttagctcaaaggtggtgcagcccttgattgagagcttcatttcttgtggaatgaataagctgaatgacattcctactgagcacattcaaagaatggacaagatctttttgaatggcaattggctaggatcttgttctgattcagcttcatttgtatttcgattaaggtgcatgagacgcagcagtctgattgatcctcaggttgaaattaaaagggacaagcattacaaggaggttcgtctgttttcagatgcagggcgaatcctcagaccacttcttgtggttgagaaccttaataaaatcagaaagcccaagggacgctcattctctttccaggaattaatgcaacaagaaataattgaattcattggtgtcgaagaggaggaagatatacaatgtgcctggggaatcagacatttgtttgagagtgaaggagctatatctagttatactcactgtgagctggatccttcctttattctgggattaagctgtggtatcattccttttgcaaaccataattttgctcggagggtattgtaccaatctgaaaaacactcgcaacaagctattgggtactcaacctcaaatccacgcatcagagttgacactctttctcatcaactatattatcctcagaggcctcttttcaaaacagttatagccgactgtcttggcaggtcagactgcactacttttggaagaaaagatgacttcacgagaccagaatatttcaatggacaaaatgcaattgtagcagtcaatgttcatcaggggtttaatcaagaggattccctggttatgaatagagcttctcttgaacgaggtatgtttaggactgaacacctcaggagctataaggcagatgtagaaaacaaggatggaaccaagcgactgaaattgaaggaaaagatagactttgggaaaacggaaagcaaaagaggacgtgttgacaatcttgatgatgatggcttaccctacattggtgcaagtcttcagaccaatgacattgttattggaaaagtctcagaatctggagaagaccacagtattaagttgaagcatacagaaaagggaatggttcagaaagtattgctttcagcaaatgatgaagggaagaattttgctgtggttactctaagacaggtgaggacaccttgccttggagataagttttccagcatgcatggccaaaaaggtgttgttggttttctagaatctcaagagaacttcccatttactcacgacggtatagtcccagacatcgtgataaatccacatgccttcccaacacgtcaaactcccggacagctgcttgaagctgctcttgggaagggaatagcctgcaaaggtacaatgagatacgcaacaccattcaccacagcatcagttgatgttattgcagaacagttgcacaaggctggatattcacgatggggagccgagaacgttctaaatggtcgaactggtgaaagaatgaaatccttggttttcatgggccctaccttttaccagaggctgattcatatgtccgaagataaggtgaaataccgtaatactgggccggtccaccccctcacgaggcagcctgtcgctgacaggaaaaggttcggtggagtcaagtttggggaaatggagcgtgattgcctcctcgcccatgggtcagctgccaacctgcatgagcgcctcttcatgctgagtgacttctcccagatgcacatctgccagacgtgcgagcgcgtggctaatgttgtcatgaggtctgtccccggaggcaaaaagatccgtggcccctactgtgggttctgcaagtcttcggagaacattgtgagaatcaacgtgccctacggcgcgaagctgctctaccaggaactattcagcatggggatctgcctcaagtttgagaccgaagtctgctagagcttgtaggcttgcttgtatccagacatccagttattatgtacatagagttagcctatgacgatctcatgctggcagctatgtgaaatcgtgtgccgatgtgtgataccggcggcacagcaaggatgggcgagttcgatggagtgaaacggcagtgtcaggcgatcaatcacaagcatatacagcagtagacaagaaattccgatcgaata

SEQ ID NO: 23590 - DNA, 4433 bp, Zea Mays
tttttttataaacgaaaggccttccgagctcgcccccacactgttcctggttttgttaagctctcgcttaacctaaccgccgggagcagaagtgttcgacgaaatgacgaacgccggggcggcgacaggcgccgcgctaggcgcgcgcacggcgcggtcctgcgatagctgcatgcggcggagggcgcgctggcactgccccgcggacaacgcgttcctgtgccagtcctgcgacgtctccgtccactcggcgaacccgctcgcgcggcgccaccaccgcgtccgcctcccctcggcgtcctgctcgtccccaccgcgcgatcccgacgcgccgacgtggctccacggcctcaagcgacggccgcgcacgccgcggtccaagcccgggggaagcaataagcatgaggcggcgcccagctctatcgccgcggccgcgtcggcagcggtccccgacctcgaggcggaggcggaggcggaggcggaggagtccggctccggtatcctgggcgataacgacgacgaccacgggttccaggacgacgacgagaaccttctgtactgcgtgccggtgttcgatcctatgctcgccgagttctacaaccccgtggccgacgagggggagcagaagccggcctgcctgatgctgcctctcgtggaaacatcgccggagttcgcctccggcggcttggcagaggcggacgggctctccggcttcgacgtcccggacatggatctcgctagcttcgcggcggacatggagagcctcctcatgggagtcgacgacgggtttgacgatctgggtttcttggacgaacagaagcctcaggtgaacgcggacgtggacttggaggccatggcggcgccggagcctgaacgagaggacaagaaaaggaagcgggacggctttgattatctgggtttcttggacgaagagaagccacaggtgaacgcggacgtagacttggaggccatggtggcgccggagcctgaacgagaggacaagaaaaggaagcgaacagatatgatactcaagctgaactacgagggcgtcatcgcctcgtgggttcgtgacggcggatcaccgtggtaccacggcgagcgtcctcacctcgacgatccttacgagctatggttggagttcccggcaacggggagccggggacttttcggcggcaccatgacagcggtgaccggcggcgagcgtgaggcacgggtgtcgcggtacagggagaagcggcggaggcggctgttcgccaagaagatccggtacgaggtgcgcaagctcaacgccgagaaacggccgcggatgaagggccggttcgtgaagcgcaccacgctcccgccgctgccgaggccgccaccgccgtcacagcagcaacagaagaagaagcaactgccacgctcattgccacacgtgggcatggtgctcgcgccacctccaggagcggacgggcgcttccggttttgagtctttgagatcacgcacgcaagcacggaaggctcggtatcaggacatcaggtgcacaacggagggatagtgcacaaatgcacaaacttgatcctgaccttccatctcccaatgaacggtcaccgccaaaattgcaagaaggcccctccgcacctcctcctcctttcatatatgttttgcgaaaaccccctcggacgtgcttcctctctcccccaacgctgcaaggcagcagacacacgatgccgcgaatcggactcaggcagagccaccgacctcaccgtccacggcctagtcaccctcgacgtcatcgtccaccgcccacacgccgccgaccgccttgactagtcacagctgtacgcaggctctccgcagcggctggttgcagcgcgcgctggtgcccgtcaccgtgcccgccggcaccagcgcacagggccgcggcgcgctcgcgcacatcttcaggctcgcgatcagcaccaatggtgtgtttgtgctgatgaatgttcgataaaatgagttaaataagcaccattcagctaacattcaatggtaaaatttagaaccaacattgaactaatattgaagcaaaatacaaagccaattcagctatcattcaagcaatactcaaagccaacattcagctatacatcggtgcatcattctcgctctggtagcatgtcctttctactctagtattaaatttgggatgacgaattagcttgggctccccacaagatgctcactactttacgcctcaaatcagtggcagacgcaagacgagaattcatgggacccaaaaacccacatgacaaatcaagcaaaagatcgtaaaaaccagtgttgcatttaattcaagttatatatcaaaacacgatataaattcaaagaaaaaataaatgaacaaaagaagtaaacataatagcctaataaaaattgggtgtaccttgtcgaatattgatctcttcgatgggcaggtgtgccgagaaagtggtgggtcaagggacgtctctagttgagagatggggctcgttggttcgacaagctctgacctccaaggacgggtcacatcatcgcgacgaacgaaatctgacctatcgagcaagctcgctcatgaggatgacgagcgaggcgggggcaccgggaaggggtggggttgtgtagtgtcgcgacataaggaacgagacatcgaagcggactggatcaggcggtgtcgataagaatgggactgggtcatagtcaaaatgttcctagatcgattggattgagaagcggggtcatgggtcgtgggtcgacactttaaaaggagaagtatacatctatgagacgagaatattatgaatttgatatgttgagtctaatgggccgatgatcttgggtcgattctatgggtcaagggtcgtgttctaaaatttcaataacaacctaacaccagtctaatattatctcattctaccattgaaactttaggctatctctatcagattccatatcttatcctttattttaaactttactctacaaacagtgtcatctacagtcatgcatcccctattttacaccacctgctggagacagtgttatatttatgcaaacagaaaaacttcaaccgacctaaaactttaatttttctatactaacattaaatgaacattagatatataagagagaaaattaagggggacatggcccactttgcccccctctcggtctgcccctgcctcaaatatatctatatgtagtacttggcatcaacctagctcgcgatagactgagcatgggggcagacctgctctttgataacgttcagctcctcgtcactccggccggtggtgtatccctcggtgattacatcggcaccaatctcatcaaaatgggagaccatctgcccaagggccagactgcctccttgacaaatgccctagtgaccatgcactccacatggtcaggaagcccccgcaaaagatcaactagagacgcctcgatcgatggcagggtcgagagacgggtgcacgccgtgccggcaaccaaacgaagctctcggagtttggcgctcctttctcacagcaggacgtccacctggcgcgttgcagcgatgacgctatcatgggcgagcaagagctcgcgcgctttccccgctgtcaatgtgtcacacccagttctagaaggtaaaccgaatgcgaaccatgtacgtgtcaggatcagaaattcacgtactcaacgattacacaattggacatcatcacacaatgctcaaaataatagcggaaataattataactttattacatcatgatgtccaaaacattcacatagtcattaacttaaacataaatcaaagtgttgaacgagacgcggtaagataaggccttcataggcagccgactgggagtttgccgctagtctagattagaattccttgaagatctgaaactcctagaaatccttagcatttccttcatcttctcctgagcaatggttgcaatagggacaacctggtgtttggtgtttaagcaagagtgagtacacatcaacgtactcaacaaatgtcatgtttggttgaagtgaactagctgtatgtggggttaagctcaaagcagttgcttttagttggtcaggtatttatcattaatagaagccaagtttaatcacaaacccaagctgatattccaagttttatatacatattgtacatatgtatatatatgaaggatgtgatgttgagtatttacttttctaggattcaatatcccatggatgtgtatgggtatacagacatggaaatgctgagaagtgtaatgtacttgcaatgatgcacctacactcaggtaagaaggtgagttaccataatgggctgccttgtggttaaagtgtggcagcagcgtctattcgtggctcgtcgcttgatgaggagttggcctccatataacaatatatggagtttaaagtgtgataaactatcatgtgtgta

SEQ ID NO: 23591 - DNA, 6135 bp, Zea Mays
caattgtccatttggcctttttggtgtgatttctggactcacatttgagcttttaaaacctcctcttcctccgcacctgttcacccctttcttttccgttcttctccgtaccccaatcactgctactcaacagccaactctttcgcaaccaaatatttcttctggcgttttggggtttgcaaaccgctatcaacattggagttggagcagaatgtgatctgtccaattcttctcttgtcttatttttggcgtgctttgctcttctttccccctatttcctgaggaggggttcccgtcttaatctcttgcgtttagtgtggcttcgaagagttagcagctgccatggcacataatgtgtgggaggcggacaagatgttggattcctacatttatgattacctgttgaagaggaacctgcagaacacggcgaaggcattccaagccgaaagcaacgtgccttcggctcctgtttcgattgatgcgccaggggggtttctcttcgaatggtggtcggttttctgggacgtcttcattgcaagaacgaacgaaaaacattccgattctgccacttcttaccttgagtcaattaaagcacgggagcagcagcaacaatcgcagcaccagatccagacgcagcaactcttgctacagaggcatgcgcaacagcatccgcaagagcagcagcaatggcggcagcagaagcaacagcagcgcagcgaaaacactgattttccaactagtgcccagaatggtactgttgctgctgatccaccagcgcgacaaaatgatacaactgcaggtactttatctgcaaaagtatttgaggatagaatgaaaattactgttcagagggacgtttcagaagagacttcaatgaagcaaaggctcactgaaaccatttgcccattactggaatcaaacccaacttcaatgctaaagtcacctgcaagatcatctctagcttcagggccaatcttccaaagatcagctgggggcatgtccggttcattacagcaagctcagttcaggagccagccacttctgggatcaacacaggatattaaggcggaaacaaatgtagctttgaaccagagagctgcaggtgcagatggatcactatttggagtaccaggctctaatcaggcggggaacaatttgaccttgaaaggatggcctctcacaggattagaacagcttcgatctgggtttctccagcacaaatcttatatgtacccggcccagccattacaacaccagctccagtttctcactcctcagcagcagcatgctctaattcatgttcaagcacaacaaaatgccacttcacctggagacatggataacagacgacttcggatgctttttagcagccgaaacttggttcctgggagagatggtcaatcaactggtttcactgaaattgttcccagtgttggccagtcattgcaaaacatgtgcttacctatgcagcgcactgagacagatatgctgatgaagaagatagctgctctacagcaacaacagccgagtaacaatctgcaacagctcctccaacatccattactgagtcagcaacaacaaagctcaacttatcttgaaggtgagcaggaaaaaatgggtgctggaattgtaacagtggcttttgctggaaatgaacaggtttctaagaatcgaaatgggcgaaagcgcaaacatcctatctcctcgtctggcccagccaatagctctggtactacaaatactgctggtgcttcccccagttcaacaccttcaactctttctgcacattctcccggagaaacaatatcaacaccattgcagcaccaaaatgcgagctcatgtacgactttagttgtttatggttctgagggtccagtaccaataggatcgccgaccaatcaacttgttgatatggatcactataccgaggatgactccatggaagataatttagaaccattcttgccgcataatggcacaaatccaagagctgctggtagccattgtatcagttctggaaaaggatatatccttagagaggtatcttcagcccaagcaagcacaagcagtgttctgtgttgtcatttctcgtcagatggaaaattaattgctactggaggtcacgataagaaggttttcctgtggaatgctgacactctgaaacaaaaatcaatgctagaggagcattctctgctcataactgatgtgcgcttcagcccaagcactcctcgcctcgccacatcttcatttgacaaaactgtgagggtttgggatgctgataaccatggttattcaattcgtacgttcactgggcactcagcatctgttatgtcactcgatttccacccgaacaaggatgacctcatttgttcttgcgatggggacaacgagatacggttctggagcatcaagcatggaaatgctgtccgaattttcaagggaggttcgacccagctgagattccaaccacgttatggaggactccttgcaacggcttcagacaatgtagtctctatcctggatgtggagaggcaagcttgcgtgaggagatttgagagccacactaagggcgtcgattccgtgtgctgggatcccaccggcgagtacgtggtgtctgtcagtgaagacacggtgaaggtgtggtctttgaacgacgagagcttcgtgaacgagcttagctgcggcgggagaaagttcagttcgtgcactttccatcctacgtacccatccttgcttatcattggctgttaccagtctctggagctgtgggacatgtccgagaaccggagcatgactgttgcagcgcacgacagcctcgtctcggccctggcatcgtcgagctccggcctggttgcttcgagtggccatgacaagtatgtcaagctgtggagatgagcttcgactttcctgccctggcatgttaagtacggttgtggacgcgccccaacccttttggcaccattagctatctgcttgcattgcagtagcgctcaggagttaggatggtgactcgaccgcctgactgaacatgtgtccgctgaagtagcgtgcagtaaaaccctgaagaagtgggtttagcgcctagcttttgtataggaaattagaacacgggttatgttaagtatccaatgtctgtcactaccttgacatctgacatggcttgaaagcttttgctgctgcaactcggcttccgaaagggatcacatttctgtgctcgtgggtggcgtgtgtggtgtggtgttgcgtacaagacaagatgcaaggctagaaagataacggcagtcccaacttagaagaaaggaacccttgtagcccgtgatgcctagctaacgcaacgagattcccgtgttcaattctaattcgcacgtaggagtagcagatctgcggatctgccgttccgattcctctacgaggaagaacagctatgcctccggtcattcaagatctgtggccttgtttgctatgcctgcgtcgaatcatcttcttcgtctgcagacttgttcgagacgccaccctcccccgccgcgcgccgccgcccgcggacatggatctccttcgctctcatctccacaaggtccggatccccgagccaaccaaccgcatccacaaggacgagtgctgcgtctccttcgacactccgaggtcagagggaggcctgtacgtggacatggtctcgttcctggggttcgggagggagtacgtggagtggaacttcgagaagacggggaaccccgtgtacctccacatcgttcagcgccggaagccggagcccgacgaggcggatcgcccgcttaagaagcccaccctcctcgctataggtgtggaaggaggttttggtgatcaagaaccagaatatgatgaaacttttgaaatagtcatcttacctgattttatttgtcttccatttccgtcagttgatttgccagagaaggttaggcttgcggttgataaagttttacttgctgaaagtgctgatagaaaagaacaactggctgcttgggttgctgacaaaaagaacattagtgcatatgctatggacctgcagcagctagacaatggtgttattgtgcctcctactggatggaagtgtagcaaatgcgataaaactgagaacctctggctgaatttaactgatggtatgatcctttgtgggaggaagctctgggatggaagtggtgggaataatcatgccattgaacattatgaacagactaaataccctcttgcggtgaagcttggaacaattactgctgatttggaagcggcagatgttttctcgtaccctgaagatgatagtgttgaagatccgctattagctcagcacttatcacattttggtatcgatttttcttcactccaaaagactgagatgactactgctgagagggaacttgatgctaacacaaattatgactggaatagaatacaagaaagtggaaaagacgctgagcttctgtttggacccggctatactggtcttgcgaatcttgggaatagttgctatatggcttcaataatgcaagtcatgttttcaatccatcctttcatatcaaggtacttcgagaaacagagtttgaaagctgcatttgcaactgcacccgctgatccaacagtagacctaaacatgcaactgacaaaactagcgcatggtttgctctctggtaaatattctgctccagcaaaggaggggcaagaagggatacgttctcgcatgtttaagtcagttatcactgcgaaccatcctgaattttcaagcatgagacaacaggatgtccttgaattcttccttcaccttattgacagagttgagaaggcaaaccctggagaccgtgagctaaatcctttttccggtttcaagtttgttgttgaagagagggttcagtgcccttctgggaaggtttcttacaacaaacgatctgacaacgttctttctttgagcataccactgcatgaggcaactaataaagagcagctagaagcttttaatgagaagaaagctgcaatgaacttggatggaaaagaagtgtctaatgaggatattgtcaggcctagagtcccattggaggcatgcttgtcaagtttttcagggccagaggagattccagatttttatagcactgcattaaattcaaagactaccgtcactaagacagctggtttcactacctttcctgattaccttgtgctgcacatgcgtaagtttgtaatggaaacaggatgggtgccaaagaaactcgatgtttatatagatgtgccagatacaattgatatcacacatatgcgcagcaaaggattacagcctggggaagagctgctacctgaaggaggttctggtgacgacagtgccgagcctgctaatcctgttgccagtgaggatattgtaacccagcttgcaagcatgggcttcaactaccttcattgtcagaaagctgctattaacacatcaaacacaggagttgaggaagcgatgaattggctcctctcgcacatggatgatccagatataaacgacccaatatcaaaagattcacgtgcttatgagccatctgttgacgaagcaagtgttcaaactctcatctcctttggattccaggaagacattgccataaaggccctgaaagcttctggtggtaatatcgagaaagctacagactggattttcagccaccccgaagcatctacctcagcatctgctgattcttccactagcaatgtaaatgctgatgacacatatattccagatggaagtggcagatacaagctgatggcgttcgtgagccatatgggcacctctacccactgcgggcactacgtagctcatgtcctcaaagacgggaggtggacaatctttaacgacagcaaggtcgcagtatctgttgacctgcccaaggaaatgggctacctctatttctttcagaggattagcaactaggcacgtcacacacaatggaaagaatggtgggctgttaggatactgtcttgctgattttaaagcgaacgtttactcacatcctgccatgctggttactgaatggtcaaccgggatatttgcttttttgttccttgagacctcgattggcatcttccggttacataagaacaaaatcgcaatgaaagaaagtagacaataagaca

SEQ ID NO: 23592 - DNA, 3784 bp, Zea Mays
gcaaggttctgcctggttccccgccatcaacgcccggatccccaccctccttcccaccgccgccgcaatcaacgcgctcctcccccacgtggatccctccaccctcctccccaccgccgccgctcgaccgcggtttcgtcgcactccttccttcgaaagcgctcctttccatcctcgattcctccttccttccatgtcgctccttccttcgacggccagcctcatccggtcattcctcctcgctgtgccccctcccccgtattcaaccacctcttcctcctgcggatccaccaccgccgtcctcgcccaacgtctccttgacgcatatgcccgcagcggctccctcgcgtccccaatgttgagtctggcctgtatggaaggagtgcgggcgtgggtggagtgtgtagagaaatccaagcgaaaccccgtgagagcgaggtgacggcagacggaggcgagtgggtgagctgcgggcgagagacgaggtagcgggctagcggatggcgtcgctggttgtagtggccgcagcgctgctggtggcggcgctggtggcattctgcggcacggacccgctctggacggggttcgagtcccacctcgtcgaccttcccggggttcgagtcccacctcgtcgacctccccgatcccgccgagatgtcgacgcacgcggacgaacgggagtggctccgcggagccgaggtgcaacccctccaaaccggcgttcaaggacggcgccgctcaccagttgtatctggttgtgaagaactaggggtgggagcgcctgtatggcgggcttatgccttctctcatcggcaccgctgcctcccagccttgagcgatccaggagagggcttggcgatgggtctgttgggatgctccagtctctcactgtctactactacttgtaccaaatatctactggactctggatgggcatcgaattttatgctataaacaccgattcccaagcccttattaattcacaagcgcaatatcctctgcaaattggagagcagttgacccacgacttaggtaccggtggaaatccaaatttgggagagcaggctgctgaggaatcaagagaaaccatagccactgccctgagggattcagatcttgttttcataacagctgggatgggagggggtgctgctccaattgttgcccagatatcaaaggaagctggttatcttactgttggtgttgtcacctatccattcaatttcgagggccgtaagcgctctttacaggcaagtatctgagccccccttcactcctgaattagaattcaaactgtcatatctcgttttgcgactttcttttgctccatggaagcattagtttgtagtcataacaatgacatccaaccacatttattgttgatcatgtatacaatggtcggtcaaataaaggtagcatattgcgagggcggtcctcgtcgctcccatgtgcaggatctcccatgtgacagatggcttggcaagattatactagagacttgtatttctcagatccatatttggcttaggtatgattcttgtgtcaatgctacatatatttttcctaattattgtaggtacttccatttagccttgcgacaataaatattttgtgcgaaacacatcatctcttcacggttcaatacgatcatcggctatatatcctggctgatcatcgtcaagagcattagtagttgctactgatatatataggtcagctctttgctcttttcacatctatatcaattgcttgccccacaaatgatcagccagggtcaggtaaaccatattgtgtaaccatcactataacactgcaatcattttctaaatagtacttttataaatcacaaatcgaaggtataaatacaaaagtgtagaaaattataatgagaacattacctatataaacaagaaaggaaaaccaatgatgttttccttgttgaagttatttgtggcttttacaatgtcagagaacgtgagcttgttttcatttacttttccttgtggcaccatgatcactccaaatgcaattgcaagaatggccttcttatttcttcctcctgtggataccagaggcacatcggctgaatcgcatcgacgaccgatcataaagccgcacagctttggattccctagaaagctggagttctgaaatgtaccaaattgaccaccggttggaataggcccctctaggtcattgttagaaacgttgaatgtggaaaggaagtgcagattctcgaatgcaactggaattttacccgtgagatcattgctggataaatctagcatccagcaggtttgtgagattgcagatagatgtggggatcggtccggttaagctgttggagctgatatcaagtgaaaggaggccttttaactgaccaatctctgggagaatcagaactgtgaatatgttgctgcttagatttagaattttaggaaaagcaatcggtatccggtacggtttcttcaaagaaattgatgccaagaagaagcgtggtcaggttcttagagctcctcagtatctgaagcgtgtttgttatatttgaaaggctgttgtttgggcaaggcgaatcaggcaagagttgatgacgagcggctaaactaatccaagagttgatgacgaccggcttgttctttcacttgcaacgacttagagtcgggcgacctgcaagatcaaggtgcatggtcgtcgaaggatggcgacggcgtatcctcgttcaggcaaggcgaatcaggcaagcatctatttggaggttggttagttatcccatgtcatcagacatcacgcaggaatcaagtcatccatcaggaagcagccaactctgcctggactaacccagggcaaaggcaaacagcaaactttccaggataagtctctgacttcgttatactttcctgtgtgcaggaggtcttgaagatctggaactgcaggtgcagaatgctattgcagcagttgcagctccacccaaggaaagcaatagtgtcagcagcaacgatcctggtagctcgtcctctgtgatttttccgtctggtccagctgatcaagtccctgttcctgctacctctccagaaattgagccccgttttgcaaaccaaatccctgctgcttcttcggaggttaaggcaccatgcatggcagttaggaaaccttccattacggccttatttctgcagaagtatgacaccaactttcatctattctctaccaccaaagagatggaaaagcaggttgcccccacccccatagctttctgttttgtccctataacaggtttacctatgttatatatagacaccgtagcaatgcacgtgtaatggtagattttctgattggttagtttggaagtgaagtaggtgccaatgttgtgcatgagcagaagaaatattattcccttcaatattagtagaggtagagatatttacttttatcagtatttgtgttgtgatagctatttttagcctaatgtttcaggtcaaagggccatacttcatagctttttgctcctcattgttttaagtgaaagggcgccaactattcaaaatttactctaggtagataattttcattgtcgagttttattttggtatatgtaactttttgtaattgggcctaagcgtattggagcactctaagttaacaggtgcttgaagctgatgatgaaattatacagcttggatgaataaacctttgttgtagtgacataaggagtttcgaaattacaaggaattttaaatttgaatatttttcagtgagatgttgaggttgataattttaatctttg

SEQ ID NO: 23593 - DNA, 1344 bp, Zea Mays
gctgggacctgggagtgggtcctcactcctccccctctctctctatcatcacccttcttccgccggaaggaaaagagaaaaacacacactctctttccgagctctctcgctgtctctcacccagccgccaccatgtcaggcctctacaaccagggcttctcccctgcaagaaccctctccccccagattaggagcaaccccgacgctgatagccagtacttggccgagcttctcgccgagcaccagaagttggggccattcatgcaggtgctgccgatatgcagccggctgctcaaccaagaaatcatgcgggtgtcaagcatggttcatgaccatggatttagtgatcttgacagacgccggtttagaagtcctagccctatgtcttcaccgattgtccggcctaatctacatggaaatggttttggtccttggaatgggatgcaccaagagagattgggctttcctcctcctggaacaagtatggactggcaaggagcaccaccgagccctggctcttatattgtcaagaagatcatgcgcttggaagttcccgtcgactcttaccctaatttcaactttgtgggacgcattctagggccaaggggtaattctctaaagcgagttgaatcatcaactggctgccgtgtttttattagagggaagggttccgtcaaagatacagaaaaggaggacaaacttaaaggaaaacctgggtatgaacatctgaacgagccactgcatatattaatcgaggctgagttaccagcgaacattgttgatacaagactgagacaggcacaagaagtcatggaggaattgctaaagccagtggacgagtcacaagatttgtacaagaggcaacagctgagggagttggctatgctaaactctactctgagagaagacagtcctcaccctggaagtgtctcccctttcagcaacggcggcatgaagcgcgcaaaaccaagccagtagagaaaggtggtcgagacgaggaggaaatcgctggtcgttgaactgtctccatcttcggtggatccggccattttgctgctgtaaggtgatgggcattcgttctattcgttactgactgttgaccagattatgatgccgtggtttcaggggagactagctatgcctatggccctgataattagtgtgagctggttcgtttaggtgtttaattagtttgtattattattattcgcgttacgttgtggagtagtagcaaacgtcacagctggtgatgcactccgctctgacagtttgatgaggacagctttgaataaaccatgtgaattcagaatgttactgaaacggtgggacgtccgttctatgcct

SEQ ID NO: 23594 - DNA, 4965 bp, Zea Mays
gtataattgattactatttcgtttctgtttcatgtaattaatgtatgtaattaaattaattgctcccggccatagcaagcaccagcaagaagagagagacagagagagttggtgaagtcgggggacatggtttctttctccgcttcctaagattcctctttcttccccaaccccaccctacgccttttgccacgccgcacggccgctccctcccttcatgcgccgccgtatctcaggtcagcatcgccaaccgcagctccacctcccgatcccagccccaatctaggaggaggaggaggaggagaaggccactttcaggattctgacgaagccctccctccctcggccgcatcgcatgctaccacgactgaccaccaccagcagcagcagcagcagcagcaggaggaggagggcaggatgttcaagcttcaccgccaccgctcctccgaccgcgtcggcgagcgcttcgacttcagattctccaacttccgcgccgtccaggtccctgcagtgtcagacaggctcttcctttccatagtttcagtcgacagcggaaggacaattgcaaagtccagcaaagtagcttctcggagtgggatatgccagtggcctgacacaatcttggaacccatatggttctccaaggacgaagtctccaaagaattcgaagattgccagtacaagattattgtttccttgggatcgacaaaatctggcattcttggggagatttttctaaatctgtctaattttctgaatatagtcgatccaaccgcaatctctttgccactgaagagatgcaacgccggaacagttttacagcttaaggtccaatgtcttggcacaaagtctaagctgagtggtgtcagatcactgagggacatggctccccgtctcgatgaccgtagtccaacgccaaccaatgatgagatggacaataagtcagattgctctgatggtatgttcaacaggagtgttcgttcttcatccgaaaatcatctggttggaacttatcaagatgaatctggaaacagggaaacaagtttctctgcaccagggtcccatcggagttctaattctggagatagtactgcggatagaacaaacttctctcctagagacaactctagtggaggactttatgtgggaaggcaggattctgctagttcctatgctagttatgttagtgctggtcgtggcgatgatgggcttagatccaataattcatcttttagttctcgggcttcaggcccaaatttgctgcaagggaatactccaaaaatattttcaaatggcctttctcaattatctatgggggcatctgactcatctaaagatcttcttgaagctgctgaagaaacaattgaggagctccgtgatgaggcaaaaatgtgggaacgccactctcgtaagttgaaggctgatctagagatgctaaaaaaggagtgttctgaaaaatcaaagcaacatgctgagctagcaggcgagctatctgctgcacaagctgaacgggattcctataggcatgaaatagaagaattgaagtcatccttacaagatgtaaacacacggcaaacaattacaggaacacctaaacgttcagactggatagacctgcagaaggaacttgaaggtgaggtgaagtttcttagagaatcgaatgcggacttaaccatacaactaaacaggactcaagagtcaaatatagagcttctttctattcttcaggaactggaggaaaccattgaagaacagagagttgaaatatctaagatttcgaaggtcaagcagactgctgatcctgagaatgggcttttagtaaaagaagacaaagaatgggctaagaaactgtcaatgaaagacgatgaaatcacagttctgagggagaaattggatcgggctctcaacattggaaatgcaggtggtgctggttccaatgccatttatcttgaattggagaaagaaaatgaaattttaagggctaaaatacaagagcttgagaaggactgctctgaactaacagatgaaaatttggagcttatatataagctgaaagaaaatgggctcacaaaaggtcaggttccacgtatttcaaacaacaatgagctgcaatttgaaaagcttacatcccggattcgtcaactggaggaggaacttaggaataaggaaatgttaagagacgacagtttttctgagtcatcaacgtctaatgcagatgagttacagagaaaatgtgctgaccttgagctgaagctgctaaattttaggtctcaaacctgtgagctggaagaaaagttccaaaaaagccaagaggaactggaacaaagaaatctcgagttatccgaactgagaagaaagctaaacggtttacattctactgaactggaagtttttgaatctggtgcgacatggaagtaccaatctagaacagcagatctagaggatactgaacctgagacagatacgctaaaggctagatttgaactgcaactacaggaaaatgatgaccttcgaagttccaaggttgagatggaaaattttatttctgagattcaggcagagaagagtcagcttgaggaacgcctgtccgtgtcgcttaaagaaagcagcatcacatctaaatgcttggatgaagtgcggaaagatatccttgtgctttccagcagtatagattcccatgtttcagctaataaggttcttgagaggaacataattgagctagagagctgcaaagctgaactagagttgcatgtatcagagctggaacaggaaaacatagagttgtcagaacggatatctggactggaagcacaattgacttatctgacaaatgaaaaggagtcaagcgagctacagattcatgactccagatcgctcatcattaatctcaaagataaagtagagcggcagcaatccgagatggaaactcaaaggctcgagtttaagcagaaacaacaagaatctcaaagaagattgtcagaaacacaggatgattctgaagttctgagaagatctaattctaaactacaatctactgttgagagccttattgaagagtgcagttctcttcagaatctaactgctgatctgaaaaggcagaagttggaaatgcatggtcatcttacgcaaaaagagcaggaactggatgagtcgaaaaaaaggaactttgagtttagcaaaacagtggaattccttgaggcaaagctttcgtcactacataaggacgtttcttctaaagagcaatctttattgtcagaattggagagtatattccaggagcacatggaacaagaagaaagaattaatcgcgcgcatttcatgctcaataagatcgagaaggaaaagactcttgaagtagagaacctcaagagggaggtcgtcagcctcactgcacaggtctcctccacacatgaggagcgagaaagtgccactctggatgctattagagaggtatctgtcctacgagcagacaaggctaaacttgaggctaatcttcaagatgtcagtacacaattgagacattacgagtctcaattggaagacctccgaaaggagtctaaaaataagattaaagggttggttgattcccttaatgcctccaaacaaagcgaggaaatgttgacatcagatgctgaacatatgaaaaagttgatggaagctgctagatccaatgaagacacgttaaggaagacttctaatgaactagaattgaagcttaaatccagtgattatgagaaacaacaaatgctggaagaaatatctggcctgaaactgcaggtccagaaaataatgaatcttcaagatgaggttttcaaacttcagagttctcttgatgaggccaagttcggaaaagggaaactggaggagattctacgctcggtgaccgaggaatgtgaagaactaaaagcacagaaggctatgctaacagataaagtttctgatatgcaggagactttgagaaatggtgaagaagaaaaacgaaacagaatagctatgcaggcaaagctcgtgaggctggagagtgatctgtcagcatcagaagcatcacatgtacatgaagcagaattaaagaacgaactcagcaggatcaagagatcaaacagtgagtaccagaggaagatacaatctcttgagcaggaaaatgaggatctcactagaagagttcaaactatggaaaagggatttgagcaaatgtcccacgttaaagagaaccttggaaagcaggagcttggaggagataaccaggcagccattcagtcaaaaattgagttattggaaacgaagctcgcagaggcattggaggaaaacaagatgtacagagctcaacagaagagtccgatgcctgaggggcaaccttctgcgggagcgggagacggcaaggagggcaataccgataggattttgcaattggaaggagagctaagagatatgaaggaacggttactgaacatgagcttgcagtatgcagaggtggaggctcagagggagcggttagtgatggagctcaaagccatgaagaaaggcaggtggttttagcaatgatggagaactgttgcctgacataaaacagacacaggctgactgacagcacagatgggcatgtcatgtgagagcaagcaaagcaaatgcaagtgatgcagagcctggacctgctaactggtgctggaagatgtgtatcccaagacgacactgaaggtccctgtgaccacccagcgcccctacatgacatgatgatccaattgttattgcgtagatcacggataataatgaagtttccgttgtgcggttgtggtacgtgcatcgcattattgatgaaacttttaacctcaggagggcaaagtgttgccagctgaattagggaccacacgattgcattggtttagaagtgttgtaactaaagatatactactaattagctagtgtttgtactacatctcctctcaccctggtaccagtgcacttgcg

SEQ ID NO: 23595 - DNA, 792 bp, Zea Mays
gaaaagcaggcccatcttataacattcaggtcacggaggaaattcaggaaacaagatttaacactgcaatatctgcaatgatggagtttgtgaatgctgcatacaagtgggaaacccagccaaaatctgttattgaatcctttgttctgctgctttcacccttcgcgccacacttggctgaggagctttggtttcgcctcggacatccacaatcattggcctatgaacagtttccagaggcaaaaagtgagtacctggaggaatcaaagcttgtactccctgtccaaatcaatggaaagaccaggggtacaatccttgttgacaaagcgtgctctgaggatgatgtttttcaaattgcagcctcggatgagaaactctccaaatatcttgatgggaaaggcatcaggaagaaaatttatgtgcctggaaggatcttgaatgttatcttagatcaacaaaagtcaaggacctgataattgctcttgtttgtccatttatctcgttatgagtcaggaatagagatcaataagacatgacagatctgtaaatttgttttttagcacttgcagtttactgtcaatttgccaacaacaacaacgtcgaacactcgttaggttaatgttaaaatccaacagaaaccgtcagtcaaggttaagcatatggatagttatttttatgcactctttggggtatttgaaactgctctaggttccagcttcagtgtggagctgtagtttacaatacagatttaaatagttttaacaaatatttttaatcaaaataataaacaaa

SEQ ID NO: 23596 - DNA, 489 bp, Zea Mays
aaacgctataagcctaagggtttccatttcttaaaaagagtatgcatttaaagagcagtagtactgatttcctaacattacactacaggggtgatccgtatgccgaagattattaaccgtttccatgccaaccgatcacacagtcacacagtgtgaattcaagaaagtagaagccatcaaatcaaaatgtgaggaaaccaatcaatcaaataaagaggacgcgattttgtaccagcaactgcaaatcccatgcaatccttaggcctcccctcaaccaacgttacggcaaaagctgaggtgaaagtgtcaccagcccccgtggtatcaataccttctgtggcaggaattatcggctgtctgattggctcctatccctcaacaaacaaagcagcagatccttgcgatccaagtttaactagtacttctttcacaccctgcacaaggaaatgataaagaaatcacgggttctgaaaatgaatgtaatccctg

SEQ ID NO: 23597 - DNA, 867 bp, Zea Mays
tttgagtagcgactcatcggtttctcaccatcacttccacttggggatttcaatcgaatggaccctgcggcgcggcttcttcgtggagaagaggttgctgccgaagccaccgccaggtagccatgtcgtcctccgtgctgagggctgcggccgacagggccattcgcaggcaggccctcacgctgacgaacgccgcggtgtccaggatccggcagctcctcagcctaaggcaacggccatacctgcggctgggtgtcaaagcgcgaggttgcaacggcctctcctacaccctcaactatgccgatgaaaaggggaagttcgatgagcttgtcgaggagaaaggagttaaagtactgatcgaccccaaggctttgatgcatgttataggcaccaagatggactatgttgatgatccattaaagtccgagtttgtgttcataaacccaaattccaaagggcagtgtggctgcggtgagtctttcatgactacaggcagcaaagggtcgacgtcatgaggcgtttttcagtgtaaatgcttagccaagtgtctgcaggctccagctacagattttcttgtgtctgttgcgtcgcagttcattcatatatataataacacagcagtgggtttgtactggatatgcaactaactcgcatttacttgtaagttcacctcaaatgttgttattacatggtctgactctgattatccatgttgtgtatatttgatcgctcgcgatttaagacctcgaaatttgcacgctgcagttggttatttgtaatcgtattcagccgctctgcctctgcataactgcaggagaagagattgtatatatctgactgttatttactgcttagcaaaaaaaaaaa

SEQ ID NO: 23598 - DNA, 2726 bp, Zea Mays
ataggtgttggcccgttgttacgagaagctatagaagagaagaagaaaaaaaaatggtaccatgtcacgtggtgatgggctgacagtctgtctgcatatgattcgtgggccgttctgggcatatatgctggatgaatactttccacaagatagataagcgaggcctcttcgttcacctctgtctcgctttcctttcccgttcaccccaagcccccaacctgcgagctgcgacaagttcgtctctctcgtggccacgactggccgccgcccccgcctccgtcccctcgcagattcccaggtcttcgccgctcccttcgccgccaaagagcacccactaggttaaatccgccagggggaaatctccatcaagtggctcgtgctaattatgcgatcttcatgggctgactcagttgcgaacgccgaggaatcggcgcccgcgactgctgctgctaatggctctgttgcaactcatagcacctcgcgccctacgcgcagctcctacgtgcctccacatcttcgtggccgctcagctggtgctgctgttgaagctcaagcaggcttagtagcaccagcacaaggtggaccactgccattggctgctgcacaaccttctggtcagggtgctgctgttggtggccctcgctgggctggcattgtgaatggtggtggtggtggtggcagcattggtgctcctcgccagggccatggtggcggaggcgggggccgtggtgcttggaactcccgtcctggtggttgggaccgcagagaccgggagccagatccgtttgcgaaagccgaggctgaagaaattgatttcgacggccaggagaatactggcatcaattttgatgcctatgaagacatccctgttgagaccagtggccatgatgtgcctgcaccagtcaacacatttgcagagattgatttgggtgatgcattgaatgacaatatccggaggtgcaagtatgtgaaaccaacaccagtgcagcgttacgccatcccaatctccattgctgggcgggatctcatggcctgcgcacagactggatccggaaaaaccgccgcattctgttttccaatcatcagtgggatcttgaagtcaccaaagccacaccagaggtcacggagtacaaggaccgcttgccctctagctctgatcttatcacccactcgtgagctttcagtccaaatccatgaagaagcaaggaagtttgcataccagactggtgtcagagttgtggttgcatatggtggcgcaccaataactaaccagctgagggagttagagagaggtgtggaaatcctggtggcaactcctggtcgcttgatggatctgttggagagggctagagtctcacttcaaatgataaagtatttagctcttgatgaagctgatcggatgcttgatatgggttttgagccacagatacgtaaaattgttgagggcatggacatgcctcaacgtggtgagaggcagacaatgttgttcagtgcaacattcccaaaagagatacagaggatggccgcagatttccttgctgattacatctttcttgctgttgggagagttggttcaagcaccgatttgattgttcagagggtggagtttgtcctcgattcagacaaacgaagctacctcatggatcttctgcatgcacaaaaggctaatggcacacatggaaagcacgctcttacattggtctttgtggagacaaagaggggggctgatgccctggaggactggctttttagaaatggatttcctgcaactagcattcatggagacaggacacaacaggaaagggagcatgcccttaggtccttcaagagcggagcaactcccatccttgtggcgactgatgttgctgctcgtggtcttgacataccacatgttgcccatgtgattaattttgacctccctaatgatatagatgactatgttcatcggattggaaggactggacgtgctgggaaatctggtcttgcgactgcattcttcaacgagagcaacactacgcttgcaaggccgttgagtgatctcatgaaagaggccaaccaggaggttcctaagtggcttgagggatacgctgcccgatcagcctacggaggtggaggtggtagaaaccgcagacaaggtagcagtgccagatttggtggccgtgatttccggcgagataggggcagtggtggaggatatggtggtggttcctacggaggaggtggtagaaaccgcagacaaggtagtggtgccagatttggtggccgtgatttccggcgagataggggcagtggtggttcctacggaggaggtggtggtggtggtggaggatatggcggatcatcaggatacggtggtgcttatggcggcggcggcagcagtggctatggtggtggtcagagtacgagttcttgggactgaactgaattctggttagaagtgaaaaatgggtcaacctgttgggtgtgaaaaatgggtcaaccgttatcgattagtccctgttggatggagcgaatgcctgaaatttgttgcttgacttgcgagtacggtgtcaggaggtttcccagtgccttaatcttgcattttgtgttgtactagggattgcttatgttattatctgaattggtggtttcttttctacgcctcatgcttgtgctgtcttcttcacaaagtatcttgtgctaacttctgatcatagatataatttcatctaggtctcatttatatc

SEQ ID NO: 23599 - DNA, 933 bp, Zea Mays
ccttccagttcccacgaaaaaggaaaaaagaaaactcaagagcccaggcttatctagaaacctcgctaaccctcgaggcctcgagtagctatgaagcagcgaggcgacgacggtgccgacggcgcagctgctttcgccggctgcctggattgcagggaggcaacgccgccgccgccgccgacagtgacgacgctgctgccgccttcggtttctaactccttcgatcatcgcttttctgaggtacaaacttagttccatggcttccgatgacactgctgaaatgtgaatgttctgtttcgacgacgttgccaagaaaattgttgggaaatcatacaactctcctatcatcagttacagggacttcaactatcctactagatttaacattgatcgtatctcttaaattcacatttgtagttgtgtacaaccaaatatcatttgtggatttagagaaagaactcttcatgaagtcattcatagcatcatatggaagaaatgtcattgccatcacccagatgaaacattccactatctgtcaactccaacaaaactattgtctagaccaaaacaatcattctccaaattaacaggatagtcctggagatgaaggccaggacctaccgtcgtttgagtcaccataaaaaagaagcaacattcgattggttggttggctaacggacccagcgcattgtccaaagctcaaccgcagcatggcgggaggcagctcatgcacatcagccagtcaccgatcgagcatcggcttgcggtaccggatagagcaagtgatacatttggcggatagatagccagcttttgtctaatactatagtttacaatgttgtatctaaacactatttatcaaaaccatggtatgtttggagctaccaaaactacggtattatcatagcaattgcaaagtataatattataaaa

SEQ ID NO: 23600 - DNA, 1026 bp, Zea Mays
  misc_feature (1025)..(1026): n is a, c, g, or t
agacgtcccctctagggcttgttcggttattttcaatccatatggattggaggggattgatacggattggaggggattttgacttattgtggattgaaaccccttcaatccccctcaatccatatggattggggtaaaaccgaacaagcccctagcgggaatcgcaatctcaggatccagccgagcactcgacagtcctaaactcctaatccggtgcccaagtgctgaccttgtctgcatcttgtgacgcttggcgtgtcaaccaactttggtcttcacagatcagagatgaaccacagtcaaggttctagaattattcgtggcaggggtagaaataaaaggatgtggacatcagatgaagatgacgagcttgtcaaagctttgtgtgagatatctgctgatcctagatataaggttgaaggaggggcctttaagaactgttactctcaaggcatagagaacattctttcacaaaagctacctggtcgtggtattaaagccagccctcatgttgattctcggctgaaagtgatgaagcggaagtattattcgatcaaggatatgatagcatcgacaggcttctcttgggatgacacaagaaagatgatccagtgtgaaaaacaacgatatgatgaatattgcagagaccatcctagagccaagggtctgtatggtgtcccatttgtatatttcgatacatttgatgcaatatatggcaaggacagctctgctggggaagggttggaagggtctgaagctgcaattgctaacatggagaatgaaaatataaatgaagttggagatgacgaagtggaagaggacaggatgtccacaggaatatctggtcgctccccggccgcaacgttaagctctaagagtcagaagaaagacaattatgacgggaaaaggaataggaccgaatcaaattgcccatctctggacaagttcaaggatgtacatgttcagtttcagaatgccattcagcatgccagcacaatggctgctgcaatggagctgttcaaggnn

SEQ ID NO: 23601 - DNA, 1998 bp, Zea Mays
tccttctgggcgcaccaggaaaaaaattgatacattcctcggcagctgcgcgagtcctctgttgatacccccggcgacccaaagcccccgtccgagcagcagcagcagcagcctaacaggattggggatttttttttgcttcgtgttctccttctcctgctgtaggcgttgattcgggtgatgagagatgggcttcttggcgtgcttgtgccgatgccctcaggacggggacgacgacgagaaggagggggagcagttcagaatcaaccaccagcccattgaaggctgagagagtggttcatatggacggagcccagctaattggtagacatgatgaagcaacaatcttcacgttgcgtcagcttgctgaggctaccaataattttaggcaggactctcttttggggcgagggggattcggttgcgtctacaaggcaactcttagtaatggacaggttgttgcagtcaaacaacttgatctaaatgggcttcaagggaacagagaattcctcgtggaggttctcatgctcaacctcctgcatcaccctaatcttgtcaatctgcatgggtactgtgttgatggcgatcaacgcttgctcgtttatgagtatatgccattgggatcactagaagatcatctacatgatcttgcacctaatcaacaacctctagattggaaaacacggatgaagatagctgctggtgcagcggctggtttggaatacctccatgataaggcaaatcctccagttatttaccgagacattaaaccatcaaacattctccttggcgaaggctatcatgcaaaattgtccgactttggacttgctaagcttggtcctgtaggcgacaagactcatgtgacaacacgcgtcatggggacacatggttattgtgctcctgaatatgccttaactggacagctgacagtgaagtctgacatctatagttttggcgtcgttttccttgagctaattacaggtcgaagaccacaagacagtgatcggcctcctgaggaacaagacctagttgcatgggctcgtccattgttcaaagaccaaaagaagtttcgcaagatggctgatccttcgttgtgtggccgcttcccaaagaggggtttattccaggcactggctattgcagcaatgtgtttgcaggagaaggcaaaaagccgacctcccatgagggaagttgccgcagctctctcttatttagcatcacaagcatacgacaggaacaacaacgctgctgctcatcgtaatcgtgccgggccttcaacaccgagagttctggacgaccagattggccaggacacctgcacattagctaatcaacagggagctcagatgtccatgcatgtcgggacagaccacgccatgcctgaagtgaaggaagcttcctgtagtggttcacatcgtggaggacggggcagggttaccccgaatggcgctgatagggagcgtgcacttgcggacgccaacgtgtgggccgaggcttggaggcgccaggagaaggcaagcaagatgcgatagcgaccagagcctgactgcatgagttttgacatgtcactgcaaagatgcttactttgcatacattttgaaagagaactgtgggctacacgaagggttgttagaatagaaagaggaataatgcgcagtggaaatgcagagcttcaccagagtgagcgcttcgaagatttcaccggtgaatctacagtactcagacttgtttcagtgcgtacatggatttagcttactttatacacagacacttcacactccatagatgcatgtaatagctcaataataggcacagtagactacacaatctgtctgtagttcagcggttttggaaaattaataacataggatccgccgttaggttgcatgaaatgctatgatccgttggcgggtcttgcattctctattgggtcaacgtctacatatttgtacatcgttcaaccatttacatgatgaaatatacaattaagacttctaa

SEQ ID NO: 23602 - DNA, 2009 bp, Zea Mays
acacgcctccttccttccttcctagcccttccgtcctgtccagactccagactccctccacaccagtagggactagggaggacgccgccactgcgacctgccggcagacgtctgccccctgcttccggcatccggactcccctgcgccgcagttacgttacgccggcgatctcctcggctcaacccggggcctttctctctgcgccccgccagcccagctgctagcaacccagcaggtgaaggagaatggcgggaggtggcacgggcatcaggaaatacatgggggctcttaaggacaccacaacagtcagcatagcaaaagtaaacagcgattacaaggagctggacattgctattgtgaaggccacaaaccatgtcgagaatccaacaaaggagaaatacgtgagagatatcttttaccatctttcacccggaaggcctcgggcagatgtcgcctactgcatccgcgcccttggtagacgtctttcaaagacacgcaattgggcggttgctatgaagacattaattgtcatacaccgtgctcttcgggaagttgatcctgctttccgtgaagagcttattagttatggaagatctagctcccatatgctctatctgtcatactttaaggacgattctagcgcagaagcttgggattactctgcttgggtgcgcaattatgctttatatttggaggagaaacttgaatcattccgtgtactgaactatgatgttgaaaaggatccgttgcaaattcgggatcttgatacaaatggattgctcgatcagttgccagctttacagcagcttcttttccgactacttggttgccagccacaaggggcgtcatcttataacgtcataattcagcatgcactttcaatggttgctctagagagtgttaggatccaaacagccatcaatgacgggatactcaatcttgttgacaagttctttgagatgcagagagatgacgcaataagggcactgggcatgtatagaagagcaatcgagcaggcagaacaactttcagaattttatgaagtgtgtaaaagtatacatattgggcggggtgagagattcctaaaaatcgaacagccgcctgcatccttcttggcgactatggaggaatatgtgagcaatgctccccttgcttcaacagttcaaagaaatcaggctgtactggccatagaggacagcaaaaaatcagaagttgaagaatcacaaccaacgctgcctcctccccactctccagctcaagaatctgggcctgagccagttcaacaagtcccacctgcagctgatccaacagatttactgggaatcaatgaaccaacccctgccacatctgaaatagatcaaaagaatgcgggggccttggccatggttccacaggataatgcgccaaaagcacctgcttctactaccagttctggaagtgtggagactagctgggagctggccttggtcactgcacccagttcaaatgggactgctgtcactccaagcaaattggccggtgggctggacttgcttacactcgacagcttgtacaacgaggcgcaccgaagagcgcagcagaacgcaagctacaacccttgggagaccaatccagcgtcaggcccagtgatgcagcagcaaatgtacgacccgttctacgcctccaatcaccccgtggccgcagcccgcaacgtccagatggctgccatggagcagcagcagcaacaacaacatgccttcgtgctccagcagcagcagcagcagcagatgattgtgatgatgatggcacagcagcagcagcagcaagcttcttccaatccgttgtatacggccgccgccgcccacacgtatggtgcaggggtgcagctccacgcgggcaacgcgtactctggagctgggatgatgtaagcgttgcacagaacctgctgtctggttctgaccggcatcttccgttctttcttgttttttctcattattttcttgcatttttttttacatttaaatcaggt

SEQ ID NO: 23603 - DNA, 2809 bp, Zea Mays
gcaatattctacttcttggtttaccttgaacagatgtctatatggccacactggtgcttggtctataaacaattacctggctttccaaatccatccttaaataattttgtgattaatagctgtgtttttttaactgtgttgttggagcccttatggtttctacttaaatattgtcatgaagttttttttttggggggggggggggtccatctttcactttttttgccctaacggggatcattggtgttaactgccctggtattttttgcttactctttaattttcgttttgatgctttgtaatcacaaagcaattttatttttctgatgtagaagcaaaatcacaatataatagcctttatttatgttatggatctagattacttgtatggaagttattttattgtctttgagggaacggccatttttatatatttggttcttatatgaattcacctgaaaaattaaaagctgcaatatgttgaacatttggttcctagacttttacagtttcttctaatggaaaggcagttgtgctgctgtggttcaaaccaggttcttaagtccctttttttaatgcaaagggattgttgcttaaatgtagttgggccgacctatgaaaattttacacgagcctgtgttctctacttttgtaaatttaataagcttatgcctcaatggaatattttaccatcttattaggttcttgacaaggctactgttttgtcacattggtccatgtacctttttaagtgataactaaaactctaagaggctttagttttttctcttaaatttcctgatctgagtcagtgagttttgtggatgtcaaaattagtccgtttccttttctttgctagcattgtgctgtatgctaatgcttgcattttttatttgaagtattcattttgatctatggtttccatttcattgtctatgccttgatcagctaaaatttcactcatgtgggaacctccaacactggagggaagctgaaccttgttcttctgccatcatctagcatgcggcttacctttgtttgtgatgatggttatccagagcaactagctctcttgagcaatggctttgaattttctgaagttatgattgaagaaatatcagctgataattctggacgctctttcctaatcagaatttcagaatctaaagtgttttactactggtgtgctgagaagtcgaaggaacatggaatggaacttcttgcaaagatgaaaaaccttttggacgggaggccaacactctctgatctcactggcatctctaattcacgacttgatgcttttgccactcatttacatgcttatcttcttgcatcaagtatcggtgatgttacatcattgggctcacttaatgacttcctgagtacttcaagatcacatgatcaatatttacagctccagtcagatttttccaaaacttccaggttccgtgcctcggctgctagtgcaattaagccaagctctgtctatcaagccagcctaagtccgagatctggcacttttaaagatggggtaccaagggcttcatgtgcaagggttgttgggagggacaagctgaagcgtcgtgtggaatggttaggcccgttaactgctccgcttgatacgaatcctttgacaatcaaccctgattctgccagtgagaagtgtgatgcagattgttcaaagaacaatgttagctcagttccgttggacctgcctctttcgtttcccctgttgccttctatttactcccttggcactcgtccggttcctgaggtttctttggagaaacagtttaagccttactattgctggtgcccaccatgcccatcatcgctgcaatacactgtcacccatttgcatctgccagctacacctgtagatccgttgcccctaccacctttgagttcactgctagcaagtgagcagccaccttcttcaacagtttctgtaaagctggatacaactgatctcccttcccttaatcttccgtccatactgcattcaccacttattcccctacatggtccacaagtgccaacattcacaccattgatgtccgatcccattgtgcatgtcccagtcattgatgtttgttcggcgggtcaggcctatctagtgagttgtgggccgtctataacttcagcagttcccctgctcccgagcttgaagcctctgctgccagaagcagagtcgttagtcgagagaagcgcaagggaaacactgatgaggctcatagcttcgacaccacctgcaagcaatcctctacctggaagtatatcctgggcgaataacaatgtgaagaagcatgttgatgtgtgtcccaatgaaaaagcatccggtacgtcttgtgttgctgctgtgtttggaagtgggattgcacacgctgaggatgaagttccaagcggaggtgattcacaagagccgtttgccgaatacgatggtaccagcaatgaatgtgatgtacatcattggcagaaattctagcttggctgcatcagcatggtaaatagggttttgaggattcgggggtttgatgtcctgtacgcagcagcagccttaaaagtttctgtgcccagccagcatctctatttggtttgcaaatgtaattactagtttgtactgtcttgtttttggcaaacttgctgcgagcctcgtgcttagtttggtttatttatttatgaactttaggcctgttcgaagcacccagtttgtaagaaaatggattatataaactgaagtgattccaaatatatcagtttatgtctcagtttataaaaattggattaccagtttctaaaaaaccaagaa

SEQ ID NO: 23604 - DNA, 4221 bp, Zea Mays
ccttttcctcgcgtccaccactccacctccatccatcactggagctccccagaaaaaaaggcaccaggcaattcccgattagcatctcgaattcgcgatatgacctgcggcggcgtcagaccggatgcgggaagctagtgttccattccatctgggctttgaagtagataaggagctgactgtttatatcagttccagtgttgaaagtggcaactattaacgtgtgcataagcaaaatggatagggaacttgctagcgacatggagcttgattctgttgtcttccaagtatcctcgcctgacaacagttagttctgcacctggaagatgccaaaacattccaatcttgttcatcaagtggtacttttaaactgttattggctggggatggaaaagactcttcctggtttaccaaatccaccttgcagagatttttgcatatcataagttcatttgatacatcaaaatcggtcaatggagttttagacgagatgtcacagctggaggaaacaagaaagtttcatcaatcactttatgttaaggagcaacagaatgttattagtggcgctttaacaggaggtttatttggtactggtgccatagcacagcagggaaatgatgggccaaattcatcggatacgacaaagaatgaattgcttcgagcactggatttgagattaactgcactgaaggaagagatcttggtcgtattgaaccgagcagttggatccaatttatcggcaagagaaatatctgatttatctgcttttgttcagcgatttggaacatcagagttttgttggttgatgcggtgtacgttgttgatatcggattgtaagccctctgagctcccactacagcagaattctacaactgagaaagttgacaaggatgagaatgcacataaaccttgcatcagtcctcagactaatcttcagatgcccattgccaataatgtatctccagcaaagcttgcacaaattgagcgtgagagctcaacagaaagtgatgattcctctgaatccagtgatgaaggtgaggccattgttgaaaggagccgtcctcttgtaagatctgcttcacctagaagatctgcttctccaatgcggagggttcaaattgggagatcaggatcacgtcgttcaacagcaattgctatcaagagcctcagttacttccctcctagtcagaggattcctatggataaagatgatgaaagtagtaccttcaatggtgaaactgatcagccaccaaagaaatctgacactaacgttagaaggatgagtgttcaggatgcaattaacctttttgagagcaagcagaaggatcagaatccagattcacaaaataagaaagctggcttgtttgccactaagtctgtcttgagaaggtggagtgcaggaatgggtgattctttgaatgaaaactcagaaggaaaagtctcagattccacatctgaaagtaaatcaaacaacatagcttctgaaactgagaaggttgaagctgaaatgaaggctgaactaggtaacataccaaatttttttgttacacctgaggctgaagatttaactttccatgctaattctcatgagattagagtgtcagaaacggagagtgctgtttgtagtaatgtttgtgcagaacaagcaaagcctggtctggaggaaagcagtgatcgggcaatggcctccgctgagtggaatcgccagaaggaagccgagcttaatcagatgttattgaaaatgatggaagtcatgcctgggaaatttgcgggtgctaatgccaccgctacaggtctcagttccaccaatcagcaaaaagctgtatctcatggccagcatacagagaagcgagacacaaaagtcagaactgagaaaggcacaaggcgaccagcaaaggaaccaagcaccaagcccttgaaggaaacagctgggaagaataaaccagcaatgacctcgaaatctggctcttcaacagagagacgtatttcaccagttccacaaagggcgcggcgaaattcatcacctccagtcctaccgaaagaagtagcatcaaagacaccaccagtcaggaaaagctcaccgaaaccatcacctgcacctgcatctgtgcctactacacgtagttcatggtcaggtggttctttgactaaagcaactacaacacaaaaaactaaaaggtctcctgggatggcttcaacgtccacacaaactagccgaaggactccaacaacgccctcgtcgtctcagccagcttcaaaagcggaaagggccattcaatcagtgaagaacaagaaggaaaccattactgctaccaagccagctataaagggacaagaagagaagaagaccaaaacagcaacaaagacaagcagaataactaaagtttcaccttcagaagaaaaatcaggtgtaaaaacgaagcaaagcttgcaaaaggtttcaaataaaagcagtgttgtacctcttgagtccaaaaccttgaagaaaaccactggaattagtcagagcattaggtctggtatggtgaagaataaggtaccccaacctaatgacttctcaaaagataccggaagtgttaaccaagctgaagataaggagcaatctcctgtgacaaccgagccaactactaaggtactggaggctgatcttgctcaaccagcacatgatgttgatgaaaatttagaaatttcgctcgataatgacttgaatattgaaaaaacagagaaaccggcctcgagtttaactgcaacagaaatgggctccagtatccaagttgaaccctctacggatgagttagatgaggccatacaacctcctgacgatgacatgggcatctcatcatctgcgtgggtagaagtagagcgtcaagaactagaagtcactgtttcgagtgaaaatgtagttgttgaggatgtaacttctccaggaattgcaccattgccgtcatcaagcccaagagtgcgtcattcgttgtcacaaatgctgcaagcagatagcaatgaaccagaaattattgagtggggaaatgctgaaaacccacccgcaatagtttttcataaggattctccaaaaggattcaagaggcttctaaagtttgctcgaaaaaacaagggagacaacaatgctaacggctgggcaagcccctcggtagtttcagaaggagaagatgaactagaagaaccaagaggcactagtgatggtacaaattcaagcaggagaacttttgatggttcaaagactaatagcatcttatcagctcaatcaactaccggcagcttcaactctttgaactcggataagctacgggagagatcaggtgctgccacatcaacaagagcatcaaggtcgttcttctcactctcaaacttccggagcagcaggtcaaatgagtcgaagcttcgatagtgtctgccttgtttgtccagcagatacatgggtagttcatctccgctcccattcaggacgtctagacttaaaaatggtttgagatttgattgttcggacggagccagcttgctgtgtttcgctctagtcacctgacatttgatatatagatagcttctgcctatgagatgccatacttcgcttctgccgtcctgtacatttctatattttactgcattgggtgcgagctgattgagacgaccgatatgtttgcatggcttgcaagagatttgcttcgaccaaaagccctttgctgtcaatagtttgtaccgaaaattgtcatgagcaacaacattaggaatgatgtaagttgtcacatttttttttgacgagaggaggaccccatttctattattgtcataacagaaatacaaagcggttcagatagtttccacactacaacgcaaaataacaggaagaacccgcaaacagaagcgctgacgagccaatccgcttcggatggctcagaacagccgagtcccctaccaggcaacatgccaaccgacgagtttagagttttacatcacacaagtaccagaccatacggcggaggatggcaagggcataacagacgacagcaaaatagagcgagtttctgacaaagctaacaccagacgagcagtcacgtcatgactcaacgcccgtgtggctgcagcatcccttctatctcatcgcccgacccgaggatccgatttcctctagcacttgcaccacgaaccagcatcttggcgccctcttgcagaaggtcctggagctctttcttgctaagccctata

SEQ ID NO: 23605 - DNA, 925 bp, Zea Mays
cgccatcgacgcagctgtctttggtctctcgtgcttccctttgagagatcggtgtgtgtcctctcctccaagcagtctccatccctaggcagtcattgacctgttgcttatgcatcctcgcgcatgtgcctgtttattcggctagggctctcatcattttgtttgttgctacctgaggacacatcgttttgtttgttgctacctgctaacatatcaactagcacgattttgagcctatctaaatgcccttctgtttatggctgtcaaggtttatggctgttcaggttcttattgattttggtctgagtttcacattgacaattcctgaggacaaagcagtggacctatatgttctagagagagctttgatttccatgcattcgtcctgtggggaagtggctcgactgatctgtgcaaacatttacgactccgcatcacagattagtccagttgcaattggatttatgccttttccttttgttcgtggcatcttgtttcctatggtttttatgcaggtctgttatgttgtgttaatcatgccttagcaaacttatgtgggtaacaacactgatcttgatgatgaaccagatggagaaaatccttgcggtgtatagaaaggcttcaaagcaatggtgttccacccagaacaagctggctcaagtgaggcaacgggtcaggaagcgcaccatggtcggatgaacgaagaagaaaaaattgtggcatggaatggatgtatgttattagattaaaataacaaaatttatgtatggatagaatcacagatggattctgaaacattttctcataacaatataacacacatatgtatataagttatcgtgttattatatggttccgttgcaacgcacgggcactcacctagtatatatatatagacttattgtcatccatttgaatatgaaaa

SEQ ID NO: 23606 - DNA, 4117 bp, Zea Mays
tcccctccgcctctcggtcaatccaccgcgtccaagcttcattcctccgcactcgaaatccaaagcgccccgccccgacccgaaccctaatcctgcatttcctttcccgccaccgcccgccccaatggcgaagccggtgaagtatgacgacgaggaggagatctcctcctcctccgccgaggaggacgatgaccagtccgccgccgccgcctccggatctggtgaggaaggggatgacgatgaggaggatgctgcggcgctgcccacggaggaggaggaagctgagggcgaggggcagcaagaggaggaggtcgacgaggaagagatcgaagccgtcactaccggcgctggagctgaggacggagaggacgccagtgccgctaccgccgctgaaggcgaagaggagtcccagtccaccgaggacgacgaatccgtcgcaagggacaaggacaacggcgacgagactgatgcagtggttgggaagcgtgagaaaacaaggctaaaagaactccagaagatgaagaagcagaaaatccaggaaatactggatactcaaaacgctgccattgatgctgacatgaacaataaagggaagggacggttgaaataccttcttcagcagacagaaatatttgctcactttgcaaaaggaagtcagtcgaatgagaaaaagcctcgtgggaggggacgtcatgcatcaaagatgactgaagaagaggaagacgaagaatacctcaaagaggaagaagatgcccttgctggtgcagggggtacacgtttagtttcacagccttcatgcatcaagggaaagatgcgtgattaccagttggctggacttaattggcttatacgattgtatgagaatggtatcaatgggatattagctgatgagatgggtcttgggaaaacacttcaaactatttcattgctgggctatctgcatgagttcagaggtatagctggtcctcacatggttgttgcgccaaagtccactcttggcaactggatgaaggaaatccaacgtttttgccctatcttacgtgccgtgaagtttttggggaacccagaagagcggaaccatataagggacaatttgctgcaacctgggaaatttgatgtgtgtgtgactagttttgaaatggcaatcaaagaaaaatctgcgttgaggcgcttcagctggcgctacataatcattgatgaagctcaccggataaaaaatgaaaattctcttctatcaaagactatgaggatttacaacactaattatcgtctcctcatcacaggcactccactccagaataatctccatgagctctgggctctcctcaatttcttgctacctgaaatatttagctctgcggagacctttgatgaatggtttcaaatatctggggaaaatgatcaacaggaggtggtgcagcagcttcataaggttcttcgcccattccttcttaggaggctcaagtctgatgtagaaaagggcctacctccaaagaaagaaacaattcttaaagttggaatgtctcagatgcaaaagcagtactatcgtgctctgcttcagaaggatttggaggttattaatgctggtggtgaacgcaagcgattgcttaacattgccatgcagttgcgcaagtgctgcaaccatccatatttattccaaggagctgaacctgggccaccctacacaactggtgaacatctaattgagaatgcaggaaaaatggttctacttgataaattgctgcccaagctaaaggagcgtgattccagagtccttattttttcacaggtggagaagatcgtgatgcatccattgaagccttcaatagtccaggaagtgagaagtttgttttcttactttcaactagggcaggtggccttggtatcaacttggccactgctgatgttgtggttctctatgacagcgattggaatccccaagctgatctgcaagctcaggaccgtgcacatagaataggtcaaaagaaagaagttcaagtgttccgcttttgcactgagtacactattgaggaaaaggtgattgagagagcatataagaagctagcattggatgctttggttattcagcaaggacgattggcagagcagaaaactgtcaataaggatgatcttctgcaaatggtgcggtttggtgctgaaatggttttcagttctaaggacagcacaataactgatgaggacattgaccgtattatagctaaaggagaggagacaacagcagaacttgatgcgaaaatgaaaaagttcactgaggatgccatcaaatttaagatggatgataatgctgaattgtatgacttcgatgatgagaaggatgaaaacaaggttgatttcaagaaacttgttagtgataactggattgagccacctagaagagaaaggaagagaaactactctgagtctgactactttaagcaagcacttcgccaaggtgcaccagcaaagcctagggaaccaaggattccaagaatgccgcacttacatgatttccagtttttcaataaccaaaggctaaatgaattgtatgaaaaggaagtgcggtaccttatgcaagcgaaccagaagaaagataccattgatggtgaagacgaagatcagttggagcctttgacagcagaggagcaggaagagaaggaacaattattagaggagggttttgcgtcatggacaaggagagacttcaacacatttattcgtgcatgtgagaaatatggtcgcaatgatattaaaagtatatcatctgaaatggagggtaagacagaagaggaagttcaacgttatgctagagttttcaaggagagatacaaggaactgagtgattatgatagaattataaaaaatattgaaaggggggaagcaaggatatcccgcaaggatgagattatgaaggctattgggaagaagctagaccgctacaagaacccatggttagagttgaaaattcagtacggccaaaataaagggaagttctataacgaggaatgtgaccgctttatgctttgcatggtgcacaaacttggatatggaaactgggatgaactgaaagctgccttccgtatgtctcccttgtttcgatttgattggtttgtgaagtccagaactacccaagagttggctaggcggtgtgatacccttatccgactggttgagaaagaaaatcaagaatatgatgagcaagagaggcaagcaaggaaggagaaaaggcttgctaagaacatgactccaacaaagcgagctgcactaaagaattcagagggtgagaatactccaccgagttcattcaagagacgacggcagtcccttatggacgactatgtgggctcgggaaagcgtaagagaggctgaccacgtttggcatcctcccttagacatgccgtctctacaatgattttaataccctgccgcgcagtagtgcttagttcctcttgcacgtgagtcgaatacctcaagggcatgtgactagcgtaatttatgcaatgatgacataggttagttattaatcctaaatgaagcatgtatgcgcatgctgtgttagtgtcgtagatctggactttgcaattgcaactgttgctgcccagctgacacagatccctttcgctgcaatgcggtcctgcattttgccgccactgattttgcacccaaggctaaacccaacgcggcagtagtaactgttgcactcaggatccacgtacacaaaaatgagttgaggcataacgtcccaactcggctggtggtatatgttaacagccaatcatgtttaagctattactctgatcgttaaggtggatccgctaaggccttcggttatttctgatccatgtggattggaatgtattgggcggaatcgagacggatttgacttgctatagatttaaatcgactcaatcccactcaatccacatggaagaagtacctttgcatcgatttgtcattggaatatatacaaggtctaggggtgtaattaacgtaaccgtccaagcatttggctaaagtatacactctttaaatgcataattaactgtctattctatctctaatcttaggacttgaagtgtcttgtagatgagatcattatgtatttttgagtagacatcat

SEQ ID NO: 23607 - DNA, 1156 bp, Zea Mays
tcagagcacaaaatctggggtctcttcgacttggttggctttggttcacacatgcatttttaatttttttttttttaagaaagaacaaatctaatttcagatgctcccaaagacttggaggagagtggagcctctggaatccggcaacctgacaaagctgaggcaggcactgcagagtacctcattgagcttgaagaacggcgatcaattaaggtattcggttcaaacaccttcatcgggctggggatcgtcttcttcgcgggcgtgtgcttctcgctcttctccccggcgttcaacctggccactaacgaccagtggcacacgctcagggacggcgtgccgcacctggtggtgtacaccgccttcttctacttctccatctcctgcttcgtcgtcggcgtcggactcaacgtcctgttcctctaccgccccatggccggcgtgccccgctcctccctcggggcctacctcagggactgggacggccgccagtgggcgctcctcgccggcctgctctgcggcttcggcaacggcttccagttcatgggcggccaggccgcagggtacgccgccgctgacgctgtccaggccctgccgctcgtcagcaccttctggggcgtactgctcttcggggagtaccgcaagtcgtcgcggaagacctacgtcctgctcggcttcatgctcttcatgttcgtcgccgctgtcgccgtgctcatggcttcgtcaggtcacaggagcacagagtgaattgcaagtcttgttcgtcctctgcttgttgcaagcccttccacttgcgattgatccacggaaagatccatcgtcttcgtgaagcaggggaaatccattccttccagccattaatgagatcttcagaacaatggaatggagatgtacaaaaaaatggttgttgtatgattgatcaaatgtatagaactatttatattctttccaagacaattggctgataggataggaactgttccaggggtggaaaaaatctctatctttatgaacagggtaaaagcaatgttcagaaaaaagtagtttgtgcctagtatgacagattcagaatggtatcagtactcccgctgttttggaatgttcaagagaaaactagtggatgctctaaatcttataatcttgcaatgcttctcgg

SEQ ID NO: 23608 - DNA, 5634 bp, Zea Mays
ttgcagttgctactactttgttagttagtctatggtttggctgctttgattgaaccaaaataaaatgttgaatgtttacttgtagaaggtgtcttgggcaaaaggaatcttgtgtattgtgcatccacgagtgctggtaaaagttttgttgctgaagttctgatgttgaggcagatactgtcaactgggaatatggcaattcttgtccttccctatgtgtcaatatgcgctgaaaaggctgaacatcttgaacaacttcttgagccactgggtaggcatgtccgtagcttctacggaaaccaggggggaggctcacttcctaaagatacagcagttgctgtatgtaccatagagaaggcaaactctttggtaaacaagttgttggaggatggccgcctctctgaacttggtgtaattgtcatagatgaacttcatatggttggtgaccaacatagaggatatcttttagagctgatgttgacaaagcttcgatatgctgctggtgaagggactttacagtcatgtagcggagaagtttcaagttctagcagtgggaagattgcaagtcatgggttgcagataattggtatgagtgctactatgcccaacatcgctgcggtggctgattggcttcaagctgctctttatcaaactgactttcgaccagttccactggaggaattcataaaagttggtaatcaaatatttgataaagacatgaacgttgttcgtgtccttcccaaagtagctgaccatggtggcaaggatccagatcatattgttgaattgtgtaatgaggttgttcttcagggccattctgtgcttttgttttgctccagtcgtaaaggctgcgaatcaactgcaaggcatgttgccaagttcttgaaactaccctctgttggaacaactgatgttagttcggagttttcagatgctgcagctgctattgaggccttgaggaggtgccctgctggattggatccaatattgggagaaacccttccttttggtgttgcatatcatcatgctggtcttacggtcgaggagagggagattgtggaatcatgctaccgtaaaggccttgtccgtgttctgactgccacttcaactttagctgctggtgttaacttgcctgctagacgggttatattcaggcagcccaagataggtcgtgattttattgatgggactcgctatagacagatggctggtcgtgctggtcgaactggaatagacacaaaaggagaaagtatacttgtatgcaggcctgaagaggtcaagagagttacaggtattattagaagcaattgccctcccttggagtcctgcctctcagaagataaaaatggaatgactcatgcaattatggaggttgttgctggtgggattgttcaaactgcaaatgatattcatcgttatgtgcggtgtacgctgcttaattccacaagaccttttgatgatgtcgtgaagtcagctcaagactcccttcgttggttatgccataaaagctttcttgagtggaaccatgagaccaagatatactccgctactccccttggtagagctgcttttggaagttcactcaaccctgaggaatcattggttgttcttgatgatctttcgagggcaagagaaggctttgttctggcatctgatttacatttagtttacttggtcacacccataaatgtagaccttgaacctgattgggaattatattacgagaaattcatgcaactttcttctcttgagcagtcagtaggcaatcgggttggagtaattgaacccttcttgatgcacatggctcatggggcgtcgataccttttcgtgcaaggcctgagagaaacaccgggttaagtaacaagtctgcacaagctgctggaaatactcttgttagtgagcacacaatcagagtgtctaagcgcttttatgtggctttaatgttatcgaggcttgctcaggagattcctattgctgatgtttgtgagacatttaaggtcgccagaggtatgattcaggcactgcaggaaaatgctggcaggtttgcttcaatggtttctgcattttgtcaaaggcttggttggaatgatttagaaggccttgtttcgaaattccaaaatcgtgtctcttttggagttagggcagagattgcagaactgacatcaattccatttgtcaagggttcacgtgcaagggctttgtacaagtctggtctgcgtactcctgttgccattgctgaagcatctattcctgaaattgcaaaagctctttttgaatcttctgcttggtctgggcaaggtgattctggtttacgacgaatgcaatttggtgtagcaaaaaaaataaaaaatggagcccgcaaaattgtcctggaggaggcagaagccgccagagtagcagcattctcagctttcaagtcacttggtgtggaagttccccagttcactgcacctccactcgcagctattgaggaatatccaactcacgataccatagaccaagctaagttaaataagctagcttctggtacccattctagagatgataaaaatatgaatacttgctctgattatgctactccaagggcttctacatacagtctaagaaaggacacaagtcctgctccttccattcaaatgaaagagaatgcaggactatctaaaaatgtgcaaatcactagacagggagcatcatcatctttgtcaacagaaattgctgatggatctagtagagatgtggctgaaaaaggtcctgtccatgcatataacttcccagggggatttgattgttttcttgatcaatggtccacagctagtaattttttctttgatgttcattttatcaagagatcgatgaaaccatctttgaacctttttgaagtttttgggttggctgtctgttgggaaaaatctcccatatactactgcaacttcccaaaagatctagtcactactggcaacaataacatcaaggaaatgtggggtaattttcagagaagatgggaaaaaatagcggacattatgaaacaaaagagtgtccaaaaaatgacatggaatttaaagatccagatccaggcacttaaatcaccttatatttcttgccaacggcttgaaaggtttcatcttgaccataaaatgctggacaaagttgaagtgcttaacaactcatatatgttgttatcaccagtctctgtctacaatggattggatatatgtctgctggcgtgggttctatggccagatgaggaaagcagagcggttccaaatcttgagaagtttgtcaagaggcgacttcatagtcaagaagctgctgctgcaaatcgcgatggaagatggagaaatcagatgcacaaagcagcacacaatggctgctgtagacgtgctgcacagacacgggctttgtatactgttctgaagaaattacttactcaaaatctttctgttttggttgaaacaatcgaggccccattggttaatgttcttgctgatatggagctttggggaattggcgctgacatggatgcttgtctccgtgcgaggcatattataacaaaaaagctgaaggaactagagaaagaagcttacagattggcaggcaagaatttctctctaaatgctactgctgatatcgcagacattctatatacacacctaaaattgccagttccaaaaggctgtgagaaagggaagctgcatcctagcactgacaagcagtctttggaccacctaagggatcaacaccccattatcccattaattaaggaacacagaacattagcaaaactgttaaatggcacgttgtggtccatttgttcacgtgctcaattgtgcactcaatcacaaaggtacatcatacatggaaattggcttcagacgtcaactgccactggccgtttgtccatggaggagccaaatctgcagtgtgttgagcatgtggtggaattcgatacagggaaaagcgataaagattactcaagcatttcagttgatgatcatcataaaatcaatgcccgtgattttttcatacctaccaaggagaactggttattcataactgctgattactcacagattgagttgcgtttaatggctcacttttctaaagatcatatgttggttgaacttctaaagaaacctgatggtgatgtttttaccatgattgcttcaagatgggctgagaaagaagaggccttgatttcttccaaagagagagaaaacactaaaagattcatatatggcatcctttatggaatgggtgcaaactcccttgcagaacaacttcagtgcagcactgaggaagctgcacagaaaattcaaagctttaggagattttttcctggtgtttcctcatggttacatgaagttgtgttatcctgtcgccaaaaaggatttgttgagactttattaggccggcgacgtgttcttacaaaaataacggctggcaatagcaaagagaaagctaaagcacagaggcaagcagtaaattctatttgccagggttctgctgctgatattattaaggtggctatgattagagttcattcaataattactaacagaactagtgcagctgattccacagatgaagttacaaggaaattttcagaacttggtggccagtgtcaccttattttgcaggtgcatgatgagttggtattagaagttgatccgtgcatggtagcacaggctggaaggttgttacagatatgtatggaagaagcagcttcactattggtacctttgcgcacaaagataaaggtgggaaaaacttggggttcactagaaccattccatcctgagccttgtttgatgcaaatggtgaatgtcagttggatgccaatgtttcatgacatgcaaggtcctggaagaaggctgaacaatttccaatatgcccccacaggggaccttggtgattctgtctggtgttcttcggtagaaccttcattgctatgtctacagtcttctgtcattgctgaccgtatgtgaaatcaacgcaacagcgaccagctccattactgaggatttgctatggactggtgattatcattatgattccatgtggcatgcaagaagcatatatatatcaccaatagatgctgttaaagggtttaaggtgtatttgaaaggtcttcctagttatactgcgaatcttttagataaacccttaagaaattggagggcctagtatatggtgatttttcttttgctaggcccagcgctaaaaaaccgattatggggtttattcaaagatgaaatttcatcctgtaactacaggttcaaggtgtatttggtttgatggatatcactatggacaagcgatggttggtttttgtacaagttggatgttgataaaaatgttggtatccatgccacacaaaaaaagcctaaccagcacccatattttgtaatccttgtcaagtatgttatatggtttacttgatagctctagcgaggctatccagtacctcaccttcaccctcatatttgtaatccttgtccacataattattagtatgttatatggttatttagtaattacgatggaaatattatttttggtaagcgcaaatatgcatgtttcgtatatcatttagggaaatacatttgttgtaattagtgttatgataacaaaat

SEQ ID NO: 23609 - DNA, 281 bp, Zea Mays
gaaagggcctctagcctagtggttaaggacttccgagtagcacctccaagtcctgggttcgattcccctcgggagcgaattttcaggcttggttaaaaaaatcccctcgttgtgccccatccgctcttgggttacgatgtcctgtgcgccaccctccggttgggccgttgcagagtggacagttgacgccggcctgttagtgatggggggccagggttcggggattttctcggccgggaccattgtttcagtctcttcttaatataataccgggaggacgg

SEQ ID NO: 23610 - DNA, 1934 bp, Zea Mays
gcgtttattccacgccgcaccgtcctttccagaaccctctggtctccgcgtgcggcggcgcgatttctttgcttctcccttccacttcgagagattgttgattattctagagccagatccgggtaacagattcgagtttgcgcccgccctgttcggcttcagccgccaaactgccagacgcacagccgcggagccgccagagacagacgctgccgccgtcggccgtcctccgcccctccaggtacgccgccgcccccctcctcccccctccggtccccctcctccctcctccggtcctccctccacctacagccgccgccagtgcgcagtccaggcgcagccgcccagtgcgcagtgcgcctgctccagcgagccgccagtgcgcaaccgcccaggtcggcaggtccaaccgctgttcgtattttgctgctgttcgtattcacattctgttgttgttccctgttcgtatccaaaacacggtgcactgcgcagccagccagtgcgccagccaccatgcatatgcaatattgacgaatgttgctgaagtgctgatgctgtttttaatcatgctacactagaatcgtccatcctgctcgcttgtctttctgagctgtgcatgcacaacgatttgggcttgagtggtggtgctaaagtctccatgggatgagcttgaggtgcactactatttatccggcttctgaagggcgccttcggttttgtgcataggctcattgggttgctaactagtagtttttttttgttataagattcttcatatctttttcgtttagattaaaagtttgtgtcgtgcccttgattacaaccatgaagctgcagtttctgctgtagtgattttggtctgatgctcaaatataatgttgaggtgtgtctgcgtgctattgcttcaagcacactgtttttactgggttccttctgaagaagccacacatagtttttttttcgtttcttcttttacctgtttgaatattcccattgaaacttgtatatgtgtctcatctaccttccagaaaagaggttaaaaagtatatcatgttttatgttagtctgaaaagacgtttcaacgttcgtttaaacgttcaaacgttgaaaagttggttcataacgttttaacgttttaccgctttaataaccatgctgatcaggcattgcaaggtaatctaaatattataggacaggtggtgcagcggtgagggtctcactgagtcaccaggtttcaaagcagccttttcgcatttgcgggggaacgctcatcttggtttatcccttccccaaacctccctcgtgtgggagcctctgacactggatatggggaacactacatctgtgcaagctgaggcttcagattcagcgcagaaacctgccacaacagctcctgcacctgggtcaaagccgaaaaagatctgctgtgcttgcccagatacaaagaagctgagggacgattgcatcgtgcagaatggcgaggatgcctgcggaaagctcatcgaagcccacctgaaatgcctgagagccgaagggttcagcgtctgacgtggtgctccatcatggcaactccacacacctgtttctgcagtaatctgattttgatcatgaacagtgtgatgaataaggacttctggtagagtgatagaaacaactcgcagttttatttctagactggaaggaggaaatcccctgaacattgccagtttgcaagagtttttctatcttttttcaatgcatttagtgccacacatatctgcaattctggataatactttatggagcatatgtatatggaaattgcttttttttggtccactgtttggagattgagcaccacactgtatggaacaactgttgcaaaagttttctactggctagagctttcagtcacttaatccagtgatgtatgaatgaagaagatattaccctct

SEQ ID NO: 23611 - DNA, 2506 bp, Zea Mays
ccaagatttcgtctgatccgactcacgcgaggagcagcggatcgagtcgcaccatgcatatgcatgtggcctctggacaggtgtctacagcagcgcgtgtcgtgctcggccagtctcccggggctgcttagactgctcagacgtggatgctggagctgccagatgaacaatggcagagacaccctgccatgttctctgtctgcttttagctgcagcacacacgtctgtttttttctctccggacaccaaccaagacgtgagtgacgcgcttcatgttcacgcctccctccctcgtctctccatttcacatactgcagacacaaacagcaacggttttgacgcaccaaattctccgcgtgcacatgcaccaggccggcggaccaaaccaacgcagctgcttaagcaggcaaaagcatgagagtttcatatgcttctccttaatttctcaggacacgcgatctccaggtggatcggagaacgcgcgcgcacatttacgcgacacagcaggagttcgtcgaggctagcttttcctggttcctgccatgctctgctctgctgcgtgcctttggaacatcgtaacgtgcgggttggctaatggctagctatagctccacgctttcgaaaaagcaacagttttgccgaccctgatgaaccatccctttcgtgtccccgcgccatgtgaagggcgcacatgggagggatggccctggctatagcggcctgtggccacccggagatcacggccagggccctgccattagcgatgatcctgcctgattcgccttctcttggaagcattcttctacgctagagccccccggtaccagcaccataggcttcatagacctgatagaaattgtcagtttctctctctctctctttttttttttaccctggcgagagggtcaggctgtgcttagcttgggtgctgtgctgcgacagatcgctagtgttgggtcgttggcttctgatttcacttttaccgcctgtcgccttaacagtggtaaggtaaactgtgttactcacttactatcttgcaattgcaaatacagataacagatgcagattgtcttactttctcgctatatacgtaccaacaaggatacgtccaatgcattatctatcaggttataaatatgggacaacactttaatacataatacctccgttcttgaatatttgccgttgctagtttattatgagctaaaacacgataaataaaaaaacagagaaaatattatatatcccaaaaattagcattgccacaaaaaaacgcatttcagtagtttcgctctttgtccctcagaaaaggaaacggcttatctttattctgtagataaacaaaagtacaaagaaaaaacaggatggagctgtgcacgtccgggcaccgacgacgatgtgatggctgcacgagggagtgagaggggaagccatgtggggagcacgccggaaatagatcgcaaaatcgccccacgacagcgaccggagctccgaaactcgtcgggtcgaaaagaggtttctgtaaattcggggccgggagaaggctacgagctgccgactgtgtctgtactagagagaatcccatagcaggacactactactaccttaggatccccttgccattgccgaacccccgctctcgacatgccgtgaggcagtcccattcttagcggttggggggagggcgcatgccatgccatgccatgccatgcccggctgctcatgaaccatgattgcgcgggaggagggagaatcatggtcgcttcagcttggggcgttaggtttagagtacataccacaagtgcatgcaggcgtcctgccactcactcaaaagccatcaaggaaagagcgtaccaacggcgagccaggcaagaaaagcgcgatcaaaacgacagcgacggcgcgcgcactcccggcctggcctgtcatgccatgtcatgcatgtggcgcgcggcctgggctaacgaccgaaccgggccttccgttcgttaatggcgggagaggtcccggcccccaaccgaaccgacgtgcccgcgcgcatggccgcttcctgccgctcccgcgtcgctctccggcgcctgccgctcgccgaggcttgtggctctcgtcccgtcgcgcgccagttccccgtgccggtgggtagttgccgcctgcacgttacctatctatccatcacgcgggcggccgcgcgcgacaagtcccattcgttcgtcctctcccgagggcggggtcgccgttgcgcggctgttgctgccatgtgcccgcggcgcgtgccgaagcgacaccaccgtcgtcgtcgggtcaggcgtcgctgactgctgtggaggccgctgggaccctgggaggggagggaggcgtggccggtggcctgtccgtcttggtaccgtgccggttctgctacgcgcgatcgtgcgccgcgagcgcgcgcggggtttctgttacaaatacggagcacatataaaatgcactcatgtcacactctttatctaaattgaaatcggctgaa

SEQ ID NO: 23612 - DNA, 1231 bp, Zea Mays
tacacatgtggcagaagcgctaaaagtaccaattcatatactgtttaccatgccatggacgccaactagtaaatttcctcatcccttttctcgtgtgaagcagcctgctggatatagaccagttcaagacccacaaaagatgactgaaattattgtcaaagcgctggaaattactggacagagaggtatcattaacaaaggctggggtggccttggaaccttggcagaaccaaaagattttgtatatctactagacaactgccctcatgactggctttttctgcaatgcaaagcagtggtgcatcatggtggcgctggaacaacagccgcaggtctcaaagcagcggtaagtgctctctccatgccttatttcaatgtaaaatagttgtactcttctcaaaggcactggagagttgcaagaggaaagggagtctaagaagacatacaaaccacagtcccaataaggtgatgttgactggatgaagacctaccaaaaaacagctagtgtcctacgactattgtacctttctttggtgaccaacctttctggggcgaccgggtgcatgcaagagggctagggcctccgcctattccagttgatcagtttggtttgcagaagttggtggatgctataaagttcatgacgaaaccagtggtgaaagacaaggctgtagaggtggcgaaagccatggaatctgaagacggggtgacaggtgccgtcagggcattcctcagacacctgccttcgaaaaccgaggaaccgagcccaccgcaaccgtcaggctttcttgaattcttcttaggcccactaagtaaatgtttgggatgctcttagtgcagaacgcaatctgtcacggattggcgccttggcggcataccacaagagtttgccgtgatatcccatgcaaagaagctctggctcttcttttctttgtttccttttcctttcctgcgggtatttgtagtgtgcaaagagtggttgcttgtggtgtgcatggtctgcagcggatggcctgcgccctgtggtgcgtgtcattttgatgtttgccgtggagcaggcgacgatttcacgtccaacccgtacgttctgtatatttatgaaagaaagaaacagaggctaggttttccttgttctaatatggttaccgctaaatagctgatagcggctttgtaatggaaagtgagcgctatagcggacattgggttttaatagcagaatattaaaaataga

SEQ ID NO: 23613 - DNA, 828 bp, Zea Mays
cgaaattacaattcagaagataggaatgatccaggtggaagctccaggaacaatcccattcagtttgatgtaaatttaatgaaaccagtaaatgtagatggcaacattggtggtgataatgcagaggctagcatgtctagaactggtgaaggaaggcatctgccaagcaatgaacctttgtccaccaatggtaaagatttaggtgtgggttctgcagacaatgggcaacctcaacaaatcaggaaaggacgtggttttactcagaagtatgggtatgcacgccgatataggacgccatctcccgagcgtccctctgtttgaccccgctacgatggagggagagatgatagatggaacaatttcaataggtatgaaagaaatggtccttacagtagacgctcgccagtaaggagataccatggctcgccaagagccaatagcccatccagtactacccaagcctcaaccgttcaaagtgttgctcgaaggggatatgtacaggtaatgcatccatcgtactgttgatttagccatcccaacctgcaaataacctttgcatattctgtttgacatttttacatagtgttttctttaaatgaaaccgactcatactactcggcctacacagtgcccattctgcaaaacgcccaattatgctgtggagtatcgtggcatcaaaacaaaggagtaaaggagcatagagcagtttacagacaattgaaaaagagaattgatcttttttatgggcgaagtgttgaagatggctttggtgaaggaaatgtcttgttagcatcaagtaagtggcgacatcacaacccctacaagctt

SEQ ID NO: 23614 - DNA, 987 bp, Zea Mays
ctacttgctcgtggacctaactatgcacacagtgattcttcaatcgagtcgacgtgctgcagatgtgaggctgttgagatggagagaacccttgcgatgatcaagcccgatggtttgtcaggtaagtacacagaagcaatcaaggaggtcatcttggattctggatttcatatcgtcaaagaaaccgaggtccagcttgatgctgagagggcatctgtcttctatgcggagcattcccagagaagcttctttgacagcctagtcaagtacataacaagtggtccagttcttgctatggttctggaaagacctgacgccgttgcgcaatggcgcactttgattggaccaactgatgcaaaaaaggccaaaacctctcatccaaacagcattagagcaatgtgtgggctggactctgagaaaaattgcgtgcatggttcggattcaccagaatctgcagacagagagatctcatttttcttcggagaagctgaatccgtaactgtggaacatgatgagctatagacgccacactggtatcagtggcaatattggccggctcattggacaacgtgggagagtatcgactctgctgcttctagtgttcgtcatgcttcttttatgaactaaacccgaagacgctgcaatttgaggaggggatgtcagttgtcacagaggagagagtcatttttagggctagtttggaaatctcatttttttcaagagatttttattttcctaaaggaaattagtttatttttctttgagaaaatagaattcccttgggaaattagagtttctaaacgagcccttaatttcgtaaaattatgtccggagtccatatttcctatcggagcaccatggtccttgaacttgcaaaactatatggtgcaaaccaaatattgttttttcatccgtgttgacgtcttgtgtggcatactttgacagctgcgtgaacttgttgaggtattcacttacaattatattttc

SEQ ID NO: 23615 - DNA, 2777 bp, Zea Mays
gtttttggcttgttctcccactaacgcttggcgactcacgagtcgagggtttctctcctgcgcggcggctacctctctccacggcggcggcgggcgatcctgcagatcccgcggctccctccgcgattcgaggatgaggtggatgctttggggggttactgggaaggtggagatgctggtccgcgcaaagagatcagccgtgcgtgcgaacagtgcgggatgagcttcaagaagcaggcgcatctgaagcaacatatgcagagccattcgctcgaggtactgatctggctgcttatgttgggttttttggtatattgctcagtgaatgctcaggctactagtgctcgcctggtttgttactatccgcttaatgtttattgtgtgagaaaaggccgaaagcgagatacatgctggtttgactcttttggtgtggttgctacaaccctgttataataacaattggttcgatggatgactctgtatacctcatggtctttctttagtccattgtatgttattattaattatgctgacttttgcagtctgtttgttcagatacagatgtgtgaagcattggatctcaaagaactccaaaatgcgagaaggccttgaacggactagtaccaggatggggagaccctcctgagaagctccatcaagagttccttcattcacgctattcttcaggttgtgtgttctgagctattctgagctgcttgctgctttttttgttattatgttcctgtcacatgacatatgctaaaggtctagtctgagattgcgatgccacttttttcaacaagttgggcgtctgctgttctagtcatatttgataattgatgaatttacactgcaatgctgtttgagtatatctagctgtcaccgtttgatggccctcattattgacaggatagatttagcaggcatagagagacacaattcctgttctgcatagtttatgtgctcgactttagttatgtgttcactgaaatgattggatcatgatcttccttagttgaattatacatttcatgcaaaaatcaaattaattttcatttgaaggtgagttatgcggatacggtgtgctgctatttgcccctgtatttggggactggtgtacgacatttgatttgctggtttttgtaggcaatttgttgacatatgaatgcgtgaagcattggatcccaaagaactccaaaatgcgataaggccttgaatggactagtatcaggattgggagaccatcctgagaagctccatcaagcatgccttgttcacgcgtttcttaagaggcccttttcctgcactgttgatggttgcccctttagctatagcaggaaggatcatttgaacagacatttacttactcatgaagggaaactatttgtgtgccctgtcgaaggatgtggccgtaagttcaatatcaagggtaatatgcagagacatgttcaggaaatccacaaagatgtctctccttgtgaaagcaagaaagaattcatctgtccaaaggttaactgtgggaaggctttcaaatatgcttctaagttaaagaagcacgaagaatcacatgtccagctggaatacacagaagttatgtgctgtgagccaggctgcatgaagttcttttcaaacatggaatgcctgaaggcgcataaccaatcttgccatcaatatgttcagtgtgatatctgtggtacgaaacagctaaagaagaatttccagcgccatcatcggatgcatgaaggttcctgcgtcactgagagggttaaatgccacatcgaggactgcaaatgttcgttctcgaagaaatccaatttggacaagcatgttaaggcggtacatgagcagcgtcgtccttttgtgtgccaattctctgggtgtggcaagaggttttcttacaagcacgtaagggacaatcatgagaagtcaagcgctcatgtgcacactgagggtgattttgtcgaggctgatgagcagcggccacgttcagtaggtgggtgcaagaggaaacccgtatctgttgagagtttgatgcgtaagagggtagccgctcctgacgatgggcctgctcatgctgatgcaactgaatatttgagatggcttctgtcggtttgattggacgttcaagtgcactttgtgtagttggaaacatcagcgatttacttggcatgtataggaagatgaatgtctctagtatgttatgtaaatgtttatgtacggtatcagaaatacagatcattggacctcaattataaaggcaatatgctgtattggcaagatcttgaatgtaagagcggttgctcatgatcattagatctatgtgtcttcagcacagcttggcaacatgttttggtatgttcgcagttgcagtgtctttgcctttttttgcctcctgctggttgcaggtgaaaattggattcatgattcttgaatgctcttatgtaacaacaaaaatatctgttcagttctcattgtgcagaaccacagcactcttcattccgatttgcagatgcacgtgaccaaaaaagataatttgcagatgcaccatgaacccgtggcaccagatgcccgtcagcagctggcacccgtccagctcgcgccggagagcctccaggcggaccagctccgccgccccgcggatcgattggactagcgacgaggccgagatgcgcacggacgtcatcggcggcggcgatggctcttctgcctcggaactcggatgcctcagtgtgcgtgcgcgtgtcagtgtgatctcttgcctccaatggatcgcgtgc

SEQ ID NO: 23616 - DNA, 140 bp, Zea Mays
aaagaagggggctcaacgactgacaggaagactggcatctcttaatcgattcatatccagatcagcagagagaaatttaccattcttcgaagtactgaagtcagccgaagtctttcaatggggatcagctcagcagagag

SEQ ID NO: 23617 - DNA, 3623 bp, Zea Mays
ccaaccttcaccccaccccgcccaacaaaaaagcatatacgttaaataaaataaattagaaagctatctatccaggtggattagggtttttgcctcggctagcagtagtagctaatttggacgcaggagatacggagtagggcgaaccgcgaggagagcaagctatgggcgcgccgaagcagaagtggacgtcggaagaggaggatgcgctccgccgtggcgttcgcaagcacggcgccggcaaatggcggaccatccagaaggacccccagttcagcccgatcctctcctcccgctccaatatcgacctcaaggacaaatggaggaatttaagtttcagtgcaagtggactgggatcgagtaaagtacgggttccaaagataactggatcctcatcttcaccatcatctagctcacaggctctgcttctcccagcggcaaataatgttacagaagctatgctgcctgcagatgctgacaaaaagccacgggatgggaaaactccgccaaagtatggtgccatgattatggaagctctttcggaattgaatcagccgaatggttcagatattgatgcaatcttcgacttcataaagcaaaggcatgtggtgcaatcgacctttagaagatttctaccctcaaagttacggcgacttgcagactcaaacaaaattgaaaaggtcgataacttctataggctcccagattcatttgcaacaaggactccagctcaaataaaagtttcagatccaaaacagaaggatccatctaaggcgtcaaagaccataggcttgtttgctgcctccagccctgcactagaggcagcgatggcagctgctgtcaaggtgactgacgccgaggcaaaagcacatgatgcacatgatcagatgatggaggcagaaaggatgctgaagatggctgaggataccgagtctatcctcacaattgcagcagagatctatgatcgatgttcaaggggggagataaccacattagttccagtggcgcaaagggagttttgaaatctattggagactcttgtcttgtacatgggataggttttggaatccggaggcccttacttgggatatgccctagggttaataacaacagcgcaccgcctgtcttcagactttgtaatgatatgtaatcccatctttcccattcccagcctgtcactgcaagctgcggtcgtgaatcctgatggcagtaaagttttttttttgttgacatgacgaaagaatagagcaggaaaaagtggtttaaacagatgaggtagggtagtaggatggtaaagtgttactggtataagataatataatgtgccgcagttattttccaaatcgagaatgttgtgttctgtgagaactgttcctttgagagcactttcttgttactagtgcgacattgccgatagcctttccaacgacagagattcgaccataacagtcttctctgcatttctgttttagtaggatgatgtcaactttctagttacatagtgtttgactggtgcattgccatattataagtgtatctgaatcaagtatcgaaagtactatgttggccctgcttaaaatgttacttatgtttttatcgatcgatcgatcaccaccatggttacgagtaaacatcttatgcttacgattttataatcttggtgaaaaagaacttacagcagtaacgcatttgttttttctgctggagtgctgatgagggcgcttcgctaattgctacgcttacgaggagaggagcccacaagacgagatctacccgctgccccctcgcaacgcattcccctcccccgcgtcgtcatctccccaaatccccccaaaccctaccgccgatccgggcccagatcgccatggccgcgcccaacagcaatgacgccgccagcgccagcggcaccggcccggctggcgaggaggacatctccatcgaggcgttggcgcggcgcgtgcaagagcacatgaccctcaactcgaaccccgccgctcgccgccacaagttctgggagacacagcccgtcggccagttccgtgacgccgccgacgcatcgctaccgaacggccccatcgagccgcccacgccactctccgaggtgcgcgccgacccctacccgctgcccgccgccttcgagtggctcacctgcgacctcgatgacgacgcgctcctcgccgacctctactcgttgctcgcccacaactacgtcgaggatgacgagaacatgttccgcttcaactactccccggccttcctccgctgggcgctcaagccgccgtccttcttccgggcctggcacatcggcgttcgcgccaaggagtccaagaagctcgtcgccttcatctcgggcgtccccgcccgcatccgcgcccgcgacgacgtcgtccgcatggccgagatcaactttctctgcgtccacaagaagctccgatccaagcgcctggcacccgtgctcatccgggaggtcacccgccgcgtccaccaggagaacatctggcaggctgcatacaccgcggggatcgtcctcccaacccccatcaccacctgccgctactggcaccgatccctcaaccccaagaagcttatcgatgttggattctctcgccttggtccgcgcatgactatgagccgcacggtccggctatacaagctgcctgatgcgccgctcacccctgggtttcgcaggatggagctgcgggatgtcgctgcggtcacacggctgctgagggcataccttgcgaggtttgtggtagcaccggattttgatgaggtagatgtggagcactggttgctgccccaagaggatgtggtggacagctaccttgtggagagccctgagacgcatgagcagctgatgaatgatgctcttattgttgccaaacggaacaattatgatgtgttcaatgctctcgatgtcatggagaatgagtcattcctcaaggagctcaagtttggtcctggagatgggcagctccactattacctctacaattaccgtattcgcaatggcatcaagccctctgagcttggtcttgtgctgttatagggcagtctaatcaggacagtcctgagtttacaccttccaggtctcactgtgcaatcccagtggtttcctcattttgtctattgtggtagtggtttctttgatatgattgccatgcccattgatgggagtccaagatgatttgcaaacaaggagactggaattagaaatcctttccttaatttaagttccaagctgtgctgatggtctgttgaatataaatgtgaatcgatatctgcacatgtaaggaatctaaaagcaggcgtgcagtgcagcaaaccctgatgttcatccattcattatccaatttgtatgccggcatgttcaagagatagcttaagttattgcatccccagctgagcagagggcaagtcagttgttattgtgtgctcgctcagtcgctccgttccaaataaaatttgttttagttaattaataggttcatataatttttgatgtatatgttttatatatgtctagattcatcatcatctatttgaatatatacataaaaataagagctaaacgaggaagaaagtattattttgaggttgccaatttgggcttatattcttgg

SEQ ID NO: 23618 - DNA, 2202 bp, Zea Mays
tggctaccgtttccccgttggcatgggaggcataaatgccgcgcttggaaacatgagtgaagatgattggaggtggcacatgtatgacactgtgaagggaagcgattggctcggtgaccaggattctattcagtatatgtgcagagaagcaccaaaagctgttatagagcttgagaactatggattaccattttcaagaactgaagagggaaagatataccaacgtgcctttggaggacagagcttagattttggcaaaggtggacaagcctaccgttgtgcctgtgctgctgacagaacaggacatgctatgctacacacattatatggtcaagcaatgaagcacaatactcaattttttgtggaatactttgcattggaccttctcatggacaatgatggaaagtgtcaaggagtcattgccttaaacatggaagatggaactcttcaccgtttccgtgcttctaatacaattctagccacaggaggttatggcagggcatatttctcagcaacctcagcacacacttgtactggagatggcaatgctatggtcgcacgtgctggtttacctcttcaggatcttgagtttgtacaattccatcctacaggcatttatggtgctggatgcctgattactgaaggttctcgtggtgaaggtggtatccttagaaatagtgaaggtgaacggttcatggaacgatatgctcctactgcaaaagatcttgcttctcgtgatgttgtttcaagatcaatgacaatggaaattagagaaggacgtggtgtagggccattgaaggatcacatttatttgcatctgaaccatctgccgcctgaggttctcaaagaaaggctccctggcatttctgaaactgctgctatttttgctggtgttgacgtcaccaaggagcccattccagttttgcctactgtgcattacaatatgggtggtatcccaacgaactaccatggggaggtttgtattgagcatgtagtagacaagtatgggtcaaaacctgcgtattataatagaaatatattctgctattctgcataacaggtagtggatatcaagggtaataatccagatgctgttatccctggtctaatggctgctggtgaagcagcctgtgcatctgtccatggtgcaaataggctaggcgcaaattcacttcttgacatagttgtttttggcagagcttgtgcaaacagggtagcagatatttctaaaccaggtgagaagcagaaacctctggagaaagatgctggagagaagaccatagcctggttggacaagctgaggaatgcgaatgggtcattgccaacttccaagatccgtctcaacatgcaacgtgttatgcaaaataatgctgctgtgttccgtacacaagaaacacttgaagaaggttgtgaactgattagcaaaacatgggaaagtttccatgatgtgaagctcagtgaccgaagtctcatttgaggctcggaaggaaagcagaggagctcatgctcgtgaagatttcacgacaagagatgacgagaagtggatgaaacactccctgggatattgggagaacgagaaggttcgattggcatacaggccagtgcacatgaaaacattggacgatgaagtagagtcattcccgccaaaagcacgtgtctattgatcgattcaagcctaacacctcgggaattccgtgtaaggtgttaataaagcagatgggcgttcctggctgagaacatgacctggatttgtgtccctcattttctgtgtttctgtattctgcctagtttgctagaaataaaagggtaagatagaacacatgctaatccctggctgatgtttgtgtacatgaaattttgcatgggttgttacctgttaatgctctgcctggtatcattaacccatgattcatgaatgttttggtgattcatggcatggtgcgacgttgtcaaacaacgtagatttgtacgcctgttccttggatatagtataatatatatgtacacatgtgttggagcagaaaaaagccacttctccagtttagacagtagtagtataatgcagtcttatggagagctgctgctacgtactggcacaactacagctatagactagagtgtattttctggatgctaaataggagagccagagctgttttacccccgaagttttcttgttatatgaaccgtactgtatgagag

SEQ ID NO: 23619 - DNA, 594 bp, Zea Mays
gtgcatggtttggttttcaagttgtagctaggactatcaaggctgagttacagaaaatgagagttgaaatggctggaatgagaagagatgcagagcattattctagacaggagcatgttgagcttgagaagagataccgggagctaactgacttgctgtaccacaagcaaacacaattagaatccatggccagcgaaaaggccggattggagttccaactggagaaatcattgaaacaatttcgtgaagtgcaggtcgaagcagaaaggagtaaagctactcgcagatcagcatcatcgtgggaagaagatactgatatcaaggcattagagcctcttcctctacatcatcggcacatggcaacagcaaatcatcagttacaaaaggctgcgaagcttttagatacaggcgctgttcgtgcaacaagatttttgtggcgacaccccgttgcacgagtcagcgtgctattctatctggcatgaaccacataacttcaatttcctgtgtttaccctcccccccccccccccccctctttttctaccaaatcaacacttctttctgacttaaaatctgtttccgccacaccaggtgt

SEQ ID NO: 23620 - DNA, 2586 bp, Zea Mays
cttctatgcacttgcagttttgccaggcagttttggcatgatatccttttgccattgagataaggatatcttttgctgagtggtggcgaaaggtgcataaaaaggtgcacaagaccaaaagaaaaggcttcaatagcctcataattttgggggcgtggtgcttatggcttcttcgaaacaaggctatttttgatggagtaaacccttcctttgagctctgttaaaagtttgtttttagatgagctgagttgctgggatatggctggtgctaaacagctaccaagtcttggcctagttgctgctattagtagggtctaggctgtttttcaatttggtctagttttatgcttgcccactggtcattgtactttggtcctctttggacctttttcctctcttaatataatgatgcgcagctctcctgcgcgtccgagaaaaaaaagataaagcacaccctagaggattgtcttcattgttagtcaaaacttcaaacaaggtggcaaatttcctgaattttcgtagatttacaactttaattatcaaattgaaattgaaattttgtctccaagctcccaggttttccagtcatcacacaattgaggacatgtttgttgttcttcataaagggtgttatgtaatttttaaattagagtaaatattccagattggatgatgatatgttttactatttatgtagttcctaataaatacacatattcatctgattcttaaggtagtcagttatatttcgtgatcttacattaatcttgatatctatttgtagcaaaagttggttcttaccatcaaaagtgttaggagaatgaaaccctaactctaatgcgggttaggaatatattaatataactgagtatgtaggccaaggcccattataggagagaaatacatagttacgctaacacccccctgcagtcggtgttagggagatttgttcctttgtttttgtgcacgggaaaaatcgggacatggtaaaaagtggagcggccaaaaaaaatctgaaaccagcagccagattgctggaaacagagaaaatcataaatagctgtaacgttgttaccttttgatggtaaatatctaaaaccgattcttttgatggtatatatctaaaaatgtgttcttttgatggtaaggatccaatttcccccaatgttgtaatagttgggcctagctttttgttgcattgcctgattcacatgcatgactcgtaacataatgttatgtcattgtgactgtgaatccttgattgcaatgctacttgtttagttttcacggcattcacgcgttcattttacattattgccaagttactgcttccatgcaggtggttagttgatgaagttcgagaaagtgcccctaaggaattggatttcttgaatgaagccaaaaacagcgaaagatgtttgaataactttagaaagctgtctcctcagattgctggtagcatatatgcccccaaggtttattggaatctcagcacatctagaattctcaccatggagtttatggatgccaaggaggtaactgatgttagtggcattaaatcaattggagttcaccctgttgatgtttcaaacctagtcagtaaagcatttgctgagatgattttcaagcatggctttgttcattgtgatccccatgctgccaatatgatggtccgaccaatgccacaagacagcagaaaactttttggatggaaaaggccacagctggttcttcttgaccacggcctctacaaagagcttgattataatactaggataagctacgcttctctttggaaggcacttgtttttgctgatgcaaaagcaattaaggagaacagtgccaaactgggtgctggggaggatcttcatgcactctttgctggtgttctcactatgagaccatggaaaagggtgattgacccatctcctgatcatcttgtactaggaaaaaatactgattattcagaattacagaattacgcctccttatattttactgagatctccgagctactgaggagattaccaagggttatattgttgatgcttaaaacaaatgactgtttacgtgcagtcagtcatgccctggttgggggcagttccttggagtcgtttatgattattggacgggtatcttctgaagctgtgctggatgctaaaaggatgaacaggaggtcctttctcgatggattgaagatatggctggaggaagccctgctggaagctcgattctttactttgaagctgatgctatgtgttatgcaacttaggaagttgttgcctggctaaaagcagttaggcgtatcagcagcctttttgaccggtagaactgcggagttgacatctagttccatatattttcttgagggcgaaacttgacattttgcttagaagattgcctttcttttcgtatacataattcttctgtcgatcattttctcaccatgagtggccatttttcatggtcgatacttgataccttcattgggtgaatacaagtatacaaactgctgacgtggacaaatgtaagagcaaaactgttttctttttggaagggaatcaacattgacgtgtagcaaatttc

SEQ ID NO: 23621 - DNA, 1808 bp, Zea Mays
tttagataagtagatttcgagtttttttttcgttttctgttttttatcgtgtgaaattcgtacacacattccagcgaaattcctgcgttgaaagaagtccggccccatccgctgcttaactatcggatcttgcgaaggaacaatcaccaccgttattaagaagatgatgcgctgcgctgcaacgggcggcgggtgcgtcgcttcgtggagcggcgatcggagattgccggcggtcaacccctgcagcgtgcggatgccgacgggcaacactaggttcttttactgggggttctttggcagataaatttgggcggacaagaacattcatcctggatgcagtcccacttgctctaggtgcattcttgagtgcaacagctcaagatatccgcacaatgattattggccgattgcttgctggaattggtatcggggtctcatctgctcttgtacccctttacatatctgagatctcaccaactgaaattcgtggaacacttggtaccgttaatcaactttttatttgcattggaattcttgcagctttgttagctggattgcctctggcaggaaatcctgcctggtggaggacaatgtttggaattgctgtagttccatccattctgctggctgtaggaatggccttttcgcctgaaagccctcgttggctattccagcaaggaaaggttactcaagcagaattagctgtaaaaagactgtatggaaaagaaatggttaccgaaattatgtttgatctgagagctagtggccaaagttcttcggagtccgaagccggctggtttgatcttttcagcaagcgttactggaaagttgtgagtgtgggggcagcactgtttttgttccagcagcttgctggtataaacgctgttgtatattactctacatcggtgttccgtagtgcaggcattgcatctgatgttgctgctagtgctcttgttggagcagccaatgtttttggtactatggttgcatcttctctaatggacaaacaaggaaggaaaagccttctgataacaagcttttctggaatgggtgcttcaatgctactcctagcattgtccttcacctggaaagctctggcaccttattctggtactcttgctgttgttggcactgttctgtacgtgctgtcatttgctctaggagcgggccctgttccagcgctacttcttcctgaaatatttgcctcgagaataagggccaaggctgtcgcattatctctaggcatgcactgggtatctaactttttcattggcctgtacttcctgagtgtcgtgagcaagtttgggatcagcaacgtgtatctgggatttgcatcagtatgtgcccttgcagttctgtacatagctgggaatgtggtcgagaccaaggggagatcacttgaagagattgaaagggagctaagtgtagcagaatgatgtacttttgctagtcatgctgtggcgccgttttggttatcgagaatgcaaccaagcgctcaaccgagcatccttggacctggagactctttctagtttcatgtagttttagaaataagcgaacggcaagagtaccaatcttaggtgacttggtgtgggttgtgtctgaaataagtgaattggattgtagaatttcagaaataagtgaattggattgtagaatttcagaaaaagtaacaaaaaaaaatacaaaaggatgatccttttgcatgtactggttcttctatttcttatcatattcagcctgcagatctcgtcgattcctttccaaaaaggttattagttgttacacttacacatcatcatcatgac

SEQ ID NO: 23622 - DNA, 1170 bp, Zea Mays
tgcttctatctttttctgatgatcaatgttgtaacacatgtgaagatgttcgtgaagcctacaggaaaaaagggtggggtgtatcgaatccagatttgcttgaccagtgcaaaagggagggctttcttcaaagtataaaggacgaagaaggcgaaggatgcaatatttatggttttattgaagttaataaggttgctgggaatttccattttgctccagggaaaagtttccagcagtcaaatgtgcacgttcatgacttgctcccgttccagaaggacagcttcaatgtcagtcataagataaacagactaagttttggagaatactttccaggtgttgttaatccacttgatggggcaaattgggtgcagcattcatcatatggaatgtatcaatacttcatcaaggttgttcctacagtctacacggacataaatgaacacattattctctctaatcagttctctgtaacggaacattttagaagtggtgagagtggtcggatgcaggcccttcctggtgtgttcttcttttatgacctttctccaatcaaggtcacattcacggaacaacatgtgtcatttttacactttttaactaatgtttgcgctattgttggaggtgtgttcaccgtttctggaatcatagattcgtttgtataccatagtcaaagagcaatcaagaagaagatggaaataggcaaattcaactgatgttgccttactattgctgcaattaagtagctcctgttgcagctccaagatccagaaatgcaatgtggcttttcctcgaactcttggcacagttgcgtagttgacaaacaattgctcatcagataactcttgatgtgcttgccaacttgcttccggcaaagataccagcgagcaagatggtcatcttgtatacttcgatgttacatttttgtacgcttagtctgacaagaaaacattttacttcctcgagctgcaggtgttcgtgtactgttgtaaatttgtggtagagggagcctatctgtagtttttttttacaattatgtgtttgtaccagttttttctgagacatttgtagcttagacaggtaaagattgtttgaaatacatataaaccatttttgaaggaaagcaagcttatcgttgtaacccctggattctcattctgaactcataccgag

SEQ ID NO: 23623 - DNA, 2815 bp, Zea Mays
cggtttgcatgtctaaatcactgccatcttggcccctccagctctgacgaattatcatccgtttggccgcttcatttctctccccgcttcggtgctgcctgctggccgaccgccgaagcgacaaccgaggccaccgatcagttgactcccgtctcctcgtcgcagggtctcctcacacgagcacacgaacatcgagccctccccgcaggagcataagacgcttcgcttgttttctaaaacattgctggggttgcagcatgtgtacttgggcatagagggattgttacatcgagctagtgctttggtctctgctgtagcagagcgcaatgggcatccgggcttgttcggtttgctggttgttctatgtgctggttcttgtctgttccttgtgtcagatactttatgttggatcagtggcggctcaaactgctcagttgactgtggatgcttcacctcagaatgctcagataatccctggcaatatgtttggcatcttctttgaggaaatcaaccatgctggtgctggtggattgtgggcagagcttgtaagcaacagaggttttgaagctggtggttctaatactccttcaaacattgacccatggttgatcattggggatgaatcaaatattattgtggcaacagatcggtcatcatgttttgctagtaacccaattgcacttcgaatggaagtactttgtggagctagtgaaactaatgcttgcccatcaggaggagttggaatctacaatcctggttactggggcatgaacattgaaagaacaaatgtctatagagttaccatatacatcaggtcatcagaatcggtggagctaatggtttctttaacaagttcagatggtcttcaaaatctagcctctcatacaatcatgggagacaaagaagatttcgttgagtggacgaaggttgaatttgatttgcaatcaaattatataaatactaattcaagacttcagcttacaaccaccaaaagtggcataatttggtttgatcaagtatcacttatgccatcagatacttatatggggcatggtttccgtaaagatcttgcctctatgctggcaaatctgaagcctcgatttctaaaatttccaggtggcaactatgtaatgggaaattaccttataaatgcattccgctggagtgaaactgttggaccatgggaagagagacctggccacttcaatgatgcttgggcctattggactgatgatggacttgggttttttgaatttcttcaactagcagaagaccttggcgcttgccccgtttgggtggtaaatgatggggccagcatctatgaaggagttccatcagcaacaatagctgcatttgtaaaggatgttgttaatggtattgagtttgccaggggagaccccgagactgcatggggttcagttcgtgcagcaatggggcatccagagccctttcagctttattacgtttcaataggaaatcaagaatgttcaaagtactattataaagataactatgtgaagttctactctgcaataaaagcatcctatccagacatcaaaatcatatcaagctgtgacagatctgctatttcatcagacaacccagctgatttgtatgatgtccatgtctatacttcatcaggtgatatgttttccaaatctagaatgtttgataatacagcccgtaccggacccaaggcaattgttagtgaatatgctgtaactggaaatgatgctggccgaggaacactaatagctgctttagctgaagctgcatttctcattggattagaaaggaacagcgacgtggttgagatggcaagttgtgctccactctttgtaaacgacaatgaccaaaggtggaacccagatgctatagtctttaactcatggcagcactatggatgtccaaattactggatgctgcactttttcaaagattcaagcagcgccacacttcatccgtccactattcaactaccgaactacgaccaactggtcacatctgctatcacttggaataacccacatgatgggaacacttacatgaaaataaaggttgtaaattttggaagcaaagctgttagtctgaatatatctgtaactgggttggaaactgatattcagacatttggatccataaagacggttctcacgtcgggttggctgcgggatgagaactccttccaacagcccgacaaggtggtgccggcggcaagtccaataaccaacgcgggcaagcaaatgggtgttatattgaactcgtactccctgacctcatttgatctcctcttggactcggagtctcaggttcgagcctccatccaagcttatgattagtgtgagatgtgtcgtgtgcgtgcccacaatactcaataccgagatacgggtccccccaaggctccccacaaggctttcaatagaaaatacgatatttgtgaattattgtgaagtacaggcgtacagctggctatgtgtatgagattcaacaaatggtttctacgaccctaataaaggtataaaagcacctttcctcggatatcacacatccgttgtagtctgcactcttgacattttctcttttttagagcatgtacagtgtacctaactaccgcaaactttttgtcctggtgcactacagcgaatgtgccatatataagaataaaaagaagggaaatataaccgtatccatttgtgtgtgtaaccatgtaatcaaggcgtagggatggaggttatagactcaactgatatgttcttgttgggggtttactctgtcgaaggtccttataaaattttcactttagcataaacaaata

SEQ ID NO: 23624 - DNA, 2729 bp, Zea Mays
aaaggagttaaatcctgtggcccatcctgctaagatgaaaattgaaaaggcccatgatcctgggctctctcgtctttcctcgacgagattcccaaaccgctccgccgccgccgctcgtcagcctccgttccaaccgccgcgccggcgacatgccgcccaaagagctgccggggttctactacgacccagagaagaatcgctacttccccatcaggggccccatcccgggcgctgccgcccgccgcggcacgccagcgccacctccggccgtggacacaacgggatgcagcaggaaaagggctaggcggccggagctgctcaacgccagggagatgtacggcggcggagtcatgttctccaataaagccgccaggtccacgttcaagcagcagtgccactacgcgcaggcgtctcagcccatggtctggaagtaccaagccaccacctctgtggctgataaggcgctcgaacaattggacgccatggttcagacaccgcaagggttgaaagagtccaggctgctagtctccggcagcatgaacggttcgattcggttatacggattagggactgctctgagtaactttgagaatgaggcagagtttttgccccaacctgcttgtactcttgtgggaaagcacaagccaggaccactccccagcatttggtcacctggaacaggcttcatagctttctcatccagtatatcatgcataaagaagctcggacgtcatgtccctgatgcatcgaacaccaattcatcagttcagcgagcatggtggctactcttggatctggagaatctcgtgcctctttatatattatggatctttctgaagctgttgacttggcaatcggaccatggactacctacagagttcattcacttgatcgaacaatgtggacagctgattgtagttctgatggcacacatgcagctttcggttcggaccttggtgctggtctgatcgatttggaaacaaggggatcatcatggttatgtcgttctaaaagcgacattctttccctgaaatttgtgcactcggtaacaatcttaatctacctaaacttcttcccactttgtagttttaactggttgagatatcattttatggtttgttgtcaaatgacagttattgaaaattttgcttgcctcaaccttttgcccccactttccagttaagcttaaatttggtgcatgtgcatctaatgcatgactacatgattctcaaagttttgaaaggaaagcaatatgctaccgatgtgacctttcctattgcagcatatgtcataatctgcagacctacgtaatatggattttattctttcttgttgaccctgtatccatgttatgattacttcggaatttactgtgacacactattcctgtctctgctatgcccactggattttctcactcctataagggaaaagttgtgctatgtggtctacggaatgggagtatagcccctgttgatgtacggcaaaaacagcataatcagcctactggagtagcttcatctagcaatgctaggaggacagttcccatgctgcccacaagacatggtgggaagcaaagaaaccaggctagcaaggataaattttcaagagttatttctatgtcgtcagcagtttgtagcttggtttcactctcatcagatgagaactacttcttaggaagctccatggatggatctatcaaactcttcgatcttcgcctcattcagaagggaggtatacagtcgtacgaggggcatgtgaactcacacacacttttaccacttgctgttgatccatctgagaccttacttatgtcaggtggggaggactgcactgttcgcatatggagcatcaaaacaggcgagctaatctttgcgcggagcatgggagacagtcccttcacgtcatcttgttggcccgaaagcagccatggcttgtgcagtccttggctgtttgatgtaaaccacagctggggagcttggttggggtcacgtgctgggttgttctatatgcatggtacttgagttattctgcactactacttacgttactaaattggagccttggagtctagagcaaaaaaaaggtggctgtattctcaagaaacatgagaccactgagctctggagtgaatgaaggacgtcgtctttggaagttacacatcacctagagctagggtgtccagtccttggtaggaattagacatgtttctcttagtggtggatactgtctagctaggaagagagtcttgagggattgatggacgcatgcatcttcaattcctgtgtattgtattactacaggtacaatctgtaatgttacacactgatgatgaattgatgatggctgatgagcaaacataccaggcagctctgtcgaagcctgttgctgatggttcaacatttcagcaacagcacatggcaaaaaagaaaagaaaaactctttctggattcctagcagacaaaatcgttgtccttgttgaacatggtcaggtctaactcctcccagttggttcgcagggtgatgaaaaagaggacgcagttctggcagaggaggccgcatatctgccccatccacagcccctggacgacacagacatgcattgttaatttggtacattaacattcattaattatttggtacatgaacattcgttcagaatagaacacatactgtaccttggtttggaagccgagcgtgaatccgaagaggatggcgagcggcaagcc

SEQ ID NO: 23625 - DNA, 1893 bp, Zea Mays
aaggaaactgacagacaaagggcgtgttcggctggctacaagccgacactgttgcagctgtttggactgctgcagctgcaatccatagagagaaaaatactgtagaagccgcagccgcagccggattgcagccgcagcaagccgcagcgacaagctgaaaataattatggtgacaaatccaagcccacgcggccgaggagactcccccctccacttgggagttgggatccaccaaccttcacccactcgcagcaccagtcatggaggtcgccggcgcccgcgagcccggtagcggaggaggaggaggtggcggcggtggcggaccagccccgttcctgctgaagacgtacgagatggtggacgacccgtcgagcgacgcggtggtgtcatggagcgacgcatccgacgggagcttcgtcgtctggaaccagcccgagttcgccgcgcggatgctgcctacctacttcaagcacaacaacttctccagcttcatccgccagctcaacacatacggttttcgcaaaatagacccagagcgctgggaatttgctaatgagtactttgtcaagggacagaagcacctgctgaagaatatccacaggaggaaacccatccacagccatagccatcagccaggtgccctgcctgacaatgagcgtgcgttatttgaggatgagattgacaggctttcacgagagaaagctgccctccaggctgacctctggaaattcaatcagcagcagtcaggtgctgtgaaccagttagaagatcttgagcggcgagtgcttgacatggagcagcgacagacgaagatgctcagcttcttgcagcaggctaggaagaatcctcagtttgtcaggaagctcgttaagatggcagaggaatccccaatctttgcggacgcgtttcacaagaagcgaaggctacctgggcttgaatgcatcacggatgctaccgaaactgccactagctttttcgatgaccatagcagtagttccaggcaagaaatgggtaaccttctgaatcagcacttctctgacaagctgaagcttggactctgtcctgcaatggcggaaagcaacctcatcaccctgagcacccaaagctcacatgaagataacgggagccctcttgggaagcatccagattacgagagaacaggcatggagtgccttccactggtgccacagatgatggagctctctgacactggaacatccatctgtccctcgaagagtgtgagctttacaacagctgcaaatgacgacgggttcttgccatgccacctcaacctcagccttgcatcatgtccaatggatgtggtcagaagccaaatccccgatgcaaacgtgaacactgtggatgagaaggatggcccaccggaggtgaccacacccaccatggagaaggacgacggcatgcctgacagatgccatgatgctacccagaaccagaaggaggcttcaggtcacgctggggccgcagcagatgcaacgggtaggccgcatcggggcagccaagctccccctgaagaacatacaggtccccaggtggtggtgaacgacaagttctgggagcagttccttaccgagaggccgggctgccccgaagccgaggaagcaagcttcaccctgaggagggatccagaccacacgcatgcgtacgacgagggcactggaagtgacacgagagatatggggcagctgaaactctgaccttgagtttttctagcatgaccttgagtttttgctggaaattggaatggcacgaaggtctgtctaggattgtgtgtaaacagcatcgcaagaatgccctgtacatattatcccagtatacataccggagacagagcaatgcgactacggaattgctgttctgttgtggttaaaaaat

SEQ ID NO: 23626 - DNA, 1682 bp, Zea Mays
cactcgtcatcgctactcgctcacacatgcgcgccttggcacctcgcccctcgcagagtcgcagtctacagcagccgcgcaacctttgccgcgccctgcacaccggagtccaggcggcgcccggcccagccctcatgaatctggccgccttttcctccacccttgccacgctcccctggtatgagatgccatcaataaattcctccgcaactttctcgtcctcactgctccgccgctcgctctgcgcgtcgctccggacgatctcccacatggcctccgccgccgcccccacctccgcgcccgtcgccaccaccgagaacggcgccgcgaaggcgatagagcagcggcccgtgcaggtcgcagagcggctggaaaagttcaagacaacaattttcactcagatgagcatgcttgccatcaagcatggagcaataaaccttggccagggctttccgaattttgatggcccagactttgtgaaagaggccgcaattcaagctatcaatgctgggaagaatcagtacgcaagagggtttggtgtgcctgaactgaactcggctatcgctgaaaggttcctgaaggacagtggattgcaagttgaccctgacaaggaagtcactgttacatctggatgcactgaggcaatagctgcaaccatactaggtctgatcaatcctggcgacgaggtgatactgttcgccccattctacgattcatacgaggctacactgtcgatggccggtgccaacgtgaaggccattaccctccgcgctccagatttcgcggtcccgcttgaggagctggaggctgcagtctccaaggacacgaaagcgataatgataaacacgccgcacaacccaaccgggaaaatgttcaccagggaggagctcgaatccatcgccgccctctgcaaggaaaacgacgttttgctgttctcagatgaggtctatgacaagctggtgtttgaggctgaccacatatccatggcttctatcccgggcatgtacgagaggacggtgaccatgaactctctggggaagacgttctctcttacaggatggaagatcgggtgggcaatcgcgccgccgcacctgacatggggcctcaggcaggcgcactcgttcctgacgttcgccacctgcacaccgatgcaggcggcggccgcggcggctctgagggcaccggacagctactacgacgagctgaagagggactacagcgcgaagaaggctatcctgctggaaggactcgaagccgcagggttcatcgtctacccatcgagtgggacatactacatcatggtcgaccacaccccgttcggtttcgacagcgacgtagagttctgcgagtacttgatccgcgaagtcggcgtctgcgctataccgcccagcgtgttctacctcgaccccgaagagggaaagaaattggtgaggttcaccttcagcaaggacgaaggcacgctgcgggccgcggtcgagaggttgaaggcgaagctcaggaggaaatgaatgaaggggggattacatgtttgtggctggtgattgttgaataatctgtgctgggtttcaactgcgcccggatgcctatggcgatggatcaggatacctgccggctgccgctacacttttgtaacctatggagcaatttgtgtcaaaaaaccatggcatagaaagaaaaaaaaa

SEQ ID NO: 23627 - DNA, 1812 bp, Zea Mays
acggtttccctccacaaccacttgctcctcatctacttttctcctccgccttaaactcatccttgctcctgcctgccgtcgtgcatcatcatctccggccagggccagggcattcgtctccgcctccggtccggcctcctccactccgcgcccccccagacgcgtcgctgcgtagctgctggccgccatggccaccgtcatggccgcggccgcgtccgccgtcgaggcgcccgccacggccaaggccaagaaggagtccaagaagcaggaggagggcgtcgtcaccaacctatacaagcccaaggagccgtacgtcggcaggtgcctcctcaacaccaagatcaccggcgacgacgcgccgggggagacgtggcacatggtcttcagcaccgaaggcccttctttgcctgcgcgaggtctcagaatccggggggaaaaagaaaagaaaagaaaagatgatgactgtctctacctcttgctacatgtgccgcttcctcgtccgggctcctccgctcaagtccaggagtgcagtgcgctgtccaagcgccgccccaccaggtgctagcggtgccacctccacctccaaggtaaacccacacctactacctgtgtgcttcgtaaggcctatctacacctgcaggctgcagccaccagcacagggatatgtaccagcctgctcgtttcagctggaacagtattctccagttttggattggaacatgcagccacagccaaaagtagctgaagcgattggagttgtagcttttcggggataatcaaatgataggagagtggaggtggtggatcatgtgtaagctttagactactgactgattcacttgtctatccggcgctggttgctttccctgtgtgaagcttgtcctagaggtgaaagaacggctagcaagggagcacccaggcctccccacgggcaggtacgggagggacgatgacgacatggtcctctggttcctaaaggaccgcaagttctccgtcgatgaagccgtctccaagctcaccaaggcgattgtatcctctaattcactcgcttgtagcagtgaagctcacacctaatagcttctttactggctcactaaattcctggtatggtaaccgagttcatatagcactgctatcttcagttttcctttcaactgcattagaaatggcgtcaggactttggtgttgcagagttatcagaggaatcagtgaaaagcctgtaccaaactggcaaggcatatgtacatgattccttggacatttatggccgacctgtgctgattgtagtggcagccaaacattttccttcgacacaggatccagttgaaaaccagaagctatgtgcctatttggttgagaaggcagtcaacagacttccgccaggagcagagaatatacttgggatctttgatctgcgaggctttcgggttgaaaatggtgatctccagttcctaaagtttttggtgagtttggtagcttcaaggcatgactaagcatctctgattacctttttttcggtggtagacatgcatatttttatttgtgacgatatgaatgaaacattgtgtttatttgtgacgatatgaatgaaacattgcggccgtggcggctgtggttccggcgggaactgccgatctggaggactccaacccgccaccgccaatccccccgtcgatggttgtcgatccgccgcctcctccaccgctcacccaccaggaagacactgtcgccgccctcaccgctgctcgtgcagagcacgctgctcgacaggcccgcttgcgggaagcggccctcgcgtgggagcgcgcgcgc

SEQ ID NO: 23628 - DNA, 1266 bp, Zea Mays
atggtcccgaggcttttcgaaaagctaaaggatgagtctccgaggagaaggaacacaattgtgactagggtgccaaatattgcgagagaagtctgcgtactttccattcgtaaaattgaaatgttccgattacaattaaatgacatgggaaccgctacgaggagtgatgatatatctggagatgttagagcggcggaggccaacctccgtaggcaactggagcaaaccctcgccgctgaaccctccagcccgctccaccactacaaccttggcgtcttcctatgggaccgcgccgaggcagagcaggagggtgatggggaagaggcgcggaagctccgcgcggaagcgtcggagcattttctcgcggcggccaagctgaatcccaacgatggcgtccccttccgcttccttggccaccactatgcgcgcggcggtgacaatcaacgagcggtcaagtgctatcaccgtgccgtgaccctcaaccctgacgactctgaggctggtgacacactctgtggcttgctagatgttgaagggaaggagagcttggagcttgctgtctgcaaggaggcagctggcaagtcaccgcgtgcgttctgggcttttcggagacttggctatttacaggttcatcagaggaaatggtcagagggtatacaaagccttcagcatggaatacgaggttacccaacatgtgcagatttatgggaggcacttggtctggcataccaccgtttgggcatgttcaccgcagcagtaaagtcatatggacgagctattgaacttgatagttccagggtctttgcattgatagaaagtggaaacatccagttaatgcttggttactatagaaagggagtggagcagtttcgttctgctttggaaatggctccatgtaatcattcagcatactttggccttgcttctgcattgcttgcatgggcaaggaattgtgtaactactggggcctttggttgggctgctagcctgttgaaggaagcttcagaagcttccagaatttgtacttctttgactggaaacctttcatgcgtctggaaattgcatggagatgttcagctcacacttgcgagatgctttccatgggtggatgggaaaatcaaaagggtcatggatgcacagatgttcaaaaattctgttcaagagtggagaaatacatgtttgttagcagcaattgttcaaaactctcatatcaacgtgctttgcatcttactacctgacgaattcaagctgaatctccacaggtaa

SEQ ID NO: 23629 - DNA, 2264 bp, Zea Mays
tggattgaaggggattgagtcggtttcaatccctacaaagaagaagaattcagcccaatcttcagatgatgctgacaatggaaatgtgaaataccttgaagtactggagtgtattccacaggcatctgcaagaaaacatggagctagtactactgataagtcagaaaccagtaagattgcagatgtacatagcaaaccagtttatggcaatcatgataggattcagacagggccaagtccctcaaatctgaacacttctattagagatgatggcaaggaggcaaagtaccgacacattcgttattgcgagaatggtgaaatggggcaatcattgagagtaagagacatgtccccgaagtctccaatcaatcacatttcagacaataatcggagtgagtaccacttgaagcagaggtacagctattctactaaggaatgccctggtgaaagaaacttggatggtccaagcaaagtcaggggacttgagaaagaccgcgctgagatcttgaggatgcttgatgagttgagagaccaggtacagcaatcttgcaatgcgactaatggggcaagtggaattgccccatctactgcagcagcagattccaacagttcacatggtacttctgaccggttgagtcaattgaggcaggttgcaccacaattgcatcagaatggttcacatcactccccatccttgaatgttggaagtcctagcgtttctcgtgtttatgctccgctgcctgcacaacaagattgtgtcagatatgcagagcctatttcacatgctcgagcctctagctatcctgccagcctctatccatggagaaattttgataattatttctttggacagcatgatcccgatcctcttctctcttgccgccatgatggcttctatcaccaagctgcctgttcttgcttgcactgttgccaccaagaattcttgcctatacagggaaatcacataggcttccatgatcaaagggcaccatatcttctgaacaattatggggcttatcctgtggacagtcccttacttggtcagcaaagatacagtgcaagagttaccaatactaccttgcagcagaatcacatgagggtcaacgttagcaagaaggctgcacagacttgtgagccagtcgcaggtggtgctccattcaccatatgctgcaattgctacgaagttctacagataccaaggaaacagtccctgtcagggaacgagtataaattgcgttgtggatcatgctcacatgcaattatagtcaagcttgatggaaacaggctcaatgtatcagaatttgcactatgtacacgtttatctgatggacaggaaaatgacatgggaaccgatgggcaaactcaagacaataggtccattccagcttaccatttatctgttggaagtcctgcatctcaagaacgagatctgcactcaaatttgagcgagtcagagaacaatcatacccctctaggaactgactcagagggcacttccctgtccagggatcttcctgctgaagacagtgcagtttcccatgtaccaaatttaccacatcacagtcattctggatcatctccaactgaacattttggagtgggaagtagaagtacccattctgaacctgaaaaagttatactattaactgaaagttccaagcagacctcagttagaggtatatgtgtaacaaacaagatgcaatctccaaacaatgagtttgatgttcctgaatacacagatgatacattaaatgaccaacaagatactgaccaccctagaacaacaaaggccagtgattcctttctcactaatctgataaaaaggagcttcaaaattaataatggattgcgcaacagaagagcaagggtttatgtaaatggctttcctatctctgatcatgtggtccgaaaggctgagaagctagcaggatcaatctgccctggcaattattggtatgactaccatgctggcttctggggcgttatgggacatccctgccttggcatgataccgccttatattcctgagttcaatttccccatgcccaagaactgtgctggtggaaacaccagcatatttgttaatggaagagagcttcaccagaaggatttggatttacttgtcactagaggactctctgattcccctggtagatcttatgtagttgaaaattctggaaaggtttcagatgaagtatctggtgaagagctttatggccttggaaagcttgcaccaacgtcctgcttggagacacagtatttcc

SEQ ID NO: 23630 - DNA, 1180 bp, Zea Mays
cgccatcgtagccatcgacaccgaccaccgaacttcaacccccattgcgacttctccaaatcccaaagttggaggttgtcatgacgactccgggagtgctcgaggttattgaagatctttgcaggagttatccttctttaacattcggggttggcacggtcttaaatgctgctgatgcaaggaaagctatttgcgctggtgcacaatttcttatgagtcctggcacagtcctggacatacttcatgatcttaaagaaagtaatgttctttatattccaggagtgctgacatcaactgaagttttatccgcttgcagtgctggtgcaaaagttgtcaaggtgtacccagtttcagtcatgggtggggagatgtacatgtcagctctgaagaaaccatttcctcttgtaccaatggttgcttctcaaggaattaaaatcggttcaatcaagggatatatggaagcaggggcatctgcagtggtcttatctgatgctatttttgacagtcaattgatgagggatgggaaattcaatgaaatttcggaacttgcaaatctagcaactttagaggcattgcagttcacgaaatgagacaaatctacaatcataacagatttgcgtccagaatatgtggccttctgttctgtggaaggagtcaattcacctcctggtaactacatgctacttctgtgtaaagagtcagttcacctcctaaataaagctgtaggagctctggtgttctatgcacctgcaagaggctgagactgcaacaaatttgtgtgctccgaagtctgaacagggacctgatcattgaggatgccgtgatgctaagaagccaaccatacatttaggtgccgtgtaatggaatcaccacaactcgcaagagaacagaggtgaatggaagagagattgctggtttgcttgtgctttgactgacctagtagatgttaacgcaggttcataggagtgtactagtagtgcatctctgaagaccgttatacttctaggcaaggtcatggactttgtgtgtttaaaaaaaaggtcatggactttgtgtcgatcaaatgatcaatgtgcttgaacaggtgttgtctgtttttacccgggaattctgcatgaaatgagttggtgctatgtatcaatagacttgtagattttaatgcagttttcttttaaaaaaa

SEQ ID NO: 23631 - DNA, 1190 bp, Zea Mays
aactgatcgagatgccactgacgacgtacttacgtgatctcggaggtggtggcgacgttcctgctggtgttcgtgacctgcggggcggcgtccatctacggcgaggacaacgcgcgcatctcgcagctggggcagtcggtggcgggcggcctcatcgtcaccgtcatgatctacgccaccggccacatctccggcgcgcacatgaaccccgccgtcacgctctccttcgcgtgcttccgccatttcccctggatccaggtgcccttctactgggcggcgcagttcacgggggccatgtgcgcggcgttcgtgctgaaggcggtgctccagcccatcgccgtgatcggcaccaccacgccgtcggggccgcactggcacgcgctcgccatcgagatcgtcgtcaccttcaacatgatgttcgtcacctgcgccgtcgccaccgactccagggcggtgggtgagttggccgggttagcagtcggttccgcggtttgcattacgtccatcttcgctgggcccgtgtccggcggatcgatgaacccggcgaggacgctggcgcccgccgtggccagcaacgtcttcacgggcctctggatctacttcctcggccccgtcgtcggcacgctctccggagcctgggtctacacctacatccgcttcgaggaggcccccgcagccgccaagcccgacacccagaggctctcctccttcaagctccgacgcatgcagagccagtccgccctcgccgccgacgagttcgacaccgtctgacgcccgcccgcccgcccgcccgaagagatcgagtactactgtgtgtgctccctcgctctgttcaagatctcaggtgggagagagctatagctagctgcgcgcgcgcgtgtgtgctggtaggtacatagtccgtgtacgcgtacctacctacgtgtttgtgttttttgtgtcccgtcggccgtcgcctacaccacgtagcagcggatcggagcagtgtcacatgtttttatgtatcttcggctttgtgccacgtcagagttgcaaaggttaattgatgcagccgattatgcttgcccgtgttggtttttgtctattgtacttgatatacatgttctttttgtcatgtacacaacttcgaccatctaatgtgttcttttgagagatctctaaggggttaaataaaaaaatcaagggacgtc

SEQ ID NO: 23632 - DNA, 186 bp, Zea Mays
tggccatcaagctcgtcggtgtaaagtgtcgcagcatgttcgcgcctggtcgccgacccccaaggatgcaggttacccggactggatgcgtcgttccacatcgtctccctttccatgaagcgattggcgcgacacatctccagattcaggttatccagcgtcttctcaatatctagcttccaacct

SEQ ID NO: 23633 - DNA, 907 bp, Zea Mays
tggtgcctatttccctttcaatctccccctttttggtgatcgatgccaacacaaaccaaagcaaatatctaaatgcataattgaactaggttgcataatgtaagtgtaaaggttacttgaaatgaaaccaatctatattctcataagatatgcatggatgctttctttatattcttttgtaaattcttttcaaagtctttttgtaaatagtcaaaggtggttctaggaggtggtcaggatgcaatgaatgtgactatgacagatcgccgtgctggtaaattcgaggctaaattctatcacaagattttgcaagaggaaattggtggtgttaaaggacattttgggccaattaatgctttggcatttaatcctgatgggcggagtttttcaagtggcggtgaagatggttatgtaaggctgcatcattttgattccgactacttcagcatcaagatgtagataaagaacaccagactaacccgaggctgtttgaggcccaactcctccagtttcttggttcaggtgctgttttagtttttttttggttcaggtgctgctggttggccatgacgcacgcagagcaggctcagctcctctaggggtagtggcagtctgttgcttgttttaagacgatgttgctccggacaagcagctttgtcttctgcatgaggaatttgtgcacacatggcaatgaaaagatccttgaaccgctgtcttgagctgtcgttctcgatccatggtttccaatctagtttcgatttgtattctctgttcatctaattgttccaatacggtagtagacacatttcaaaacccgtgtttttttgtttgcttaaaaggcaaattttacttgagtatccatgtgcatacacgttcccaatgcgtatgcttgtgtactaacaaaagg

SEQ ID NO: 23634 - DNA, 3190 bp, Zea Mays
cgacgacaccaccctatgctctgtcctcgcccgcagggtaagaggggccggctgttgcgggctctgggctcagacctctcacctcgggcctcagagagtcagagcgagagtcggtccaacggctactggttccactgtctccgcttccagactctacgttcctgtctcgttcaaaaccctaaacctttcctctccatcggactctcgccgccgccccatggcggcggaaccaagagagcccacatcctcgctggatgcccagctcgcggcctcttcctcctccgcagccggcgtaggcggccccaacccgtgctgcgcgacgcagtggaagaattgccagaaattggtgaggagccggacggcgctgcgggaggcggtgaagctcctgcaggctgagaacgagaagctgcggaaggagaactcggagctcagcaaagtgtgcaaggaggaacacctccgaggtgattcagcagaagcagctagggcaactgagtctgatgccagagatctattggaaaaggagataattgaattaaagacacagaacatgagtttgaagcaaacacaaaatacctgcaaaaataatgatgaacttttacgtatctctgaattagaggaagaaaatagaaagctcatacagattttaggagaagaaaggaagaagatcacttctgagaagaaaaaaattgaagaagaaaagtgcaaaactctagaaatgcaaaggatatggaagtcagaagcacagaagtctgaagagtatagaagagttgctgatactgaaagaaaagttgccaatgattggagagcatcatgtgaaaggttgaggagtgaagcaaatgaactcagagctcagttgactgctcaaattcagaaaacagaagaaatacttaaaagggctgaagcggagaagcagaaggtcgccagagaaaagaaacgtgctgattcagagaaatcattatctgaaaagaatagaacacttgttgaagttgagaagaaaaaagtaacagaagaaaagtgccgtgctgacaatttatttgctaagttagaggagcagaagaaactcaatgaacatttgcgaactagcatacaggttgaaacgaagaatgcaatagaagagaaaaaacgaggagaccatttgtttcagaaattagaagagatgagagaacagactgaatgtttacagagaaaggcaaatgaattctctgcaggtagagatgtaatttcttctggcaagtgtggccggcgacacattgatagaatttctgagaatgcaaacgttaagcttctcaaagagaaacttaagctgaaaaaagaacaactaaagcatgtcaagaatgtgtccaagctagataaagcaaaaactgctttaataagaagagagcttcaaagtttaaagcaagactggacacagctactgggtcggtttaacatgctggatgaccaccttgcacgtggtgttgaagatattcatgtcttaacacagttgaatcagcatccagagatacatggctttgaacagaagctgcttcctaatgattcagttcctgccccatattttcggttgcaggctgggacagttccatttggctcttctatcccaagtgaatacacttcatatcagttgcccagagaaagctgctcacgatcaatctcagggcaaggataacctatttgtctcatcgacagatatcaggaaaaaacaggattcagttgttcccgagctggctcctaaaattagaaatgatagagcattgccttgtggtacgcttacagatagaagagaaacacttggtggtgataggaagagaaaacacaccaaaatgtctcaagacccctctgcttttcttccctcaaaaaatgatttgctacatttgaaatcaaaggtgcctgctaccacttcaaatgttgcattatcctttgatgatgatcctttgtgtctgcagcaaggaaataacaccatatgtgttactgaaggtgacatggataaagctccttcattcagtttcccttctaaagtgtcttgtggaggaaatggctgtactagtagcaagtttgcttcattgatcccctttgaggaaatggtcagggaaaactgcttaaagttgctcaatttggatgatgatgcagatgaggaaaagtttagaaaggcaaaggagagaccccattcaccaaacctgagcatcatccgaccccgtagaactaaactgccaacgtatgcagaacctcacagcttgggtagatctctcaacggttgtcctgccttaggatctgatgccattgattccaagacaaggtccaaagcatcggaagttaaagagcctgtaattcagaaatcgactcaaaattatatccagcttgatccgtcgtcaaatacaatcgagtgtagtggcattgctaaacctctttttgtgaatgataaatccaatgcagctgtcaatgtttcttgtagcaccagtttggttgtagtgccagcgagcacttcttttgacagccttttgcatgagcatgtggcccagaattctgtagcatcttctgctgaggcattagacagtataagcagaccaatgttatcgggaggtggtcattcagattccattttacatttgtccaaggaagtgtctaacaaaaacaactcacatctgatttgtgacaaatcaagtcctgggctgcaagctaatgttcggacaagtgaaacaacagtgaccaagccaaacaattcggtctcgaatagtttgcttcggcaccatcatggatccgaaaaccctccattgcacttagttggatttacaagaatgaaaagaagcaaaatgattaacatatttcggtattgggagatactgagttctcaatctcaaaagcattctgacgaagcttcagttgatggtccactgcttgataaagtgtcaactgacacaatgctacctatagacgagaaggtttccctcatattttcccttttgttgtgggatactagattcactgaagaaacttttgtggatggaaattttgcctcatcagctttttcgtcgagtggtcgattttttttacaagagggtaccacaagctaaaaggcaagttttataggatggcgattagacctgctatcttgtatgatttacaatattgacctataaaatgacaacatatttagtagataagtgttgcggaaatgcgtatgttgtgtttgccc

SEQ ID NO: 23635 - DNA, 2861 bp, Zea Mays
cttcctttcccaactcggtcgacgcgttcgccacggctgcgcagtcctcctcctcgcctccgatcccctcccttcgacgatgcgagcacacccgctcatcctcttcgtacctgcaccgccacctcatcctcttcctcgccgcgccgacacccaccgcgctctctccctcccgcggcgacgcccttcgccaacgagaaccgcacgccgtcgtctcccacgggcactgtcgcacgctgggccacgctgcagtcggtggcgccgccacaccttcttcctccatgtgccgtcgccgccctattcttcttcgagatgcagccgctagcgctgccctcctcccagctccccttcatggccgcgtgcagggactatgtgccagtgttagtttttggtaccagtctacaggtctttcatttctacattcaaaggtgagaatcaatcatgttcggctccctttaaaaaagtaatgtttcccaatccttcatagtaaaactaaacacacattgtaaagacatttgtcgtacgagatcttttatagaggtgtgttttaacccaaaggcaggctgtggagatcaattccagatattgccttcttgttgtgtctcagttgattttttttagcattgaacgtaacttacagtttgacataacaagcggtgaatgtaacactacagtttaactcaacaagccattggctgtagctcacaatcagcttggctgaactgccaaaaaaaatacaagcagtccattacagttcaacttaacaagagcagttctgttggtaaagccgatgcaaataagtaccaattgttagttaggaagggaaaagtgtcagcagtcaatggctgattaaaaaactaaatgtctttgaatttgttgggccgtgtgcctagtgcctggcctattaactggcttgttcgctgcggctttaatccgactgcgactgcggcttctacagtattttgtctctaggaattgcagctgcaatagtattttgcagctgcaacagtgctcccgcatgggcagccgaacaagctaaacatgtacatatatacttattataccagtgaggtgtgtgtagagtagtgtactctgtactcttccagaaaactttacatggtaccggaaccgggaccagcggcgacggtgtagtggtgaggaggcagaggagtgccttcggcctcgacggaagaaggccgccgatggagaagaagaccagctgggagcgtggcgcggcgtcgcggtcgtgcacgaggaggaggagcctgcacttgccggagggagaagaagcatgtagcacggtgcggtgctgcagtcgtgcgtgagtaggttcttattattgttttctatcctgctggatatgtagtcatgacagttaaattatgtacaactatgattacaaacgggaatacaagctaggagttgagaccacaatccttatgaaaagttacactgtaagtatgtcgtcctgcttgcatttcttccatgttccttttctcactgtaagcttagtttttgtgatcagcttccagatagaagagttattaaagtagacactaaacgattccaacctcctgaatctctttttactcctgtaacacttccatttatatttatacataatggtattgtcaacagtacacatagtttccatcagtttgttaatagtgcacctttagattgaatgagcttcttgcagagcaccaaggattaggcattgaaatgtgtggataaaaatattagaggaccacacatcattattatgcaacattgtctatgcacatgaacataattgtatcggtagtaagccgccagcatgtttgaaagttaaaaatgtgaattaagaacgaattatcgtatcctgctatacttatgcaacctaccaagaattagggcattgtagaaaccatataaagtattgagatcaatttgaatttgtctgcctcatgattttttgatacctgacctttatgaaggtagaggacaacattaaggatgatcatagactaccaacattcttcttcagattaaatgttaaattcagtaatttaatttgtttcagatggcggaggttctaataagtaaccttatgattggaaattgcagtgatcggttgtgtgtacgtgtctcccgtctgtgaaaaatttatgatcccgaggatgagtataagcttttccatgctcatatggtcctcatcgacgaggaggtacgcgacctgcttactacatgaagcatgctgcataccagatcaaagaaattttaatatggggctggcagtgctcatgctcaaatataccctccactcactgacgttttcaaacctctgataaaggagggcaatgtctacaatgtctcctacattcagatcaagaaagctaataggatgtacaagcatgttgacaacgatatcatgatcggtttcacaaaatggatcctatgctgcctcaacaaacccgcggtttgaacacgtgacagatgacggcttagcttctgtggatggacatcttggtcgcttttgtagatggaatgtttggttggcttttgtagacagaattaggctgcacttgtgattgtgtaacgcttatgagcatggttgtgtggactgtgtcggccaaagtatacctcccaatgccttgtatatatcacatgcttagctgtctatccccaactaggtcgcctgataatagacttcgatcatgtcatgctattctataacaattttcgctgtaacttgcctaatcgtcatactatggtacacgcttaaatttggtgctgcaactttattgtggattataaaagagagaaaaatacagcataaagttataatgtcaaattgccacagctcactgttaagacttatttga

SEQ ID NO: 23636 - DNA, 1272 bp, Zea Mays
gaaaaagatgccacggtgtgaagtactgaattagattactgataccatgtggtcccaggtgttttaaggaactactgtgtcaattgagggtgggattctgtggttccataacttgactgagtttccacatggtactttagctcccatctttcctatcttagttgctggtctgcattacctaaatgttcagatttcttttcaggggtcccagatcaaggatcacccaggaatttttggcttgctggctaagtactatagaatatacctcaatgtcctgactatccctttgtttcttgtcgcacatgtggttcctcagggatgcctggtctactggactacaaatggtttattttctgtagctcagatcagattccatgcatttaatttgaacaagcttgatgcggcaaaaaatgatgctgtccgcaagctgttgggattgccagatactagagctcaggttggttacagagcacaaaagtcacctcttgaggtacctgagatgatgcagtggtcacagcttgaagatgctaacttgcaaacgaaatcgatgccatctgacaagggaacagccagtgagagtacaactcctaattttgcaatgggaagtatggatggaaatatatctgcgtccagctcacctgaggagctacttgaacaagcattacagtatctgggcacaggctgccgagatcaagccattccactgatcaggacagcagtagagagaaacccagatctgtacacagcgttgattgggatgggacaaaccctgttctcaaatagattgtttcccgaagccgcggtttgttttgaacatgctataccaaagattcaagaagatgaccctcttcttgtgcttgcgtattttggggcaggtctttcgaacaagcgtcagggggataatgagacggcaataaaactcctggagagattagcagagctcaaggaaccagaaaagcccatcaacaaaagccgctacttccaagggatgcttgctttggcaagtatattatatagagaaggccggaattcggaggctgccaaatatctgcggatggctattgcttatgatccttctgtagaaaggcttctcaaggaatgcgaggaaggaatggacgatcagccaaagccagaggagaagtgatgtgctggacctgaaaaagccacagtaacagagatagcacaccgcttttgtttttgaacactaaaaccgcccccagctttttaccctttacccatatgatcgtgcaaaacagagtgaagttgaataga

SEQ ID NO: 23637 - DNA, 1161 bp, Zea Mays
tcgtcacaaagctgcaaacgcctgatgaatacgattaagtcaaggctcggtccactcaagggatgtgatctcgcctcgcccgagcccagtctcgggcaagggcagccgaccccggaggatttacgtctcgtccgaggaccccctcaagcaacggacacaccttcggctcgcccgaggcccagtcttcgccaagaagcaaccttggccaaatcgccacaacgaccgaccgtatcacaggagcatttaatgcaaaggtggcctgacaccttatcctgacgcgcgcccttcagtcgactgatctgaagtgatcgcagtcacttcgccgctccactgaccagtctgacaagaagacagcgccgcccgcgtcgcttcgactacagccgacggtctccgtctcgcccgacccaagggctcggactcgacctcgacctcgaaagacatactcgacctcgacctcggaggagcctccgcctcgccctacccagggctcggaccgaccacgtcacaggaggggccatcattaccctacccctagctagctctggctacggggaaccagaccgacgtcccatctggctcgccccggtaaaaacaaataatgatggcgccccgcgtgctccatgacggcggcggctctcagccctcttacggaagcaaggagacgtcaacaaggactcgacagccccgacagctgtccttccgcaaggctccagcgctcctccgacggccacgacatcacacgaacagggtgccaaaacctctccggcagccacgacggcatgtacttagggcactagctcttctctgctagaaacgttagcacactgctactcccccattgtacacctggaccctctccttacgcctataaaaggaaggtccagggccctcttacagagagttggccgcgcggggaaggacgggacgacacgcgcgtaggcctctcgctccctcccgcgcggacgcttgtaaccccctactgcaagcgcacccgacctgggcgcgggacaaacacgaaggccgtgggtttcaccttttacgcctgtctccccccttcgcgctccgtctcgcgccgacccatctgggctggggcacgcggcgacaatttactcgtcggtccagggaccccccgaggtcgaaacgccgacaattggcgcgcca

SEQ ID NO: 23638 - DNA, 2428 bp, Zea Mays
aagagaggtaactgaacgaagcatccggtgtgtgccctcgtcatccgccgccgccgccatgccgggcttcgctcagcgtctcgcgggcatcccgtggcggagcatcgcgaggcaaggcctctcccgcgtgttcctggtggcgaaggcctactgcgtgatccacgtcgtcaacgaccacctctgctcggtgaccttagtgcggggcgccagcatgctgccgtccctgaacctggcgggcgacgcggtggcggtggacagggtcagcgtgaggctcggccgggtcgcgccgggggacatcgtgctgatgatctcccccgaggacccgcgcaagtcggtcgtcaagcgcgtcgtcgggatgcaaggggactccgtcacctaccttgtcgaccccggcaaaagcgactcctcctccagaaccgtcgtggtaccgcaagatcatgtctgggtgcagggtgacaatatctttgcttctaacgattcgaggcaatttggagctgtgccttatgggctgattacagggaagatcttttgccgggtttggccgccggagagtttcggcgcaattgatgacgcaaccaagcagtcttaacgctgaggaggagccgaggagagcacatggacccatattgtttgctcgcgcccagagattctataatagccaactgcagggggggcccttccttgagctcgagagctttcgacgacctaccgcagcgcatttctacagcgaagcaaagagcgtgtcccgtgtttttatagttttggtgtgtgacaagttctgaaacccaaatcggcacaggtttcgagacagtttttttttttttgaatcgaagttgacataatctatagctacatgaaacgcagtcgtttttgttcacgcgcaagataccctagatttacatgtcagtggatcggagcacagccaacaagcacatatgctgcgtaatgcaggaaaggacctacttggtttcagtacacaaaagcacacagcggactggtagtctagcgagagtcgatccaagatctgaagaactcgtggagctatttggtgtgtggaggaatcataaaagggctactgattgcgttacctaagctagatctgttagaagctataactgcaaaactaaacctgagattctagatctacttctgatgcttgtgagagactagtgcgcttcgattcttgcatctccacctcaacagagatcacttgttttggcttgcagttttctgtctccatccgtctgagtttttccttctgtatggcacgtagttcatacctacaacaggtaggataagtgtacaatgatgttgtcaataacaaatggtagctggcataggagaacgtacgtaatatcatatatcaggaggtaaggtaaactctatatggtaatgtaattgctcatcaaatagcgacagttcagtcctccattatgatatttgcacgttctgtgcgaatgttgcagagaaactggcagtaacaattttggtcaatggattgccaattatgtcagtttcaaccctcaaacatctcaattttttgcttggcaaaaagcttattgtggtattcctatatatgacatcacttcttattatccagggaagaacttacagattacattttttagcttcacagcttgtgcttattctccagggaactaacagattacattattgagcctaaacaggaaagcccactatttcttcaggttatccatgtactgaaatttttattacattacatgtgatcttcctatatagcttcattgattgtgcttattctccagggaactaacagattacatttttaagcctaaacaggaaagcccactattccttcaggttatctatgtagtgaaaatttattccatgttatctttctagcagtacgagtttataccataaagaacaatcaccttgtgatattccttgatagtaagtatataatgaaactatagtaagtgggcgtagcaggaagaagcataattgcttcgatataatgtttctgtttatcgccaagtccaaatttcctgtcccctaaatttagaattgttaacttgtctacaaagcttcatgtcaagacactcctacatgcttgatgcttcaatagtatattcttgagggaacttatagcttgcattttattagcctattacacaagagagcccactagcttttaaggtttatctatgtagtcaaaaatgtgtttcatcttccgagcagaagtatgtatactaaataacaaatcgcctgagtgagatgctaataattaaagaagatagcactcaactgatagtaaccaaagtgagatgctaatttcgaagtttcgctcattgatcaacgactgacagactgcgagagcaattgaactccacaactgaagcatcacacacacacacatggggatactgttaagacgagggcatac

SEQ ID NO: 23639 - DNA, 1679 bp, Zea Mays
actcagcacacacatcagatcgccacatctccgacaccaaccctcctccccctctcgccgtcggccccgcccgtcagcctcggccgagtgcgtctgcctcgcactcccgcggcccctatagacagagcagccgctctagagcgggaggaaaggcgagcagaggagacagagatggggaagggaggaggagaagaggacggcgcggcggcggccgcgcgcgcggcggagcaggcgcgggagctgcaggacgcggcggctgcgctgctgacgcagacgcgggcggaggaggaggcgctgcgccgccgcgccgccgcgttgcagggggagctgcggcggctacgcgaggccgccgcggcgcacgcggacagcgacaaggttgaggaggacttggatcgagcagcgtgcctcatcgctgaaggtgacgttgcgtcgctgctcccgagcaagacgcaagtaaatttgcgggcaacaaggaaggaggtgcagctcaaggtgaaggaggagtacaatagctacagggacagaactgccttgctgtttctttgttttccggtgattttgttgtttcttcgacaatggttatggaatggatgttttccagtattgccagttcagctataccaggcttggttattattcctgtataccagtttagctttgcgtgagaacatactgcgagttaatggaagtgatattcgtccttggtggatacttcatcactactgtgccatgctgatgtctcttgtaagtctcacatgggagataaaggggcaacctaattgtgcacgcaagcagagaggcgtggaacttttcctttgctgggccataatgcaaggatttgtcatgatgctgcagaatagatatcagcgtcaaagattatatactaggattgctttggggaaggctaaaagaatggatgttgtatggggagagactgctggtgttgaaggtcaattgttgctgttgtgccctctccttttcctcctgcagggattcgagggttatgttgggtttttacttctgcgcacagctcatactggcgttgtccctgagtggcaggttgtggtatgcgggatcctgctgatcgcgatggcaatcggtaactttgcaaacacagtggacaccctggtaaccaagtcccggttcaaggcgaagatgaagaaatccaagggcagacgggacctcgacacatgcccctcgccaacaggttcatcatcgccgatagattcagcgaccaccaaagcatgaacaaggccaagaggaaaaggtgcccgtgtttaacccgggtgtgttaccactgtaaagcattttagtgtttttttttcttggccgtcagctcgtaatcctgtccgtcgtctgtgtcgaagctcatactcgtgtaatcaatcatcaggcaagtaggctgctgatggttctaggctggaggtggccgagaataaacttgtggtgtttgtttatatacctgtaccctgaatgaacatcgagtgggctagggtggtgggcttaggactatgtaaggcttagcaaaattttccaagtatagttgtgagacaggcaggcatttgtcacaatgaatgaaacatgcgaagttgtatacacgttgtggcaatgtgttgctttgtatgttggttggtgcatgcttacgttgctctgaaatgtttgttgtgtcacgaattaaa

SEQ ID NO: 23640 - DNA, 3210 bp, Zea Mays
cagctctcacgccttctcggggatgggaaagggctcctccttctgcaagacaaagatgagcactgtaaggataaaattaggatcatcacaacaatagacaaggaattaccattatctcttgaagccctaaaacatgggcaaaagcagttaccttagacactgttacaggggtagagcattccacagcaatacagcacagagtaaaatctttgtagattccatgcgttttacgaaaacaactcttgttagtctgtataggcaggtaatgcaaaacatggcataactatatctaagcttcatctgctgatatattccatgctgcatcgaagcatttttattttaattctgtaatgcaaaagcatccaaatcattttccccttggaaatcagaaatcatggtgttatgaaatttgacgttcataatcatatttaattcaagtatgatatggcacaatatactaccacactatccacctctaacagtcacaaaccaagctatagtacaaaattcgaatgaaggcgatcagcatcgcctcaaattttttacagtacaaaccccaaaaaaataaaacgaagactcgccagatttctgtggcgtgtgtcgggagatgtggtcacctatacgaggggcgatagggggacctgctacggctagggcttcggtccctacggcccctccggccgcggtaccgctcgggtgatggcgaccgccgacgccggcgcggcggagacagcgaccgcgacaggtcgcgttgcatcgtgcgcgacgcgatctagagcctcagcggagccggatctggacgaaaccagacgatcggagccttcggagaggggcggagtctggcttgctggctggaaagcgggaggacgcaggccaggtcaggtagagtcgcccgccgccgcacgcgggggccgatgaggtgggggatgctcgcagcccgcggaatctatctgtgggaagttgtaattaacctccaaggctacgcccaggtatacaaggtgggcgctggggagaagcaaaagcaatcgggccaccaatcccacagcgtgatatgaccgcccggtccagctcagcccaggcccatgtgagtcgtccgacccggatgagtccagatccagacccaacgtgaccgcgagtccctcaagatcacacagtaccggcaggcggcagcaattggagtgtttacgccgagacttgaaaacggcatcagtagcaaacggaggcgaccacgagcgacggggccagccgcggtccccaacgtcagaggatctcgttccagctgcggcagggcggccaacaccggcacctcatgggcgccgacgacgaagccgccgccgccatggaggcgcaagagagggaggcggagatcgagaaggccatgcgcgcccgcgtcgcagacttcaagaagcaggccgactccttgactcttgaaggcgttaggagagcactggaaaaggacctggatttgaagatatattcacttgatgcacataaaaagtttataaagcaatgtgtagacaaagtttttgctgaatctgctgatgaaaatgcaaatgatgatgcattagaggattctgatgctaaagatgatcatttatcaaaagaagggacagatgttgctaaaccaatgcctgtttcaaataaaatgtcctccaatgctgatgtcgtaacatccagcaagacaggaaaggatcctgaagaagaaaagaatcaaacttccagcagtgatattagtgaagacatgataaaagaagccattgaaaaaagggcatcttattttagaaagaactctgatactcttactttacaaggagttcggcgtactttggaagaagatctcaagcttcagaagaaagctttagatgcctataagaattttattactacaggattagacaagattttgcaagaacctgcaaatgggacaaagaaaaaaagtaaaaatggatcttccaaggatactgacaaaacaagtaaaggctctaaaagagtccatgaagaatcagatagctctgaattaaatgatagaaagagtgatatggataatagcgacgtggattcaaggccaagaaagaaaagggcagaaaaggctaaagtcaccaaaaaacagaaaatagttacaaatgagaggaaactgtcaactccaaaggctaaaaaggttgcaaaacaagatttgggtagcagtactgaagaacagggtggcaattcagcagaagaggataattctcattcatccgctgaggaagataataagagaaaacggcaacagactccagcttatgggaaacaagcagagcatctgaaatcgataatcaagtcttgtggaatgactattccacctactgtgtatcggagagtcaagcaagctgctgagaacaagcgtgaggcctgtttgataaaggagttacaggatatacttgaaaaggaaggattgtcaaaaaatccttctgaaaaagaaattaaagcagtgaagaagagaaaagaaagagcaaaggaacttgagggcatagacatgagtaatattattactagttcgcgtcggagaagtacatcaagtttcatacccctgccaccaccgccgcaaatagaagtggatagtgatgatgatgaagacgatgacgatgatgcagaaggcaatgatgcagaaggcgatgatgcagaagacgatgatgaagttgatgaggagaatgtcaaaggtcgagatgaaggtgataatgatactgccgaagctgccaacggttctgctgatgatgctgaaaaggagaacaattgattccggccccagaataggttcagcttcatgttggcttcggcaagttggcctcgttcgtggatgtctggatgtagccagttgctcaggagttctcttctgacgtttatttatgtgtgcgtgatgggaacatttgttggcttcagctttgggtgaaacatgaggaacatattgtccttgtagtgatgtgcaatgtcacattcgtcctcttagcatcttgttcgcgattgtgtagattacaacaacagtcgcaaaacatataagttagcagtaatcaagtactgattggtttattagtttctgatatagtataaacctcgtaggtgaaagattggaattactatgcgcttcatgcttttgccttgttttttcttaggtagtgtttattttccgtggcatggtggcatctggggttttttgcagttctgattggcgttgtg

SEQ ID NO: 23641 - DNA, 1117 bp, Zea Mays
acataatctatttaaagatagtggacatcttcagtagcagctgccgtggccaccataagaatcctccttcagagccatatgtccttgagattatgttggaagtggaggctgtgtgcaaggcgtgacagcgtgtcgtggtcaaggaccctaagctctagcgccaaattcatatcacatttgttctagaatgagatcatgaatggtccctggggttggcctggttcacgctccattctcagtgcgttttccgacatcgttcttcaagcaagcatgcgagctggctcctattttcactgagcttgtggattgtgtgagcttagatggggagtccttgcaagctgctttgtctagaacaaagcaggttcatgaatttaccgcaaggctgctagatattcatgataagatgatgttgataaataataaagaggtggttggcaatgcagtgatgctcggtgaaatcataaactacgtgcagtccctacaatgacaagttgagtttatgtccatgaaactggccaccgtgaatccccaggtggacttaaatagcctgcctaacgtcctccctaaagatgtacatcagtcttgtggtccgccacatttctcgctggagacctcagacgcttcgttgtcgtacctcagccagcctcaccatggaagccctcttggctgcatggacaaccagagttgtatgcatccacttgacacgacgttttgcctggcgataaatccgcagtatcatttcctcaacggtgttagcgatgcatcgtctcagttgcagctaatttgatgcttgtgtttatggaaaccaagaggtggcgctgatccattggaaacctggttgtgtatgaatgggtttccagctacttctattcttggagatagaaaccaacatgtttggtttttgtttttattcgctttagaacaactcatttttgtacgaaaagaggcatttagctataattgtttgttgtagtatgtttaccgcaggatagccgttccatgaaatacataaaaacctgatactgttgttatatttggtttagtcatgctcttatggaacctttaatgaggatttttctatatcaagatatcatcgtcatcgtcattattattgcat

SEQ ID NO: 23642 - DNA, 1088 bp, Zea Mays
gaaccactcataggccgtgtgcggcgttctcaataatcttgttgcgccgccggcctctaccgatcatcaccttcctagctacacgccactggccagtttctttcattcaccatgacgaagctccttcctctgttgttccttgcaatgatgatgctgaacgtcgcttgcagtgcggcacatcacaaggtggaattattggtgcacaaggtgaaggcggggacgacgacggcggaggggacgtcggtcgacaatcaccatgcgataccacggcccgagtatgatagctggagcagccctggaaacatgccgggaagtggccatgacgttgggagccaagaagttaagccatgagcagccttcgctctatacatttctagtacgtcgtagcaaagcttgcatgctaggaccaaaccatagcattcgagaaacagtagaaggctaacgcgcgacgtccattctatcagcggaggccttccagattttttgtcatcatgatggaggaaatgaaagccaggacgaccaagttcgcagctatcgttcttgtatttgctgtagtcagccatggcctgatgagccctgccatggggatgctcgagaacaagggtgccggcggagagacgacgacgacggccacggccaggtccgcttataagcccacccttggtgttggcggcggaaccgccgtggacaaccaccatgccatcccacgagaccagtacagcagtcatggaggagacgacggagggagtggtggtgatacaaacaactagtgcgcaagcatgcagctgctcatgttctctctgtgtggtgccagtttctacatatatgcatgttgctctgtttgcgtggaagacaaaggatatatatatatatatatatatatatatatatatgtaattttgccgaaacactagttttcgtgatatatcttgtacatgtatatatgtacaaaaccctagtcttgtagcatcacaaaatctaccctctgcttgtacatgtatatactgcaccgcgcgctgattccttaagagcggtatatgtataatacaatatgataaattaacgatatttgtgtaataatatatttc

SEQ ID NO: 23643 - DNA, 1232 bp, Zea Mays
gaacaaacgacgtgagtttgggattaccggcaggggcaagcatgtgtgcgtgtaaaagatttaggggatgactaagacatcccctgtgaccctgtgagtgattgtggaacgagagagacggatggagtgagcggcccaccgttgagggtggcaaccgactctagaggaggcaagcccttgccatgtaaggaccgagacgggttaacatcgctttgggaatttctgggcataccatacgccttgtgggtaccagttcggaaggtggtctcccgtaagcgacaccacgaactgtggcataaggcgataagtgttaggaacgacgctgatggtgcgccctgtccgcatccgatagactcctcccgagggccctggatgggggagttcacagttctgttgtgtgggagggagtacttcccacagatcttggctcagaaaagtaggtttggtgccgtgagcgggggatttactggatggtgttgtgtcgaggctcggccatgcctccgcttcgtatgggtacagttgtacaacctctgcaaagtgtaaatctatatgtatagtcgtgtccacggtcaaggacgatccaagggacttatttggtgatgtgtgtgtgtgtgtgtgtgtgtttggtgagttaagccaggaaccggtggtgtgagaccggacctcctgacttgtatctaatatactacagcagtattttagataatgtcgcatgcctgctagaaaaccaacagccacctaaactactagattccaccgctgactaaatgctcgggatgttaaggtggcctgcacgcttatcggcaggttcaggagaggacgagccggagtacgacttcgccaacgacgggtggtacgactaggttgcgggtctatgctcaaggatgcctatggaggaccgaagaccgcggctgctactctaagcttctggatgctagaagtactcgtgtgtgtgcgccggcctgcgagccagtgatatttaccccaagtgttaggggatgaaagcaaactatcatgcttaaattttggtatggatgtgatggcaactgggactatcatagttgtgtaaaaacccagttttgtcgtttcaagggtgctctttagtctctagggcccatgtcagctcgtccttttctctgtcatgggggaactccccttcgaagacttgtcgatggcctctagaagcctttctattgggtgctttattttgtcagtaaacaccagctttctct

SEQ ID NO: 23644 - DNA, 417 bp, Zea Mays
cttaccggcgctagaggcaacagacgtgcccagccacggtgtgggggaggtttcctgtgtccgccctactccagcgagcggcgcaccgttttgcggtacgccgagacgatgccgaaggccacgattgattcacagcagaccgaagatccccaaagccacgctccaggaccaaacaatcaccgagccgatgtacgctccgcgacggtgcccgcattcttccccgcggaaattgggtacgacgattccgtgattccgagctaatcctaggtgcggttcaagcggagggttctgcgactatggtatttgtagcccgtgacacgatcaccgccaaaatcgtgccgacgggtgcgaccgaatcagcccaggagatgtgctcagtatctcaatggatttcgttggagacgaaccccacaggaa

SEQ ID NO: 23645 - DNA, 1676 bp, Zea Mays
taggttttgagagcgaggtgcccgtctgaataggttgcgcacgaggagagcccaccggccaccgcctaccgcaatggaagccgcaggcggcggagccgaggatgagcaggtgatgagcgaggtgcacttgggctgcccgccgcacttctctggcctcctcgtctcccatttcagcttctcctcacggcccctagggccatatggacacaaaggaggcggcggcggcggcggcgggagcgagctagtcgcagcaactagcggttctggtgattcccctgacgcagtcgccgtggatgaggatggggatctcgttctggaccggaggagaagaaacaaatatgctagaggtgaccgccatctgttcactattcagcatggtgttaccagctcgcttaagagcgttgggcttcaggtttggaaagcggccttactattatctgactttattctgcacgaaagcttttcatcgccaaactttgatggtgttactgccattgagataggtgctggaacaggtttggtaggtttagcactagctcgagttgctagaaggatttttgttacagatagaggcactgatatccttgataattgcttggctaatctccatatcaactctggtatgctaaggttcgatgaagctaaagtctgtgtacgagaactggactggaaaatggcatggcctccacctgtgggtacatatgacccttctgatccaagtcggtatttatggtctgcaagtgaagttgaggaggctgagaaagcaacagtcctgtttgctgcagatgttatttacagtgatgatctcacaaatttgttcttcaacacggtgaagaaattgatgtcggtcggtgctaagaaggtgctatacttggccctggagaagagatacaacttcagtgtagacgaactagatgtcgtggccaatggttacacgcacttccgaagtttcttcacagcccaagatgagcacggtgatccgagcaacagatctggaccaggttttgttggaaagcagatagaccctgcagagattcctcagtacatcagagagtatgagaggggcaaggatttagagatgtggatgatcatgtacagtccggaggagaaacagcacagtaactctacaaaaaccgtcttttccttctaggaggacgaagagagcaatgagtgcttggtgcaaaaagacgaattccgttaaaaagacgggaccccctcccacgggcatccatactatcttgacaaaaatgaaaactgctgcttggtgcaagatccgtgtggtgtcgaagaatcgcagttcggcatcttctctgcggggaccgcgacagaaacgaggtcatcagaagagagaaataagttacacctaattgcggcagggcagggcagtggtggctggcatatattaagtggtggacaatcaagaacatgctctgcatgcttagcttaagtatatcatacgtatataataacgccgttgggactcgttttctttgtcgcccggaaacagcatctgtttggtccaagattcttggcacgccattgcgatccaaccctgtcgtgctcaaacatactctctccgtcggctggtgctctcgtttcatttcatcacaagttaattaattttaattttaactaaatatgtataaaaggacaaggccggccttcccagtcacagg

SEQ ID NO: 23646 - DNA, 1273 bp, Zea Mays
ttcacctccctgcgacggccgccgtcggtccgctgcccgctgcccttccccgcgcctccaactccggccgccccttcagccacgccgtcccccacgtggccggcgctgctgctccgcccccctctcctccaaggtcggcagcggcgccccctggtcgtttcccagtcccggcgcgctgctactcaacaccggcacccgagatctcccggcacacagagcctgctcccatggagctcaagcgcgtcctggtcgcgccaacagcagcacgccgagctccaacggtccctcccaccacctctggtgcgaccgctctgccccctgcagggctcggtctccttcccccactgccggaagctatcccctggccctccagcggtgtgcaaacccatgttgccgctgttgaacaagcagttgtaaaagatgctacgaagctggaagctccagttgttgttgttacaggtgcctctagagggattggaaaggcaactgctctagcccttggaaaagcaggatgcaaggttctggtaaattatgctcggtcttcgaaagaggctgaagaggtctccaaagagattgaagcatctggtggtgaggctatcacctttggaggagatgtttcaaaagaagctgatgtagagtctatgatgaaagcagctctagataaatggggaacgatagatgtgctggtaaataatgcaggaattacacgagacacattattgatgaggatgaagaaatctcagtggcaagatgtaattgatctgaatcttacaggcgtctgcctgtgtacacaggctgcaacaaaagtaatgatgaagaagaaaaaggggaaaattatcaacattgcatccgtcgttggccttactggcaatgttggccaagctaattatagtgcagccaaggctggggtgaatgctattgcaccagggtttattgcatctgatatgactgccgaacttggagaagagcttgagaagaaaatcttgtcaaccattccattagggagatatggccaaccagaggaagttgcagggttagtcgagttcctggcccttagccctgcagctagctatatgaccggacaggtgcttacaattgacggagggatggtaatgtaaggttcgagttggcttgatgcacttctacttttgcttaacatttaggcgacgttggttcactttcttgtgcacgggcgattttgggcaacggaattagggttctctttttcttttaatactcaccgtggataaaccaggcatgtggaagttgaaat

SEQ ID NO: 23647 - DNA, 438 bp, Zea Mays
aacaatatacggaagggctttttaaatggacttttagaggctggtgccagtgccacagaaagttcaggtttttccaattgtcaactaggaaatgacgtctcttcagaataacaacaattgatattctggagaagatgttccttccataaagtggtccatggcatgcgaataatgagtttgtttctgctgctctcaaaaagttgccagaaaatgaacacagcaggcaattgcaccgtgctaccaatgatgtgttatccaagcttcacgtggtgatgcgtgcagtagataatcttcacttgaaacacatgcagttagcagggaactataaaaaacaaagagattcgagtgcctagaacagagctgaacagaaacgtctgaaagaggagttgactagtgttgttgccaagttggaagaaagcaaacaaaaactggcagtat

SEQ ID NO: 23648 - DNA, 872 bp, Zea Mays
tggatcacttgctcagcatttcagtcgggagcatggagggttctaacttgaaaggtttggtagatgatgaaattgtcgtgaagacaggcaaagctgcaggcatcggtttagcttttggcagtgtgtatggtgcactacattctatgttgtttgatggacctcaggttggcaataatgtcaagtatccccagctgatcagaactaccaaggtgtgtgggcattatgccgcaagcttagcggtttttggagctacatttgtaggtgtcgagcaggctcttgcaaggtacaggatgaagaaggacatcattaatggtgctgttgcaggttttgctgctggtgcttctctgggtttcagtgctggaagcttccgggcagcattcttttcaggctctgcagtcgctttgacatctgtagtgctggatgtcaccggaacgaaaactactgatgaagaagaaaaaggccagcactagccaccctgagatatggaagagtactatctgtttcagaggagtttcatctctaaagaaatgctagtagagtagtagtataggcggcagtgaggatttcttaaccatcgatactagcacacaaacgtactactccctccgttttttatttatttatcgtgttttagtttaaagtgggcgacaaatattcgagaatggaggtagtatgttcataatagaggtagtaggttgtatacttcgctggggtcatggtctgaggtagttggttgtttcttcctgacgtatgctctatgcttaagaatgtatatcccttctgtgcagagggttcatgctcttctatggtttatatatatatatgtgtgtgttttcattcatgctgaaaaacaaagttgatcatgtcctaaa

SEQ ID NO: 23649 - DNA, 807 bp, Zea Mays
gccgcgcgctccctggagcttctctcccagccgccgccaccgcctctatctctcccttccctcttctctctcccctcacatctctcctctctgtcccgaccgagcaacagcggccaagcactcaagtgttccgcgctcggcactttggcttcgggattcctgacctagcgcagccgccaccacagcgctgcccctgtcgcgatagctctgcgtcgccgctcaacggaggccgacgaggtgacgagaagcggaggccgagcagtcgcacttgcaggtccagtcctgctggtccgcagtccacagttcgccctctaccctctgctctgggatctgcagtaccgtctgcttcggcctcagcactgccatccgcttcagcctctgcactaccgtccaagtcaagtcgctgtatcaccttagcccatggacgctccccatgccttgacggcttgacctccgatggagaggaagcaagttgtactgctgtaccagttcactgtatttgtagactacactacgccatgctttgccaatgaaccagccatcatgttctacaaaattggaggatgaactagccatgatactttgccaatgaaccagccgaagagatctcctctaccttggcagcacgatcaagaatgctgttgtcacggtccctgcctacttcaatgactcacagaggcaattaaaaaagagaattgatctttttatgggcgaagtgtcttgttagcatcaagtaagtggcgacatcacaacccctacaagcttgtgtcttaaaacaagaggatacaagaagttggagcgcttttc

SEQ ID NO: 23650 - DNA, 802 bp, Zea Mays
tgttccagtgctggctacatgtatcaagagttttgaagctttgaaccccagggcggttactgttgtcgtagaccccatatagagtgtgaaggggaaagtagttattgatgtattccgcctaattaatcctcagaccatgatgcttggccaggagccacggcagacgacatcaaaggtcgggcacctaaataactcatcgattcaggctcttatccatgggctgaacagacactactaatttgcaatcaattaccgcaaaaatgagctcgagaagaaaatgttgttgaacttgcacaaaaagaaatggatagatgggctaattttgaagaggtttgacactcactcaaaaaaccaacgagcaaactgtccaggttccatccgtcttgtatgggaatgaccattgagcaagccaaaaaattacatgtgctcggattgtgctaaagaaaatggtgcaaagagaccctcaaactcatacccagtttcaccaaactctgattctaagatatggacctcggtggttttctccacgttaggaaagctggaagagtcttttctactcagttttatgataacagtggtgttatggtcaaacaaagtcttgcgtgtatgtaccaacagctaaactgtaaacacgacattaccatagttgattacatgaataattatcttttatatcttattgtaaaatctgaaacagttgtcatgtagatggttagcttgcattttacgctacaattacttcaaatcacttcttgtttcattttacaccaatttacgacatttattgatgcgttttacgtca

SEQ ID NO: 23651 - DNA, 1559 bp, Zea Mays
ggcctccacccagcgtacatgcgctgcggtcgtctgttgccatctcgcgttcggtggtgactccgggctccgggcgccctgcgcccctggatttcgaaccgagaaagaaagctgctgcccaccgtttcccaagtcccatcgccgcccaagaaccggagccacgccgcagatccgccaaaatcacacctcctagcccgtcctccgtcccaatctcttctcgggccagggaggcggcgggacttggtgcctgcatccgagccctagacatggatcaacctgaggaaaaccctgaattcccaagctgtgatgcctactttgaagctatccagtccaagaagaagttgccactgactttgcaagaatcactaactgctgcctttgctcagattccagtctcatccttccctgaggttccagctggtcgagtaattgaaattcctggtgatacttctgttattgatgctgtaaggactctctctgaacagaacataagggcagcaccagtactgaatccagaacctggggctcctactgattggcaggggaggtaccttggtgtcatcgattactcggcaatcatcctttgggtactagaaaatgctgagcttgctgctgttgcactctcggctgcatcggcaactgctgctggagttggcatgggtgctgttggtgctgttggggtggcagctttgggaacaactggcccagctgctgtagctggcttaactgcagctgcaattggggcttctgttgctggtggattaactgctgaaaagggtgtggcgaaggatgggctaactgctgcagatcatttaggggaggatttctacaaagttttacttcagcaggaacctttcagatcaacaacagttcgatcgattgttgagtcgtaccgctggtctccttttgtccccattacactggacacttccatgctgactgtacttctgttgcttagacccaacttattttcaaatttcagttgacagtcattgaattcatgaagactctaggctccactcttcctgattcagagagcaattgcctggtgaagccaccacccacttgcactcctgacgcttcccttggtagtgttattgacagcattgcatcaagaataacacacaggatatatgtagtggatgatgaccttgaggttgttggtgttgtgactctgcgtgatgtgatctcatgctttattcatgagccacccggttattgcgacaactatttggcttcagcgatggagaagcttgaggggaaaggagtcagatcagtggagaaaatttgagcttttctgtagcgtgaatgttgataataacaggtcagtatgtgaggaaggtttatttggttggaacggtgcattcgtgtcgtgttaatccagcaaatcctgtgtaggttaagtaacaaggcttctgtgctgttaaaaatattttactatgtcatttctttggacggttttctgaacaaatgtgtggtaaccattaggccttgttcggttattcctacaccaaatggattggatgtgattgaaaaaaaaatagtagagatttttgact

SEQ ID NO: 23652 - DNA, 2311 bp, Zea Mays
tggatgtacatgtactacgcgggcaaagcaaagcatcggtgtctacctcattattttcggagtccgagtggcgaaacccgccgcagcttccactgggcagtgctccacaggctcatatccgattccgatccctaagacctcagccgctgcggcatccacggccaactcaagcgctggcaactggcaagggcagatgatctgtgtatagcactcgctaccttctcttgatttccccctcaggtcgctgaccaagggtcctgtccgccatggatgcggagcgaagctctgcacgcagcgccacaccttttggtccgccgtccgatcgccaccgctagacgccacgcctgcgttgccttcccggctgaatcgccgattcccttggcggtctagtgcctgcggtcggcgccagacgccggcgaggtagccgcgagacacaggtacgggtgccgaacgggaacggctgctgcccgccgagcccagcagcagaccgtcgccgaggccgcgcgcaagctccccgaggacgcggcgtccaggagggggctgttgctggacttcttcgtcatccttcccgtgatgcaggtggtggtgtgggttgcggcgccggcgatgatccgcgcggggctgacgacgccggtgatgacggtgctgctggtgtcgttcctgctggagtacctgcccaagatctaccacgcggcgcgcctgctccggcggatgcagaggcagtctggctacatcttcggcaccatctggtggggcatcgcgctcaacctcatggcctacttcgtcgccgcccatgctgtgggcgcgtgctggtacctgctcggcgtccagcgggccagcaagtgcctgaaagagcagtgcctccaggcggccgggtgcgcgcgcggcagcgcggtggcctgcgcggcgccgctgtactacggcggctccccgtctcccggagtcggcggcggcgacaggctcgcctgggccgggaacgcgcaggcccggggcacgtgcctcgccagcggcgacaactaccagtacggcgcgtacacgtggacggtgatgctggtggcgaacccgagccgggtggagcggatgctgctccccatcttctggggcctcatgacgctcagcacgttcggcaacctggagagcacgacggagtggctggagatcgtgttcaacatcatcaccatcacgggcgggctcgtcctcgtcaccatgctcatcggcaacatcaaggtgttcctgaacgcgaccacgtccaagaagcaggccatgcacacgcggctgcgcggcgtggagtggtggatgaagcgcaagaaactgccgcggagcttccgcggccgggtgcgccagttcgagcgccagcggtgggccgccacgcgcggcgtcgacgagtgccagatcgtgcgcgacctccccgagggcctccgccgggacatcaagtaccacctctgcctcgacctcgtccgccaggtcccattcttccagcacatggacgacctcgtgctcgagaacatctgcgacagggtgaaatccctcatctttcccaagggagaaaccatcgtgagggagggcgacgtggtgcagcggatgctgttcatcgtgcggggccacctgcagtgcagccaggtgctgcggaacggcgcgacgagcagctgcacgctggggcctggcaacttcagcggcgacgagctgctgtcgtggtgcctgcgccgcccgttcctggaacgcctcccgacgtcgtcggcgacgctggtgacgctggagagcaccgaggtgttcggcctggacgccgccgacgtcaagtacgtcacgcagcacttccgctacaccttcaccaacgacaaggtgcgccgcagcgctcgctactactcgcccggctggcgtacctgggcggccgtcgccgttcagctggcctggaggaggtacaagcaccgcaagacgctctcgtcgctctccttcatccgcccgcggcgcccgctgtcccgctgctcctcgctcggggaggagaagctccgcctgtacacggccatcctcacctcgcccaagcccaaccaggacgacgacttctagctagcttagctaggccgttccaggccggattctcttctcctcagcgaggagtatatatatcaaacaacatgcatttatttgtagtattcattactcgcatgtcgcatgagagacagagccatgaccgtactccctccgctttcctattagttgtcgtttaggataacgacacggtctctaatatataactttgaccaatattttttgttaaaatacaaataaactcttaatacatttatacttttat

SEQ ID NO: 23653 - DNA, 808 bp, Zea Mays
cgtggaaagaactgcagccgatcacatgtcttgtttatttctactctgttaaccaccattcattcaggcatcgcatcctgggacccataactcttttagcaacattctgaccaatcaaatagagaagcatgggactgcattgctgaaacatctgtgtcagaaggagaatcttccttccatgctatgcattggttttctcccggacatcatcaagagatggggttttacaaacaaccaccaagggcatgttgtggcgcgcctgggaggggtccttacaatttcaacctgacagcgaagtgcggtgagcctggtgcctcggcttgcgctgatcctaagacgcactggagctgggatggtattcacttgacagaagccgcgtatctgcacattgccagaggctggcttcatggaccgttcgcagaccagcctgttgtacaagcatcttgagttgagtacagtacacccagcctctcctccctgctgttcttgcacctctagagtgagtgtgccacaatagcacacaccgtgcgtgacaccaaactggatccgataaggtaaggtagtagtagttccagtgcagtcgggtaaagagctgagataggtctattaattaaagcttgattcctttcattcaggatggtggtataagtacaatgtaatgcacaaaacaattcatatgagtaccagttagaaatcactatggtggttagcttgctccaacttctgtatctaacttttgtatctatttatatattttttatatatataggacatatcatgtacaaccatgtatgtcatgcaatcgaca

SEQ ID NO: 23654 - DNA, 155 bp, Zea Mays
agttagttgccggggacgaagttggtggcgtaggcccaggcgttgttggcgacggggtcggcgacgtggtcgaaaaggttttcgatgggatccttgccgatgacgaggcgttgttggcgacggggtcggcgacgtggtcgaaaaggttttcgatg

SEQ ID NO: 23655 - DNA, 3204 bp, Zea Mays
gcaccttcttgcggccttgcctttcctcccgcctccgcctccaattccccaacgggaactgttcccgctcccgcgtctatttatccccggcgatagaggatggtcgagagactggtgcttcttgctggcggtttcttctcgtccggtcgccatggtgcacgagacgagatcacgggtgcacgcagctgcccaggaagaaggcaagctcgcctcaaaaaagcagaaaccagataatgaaaccaaggaaaggggccagaatgtgccctccaagaacaagaagtctgccgacaacgaagggaaagacggggagccggaggcgccaacaaagagcaagaagctcaaagctgaggaatctgagccaaatgggagggaagctgctgcaagagagtttgcagagttttgcaaggccataggagaacgcctctccctcgaggacatgcgcaagatccttcaagccaatgagcaagatgcttctggatcggaggatgcggtcgttccaagatgtgaggatatgatgttctatgggcctctcgagaagtgcccagtatgtgagggtcagcttgaatttaaggagtggaaatacaagtgcactgggaactacagcgagtgggcacgctgtactttcagtactaacgacccttcaaggagaagcggttctatagaagttcctgatgacataaaagatgattttatccgcaagtggctgaagcaacaagaaggaaaggagttccctaaacgtgatcttgatgaagaggctcatatcttctctggcatgatgattgcattgtctggacggatgtcacgctcacatatcatgaagcatggagggaaggtcaagaattctgtgcttggtgctacctgtgtcgtggcttctccggctgagagagacaaaggtggctctggaggatttgctgaagcattggagcgtggaactcctgttgttagtgagaattggataatcgatagcattgagaaaaaggaagctcagccttttgctgcctatgatattgttactgatgttgttccggaaggccgaggactcccgctaggccaacttgatccaagtgaggaggccattgagaccttagctgcagaggttaaacttgctggcaagagatctgtccacaaggattccaaactcgataaagacggtggatgtgtctttgagaaggatggcataatctacaactgcgcttttgctgtttgcgatctcggatgccagatgaacgagctatgcatcatgcagctggttatggtccctggaaatcgtttgcacctgttctacaagaaaggcccaattggtcatgaccagatggcggaggaacgggtggaggattttggtagccgtgtcaatgatgctattaaagaatttgttcggctatttgaggaggtcactggaaatgagtttgagccttgggaaaggcagaagaagttcgagaagaagagtatgaagatgtatcccttggacatggatgttggggttgatgtgcgtcacggaggtgcagcacttcgtcagctgggttctgcagcagcacattgcaagcttgatccttctgtttctttcctgctgaaacagttatgtggacaagagatctacaggtatgctctgatggagatggcccaggacctacctgaccttcccatagggatgcttaccgatctccatctgaagagaggggaggaaatgctgcttcagatgaggcgagacgcggagacggtggcagagtccggcccagaagcagacgcgttctggaccgacgccagcagcaaatggttcactctgttccccacaactcggccgtacacgatgaggggcttcgagcagatcgccgacaacgtagcatcaggtttcgagacagtgcgcgatataaacgacgcgtctcgtctcatcggggatgcgttccgctcgacactactggatgacccactctctgaatgctacaagaagctcggttgttgtatcagtgctgtcgccgagggctcggaagactacaagatggttctcaagtacctggagaagacgtacgagcctgtcgaggtggaggatgtggtctatggtgtgtctgtcgagaggatatatgctgttgaatccagcgcattccctttgtacgaggaaatcaggaacctgccaaacaaaatccttctctggtgtgggactagaagctcgaacttgcttaggcacctccacaaagggttcctgcctgccgtctgccatctgcctgtgccagggtacatggtaggtaacccaccagtgacgataatgccatgccatccgggtcgtaaagagatatataattattagggagctacgtttattattcttggttggtttctcgtgttttttttttttttttttttttttttttttttttgcagttcggcaaagccatagtgtgttccgacgcagcggcggaggcggctcgctacggcttcactgcagtggaccgtccggaagggtacctggtcctggcggtggcctctctgggagaagagatcgaggaagtcaccggaacaccaggggcagaggaggcacgagtcctggaagagaagaaggtgggcgtgaaaggcgtcgggaggaagacgaccgacgagtcggagcacttcagctggagggacggcgtcaaggtcccctgcggcaagctggtgccgtcggcgaacaaggacggcccgctcgagtacaacgagtacgccgtgtacgaccccaagcaggtgagcatctgcttcctggtcggggtgaagtacgaggagcagaacatggaggtggtgccgccggacgaccagtgaaggagtcgtctcgtggagtgtcctagggcagggcagggcaggccaggccaggaggtggtgggacccattttggttagtggagccggtagcggcgacgcgttggccgtcgggtggaatggaaacgtgaggggtgccagaacatcctgggctgcctgccgcctcctggttttgtgtcaattgccgtgtctgtggctgtgtgtactacttggtagttggtagcgtactttattagtagcgaaggtgctagtgaccctggctaggtacaagcccttgggaggctgcttgctttgtatgctaacagttcgttccgttccgttccagcggcccttttgggtgctgacagttcgttagcacggctctgagagagaacgtgttccgctctggtttagcactaaatgaaaaaaaaaacatgtttccttt

SEQ ID NO: 23656 - DNA, 1640 bp, Zea Mays
gctgtgtcagtggaatggctgagcatgatctagagagtggtccccacgcattagtgtcttgtacagttgtacttgtcggcaccagaatagcaccaggaaggagtcgaagaagccaggcagcccagcacggagctctactgtattattgtgtggctcagctcaacaagctcgccgcaccgtcgccatggacgccgccaccggcaactgttcctcctctccgctgcgcatcgtgatctgcccgtggctcgcgttcggccacatgctcccgtgcctggagctcgcggagcgtctggcttcgcggggccaccgcgtgtccttcgtctccacgccgcgcaacctggcgcgcctcccgccgcggcgccacgacgtgcacctcgtgcccctgcccctcccacgcgtggagggcctccccgacggcgtcgagtccaccaacgacgtgccccccgacaagagagacctccactggaaggccttcgacggcctcgccgtccccttcgctgagttcctggccgccgcgtgcgccgacgaggctaccaggccggactgggtcctcgccgacacattctcccattgggcggccgccgtcgccctcgagcacaaggtgccaagcgcgatgcttctcccgagcgccgccatgatcgcctcgtgctggcaccggccgccgtcgcacgccgagcagccgagaagcgcagtgtttgaggagccggcggaacggccggcgggctgctggccatgcggagctgccccgagtgggagccggagaatttcacggtggcggcggcactcctcggcaagccgctcgtgccgctcggcctcctaccgccgtcgcccaacggtggacgacgacgagaggaggacggcggcagtacggcgcgctgctggctggacgcgcagccgccgagctcggtcgtgtacgtggcgttgggcagcgaagtcccgctgacggtggcgctggtgcacgagctcgcccttgggctggagctcgccggcgcacgcttcctttgggctctccggaagcccagcggcgtcgcggacgacgccgacgtgctcccgccgggattccgggagcgcacctgcggccgcgggctcgtcgccatgggctgggtccctcagatgagcatactggcgcacggcgccgtgggcgggttcctgacgcactgcggccggaactcgctcgtcgaagggctcctgttcggccaccctctcgtcatgctgcccgtcgtcggggaccagggccccaacgcgcgcgccatggagcggaccaaggttgggctgcaggtggcgaggaacggcaaggacgggtcgttcgaccgccacggcgtcgccgccgccgtccgggaagtcatgctggtggaagaagccaggaaggtcttcgtggcgaatgccctggaaatgcagcgtgttgtggccgacaaggaacgccatgagagatacatcgacgagttcatacgccagctgagatcttactccactccgccggcagcgagttaaaaaggcgtacttggtggcttggtgcctcgcactgtatgtctgtatggggtctaggatgtcaacggttacgtacccgtccagtaatattattccatacttacctatcaaaaacaattttattcgtcgggttactcatatatgctcgtgga

SEQ ID NO: 23657 - DNA, 2723 bp, Zea Mays
gcaactgaaacacaggtgggaaaagactgtctcccgcagcggctgttcagcttgctttcctcacgcggccggagacttctaggctgcttccatatgcgtgcgagtgccagccgttatggagcaaaaaagctctgccagccttaccgtccctacggcacgacgcctctaacgtcggcgaccgcgacgacgatgaccccgcgtatcccctcctcgtgtgctccgttcgcaatcgctgcctccatctcctacaggtgcggccatcctgtcacccccaaaaatctcagattcgtagctattagggtttctacctgtcgatctggaaataaaccatccatccgaacgcgctgcggaggttggtggcacggcgaggctgtggctattcgtgtccggagacgagcagcgtgagacaacgcggttccacctcctacccctcccaatcgacgcaagcctctaccgcaaacctgtgaagaaatgcgcggacgacaccgaagccacgccgccgcgctcatgcacccgcacgaccgacgatggccggtgaggcgccgccgtcatccttaccatctcgcctgcgcatccgctcttcttcatctcatccgacctccactcttcttcacaaatatgcatggcggtcttcgcagaccgtccacgacgcctctgtgctcattcctctctttcgattcttcgatgcccagtttacttgcaaatgcagctgctgacaaacactctccctaagttactctgtagaggataacaaaaggatgctctcctcctggttccagtagcagcaatgcaatagaagattcagtttctactttgctttgttgatcctctccaaaagcccaaccaaacttaatttgtctacacacacgtcgttacttttctattttcccatcaaacaataccatacagaataaaacttgatttttttattccaaatattgtaggttctctcaacgcttgcacccatcacaaatctcttttcatgtcatgcggcttctaccagaccatgtttgactatccaaaaaaaacactttgttcttccacatttatgtgatacatacacgacattacttttcctttttcccgtcatttcttaacatatatacaacaaattttaatatgcatgtttttgctgctccgagctgccttctgtacataatgaccactgtgttgaaatttaatagctcaatagaatgtcatttgctttctttcttcttgcctatcttcgaatatctataacttatttacacaacaatttctagatgcatctgttacaatagaatcctatgtcctgctatagttttatttacaattaacaaagatcattacatatttttccccatatgtacagcttgatgcaatatccgacgacaaagaaaaaggtccaaagacacaattgaattgccgtccaaaagatcacattctgcaacataatctcctacatgaattattttatgcttgccatgatatcatcattccatttttccttcttaattactgagaccatatacctgatcttctttgtactacatttcaatgacatgtttttatcttcatgtacaacatgttatacaatgttctctattctattcaagtgcatcccaaacgtaataccatataaaaattcagataaaggaaataggttaaatgtgatggacacttatactaaacgtatcaatctctgcattttccctgtttctttgttttttgattatttgttgcaacgatctggcattatttgtgaaaatatatataaataacttgctaattttttaaaatatgtgcccaaaatgatacaaatacaactcactccataaatgaaggtacaaataatagttcattaacattttttacaattcggctgaaggttcaagcaaggacccttgcgcatcagtgaagaaacgaacaataaaatcttccaagaactaaagattccctcgtatcaccgccagtcttttgagttgtgggatatttattttgtattatctatgtaatgatatgtatatatgttttttaaacaatttgtttaaatataacaaactaactccagatattgcaacagacatattaacccttggtatgtctcacctaactttattttagataaacctatctattctagactctactcatatgttctgtgtttggtgtgagtatattaattacaataagtacaaatagtttgcttacaatcaatataacatatttaatattaaaattacaaaacatttgtgttatgttgtaaatagattatattgaacaaacctgttcacttattgtaaacagattcattttgtccctgtattacaatatttagcaaattaaataaactaaaatttttacagtttgtttaacctgtaaacagatttaaatatcgtttttgcaccagatttgtttcctcattaattcaaaggtccatatacactaaaattatttttcccttaattcaaagagacttagttctcttgtgtttttttgggaaaacaaagatgtctaaaattttgcactttgttgccaggactgttttgtagtcttagtgctttgttgtaatcagattcatcttgtccttatattatagccgttagcaaagtaattcaaataaaattttgcagtttgtttgcaatctgtaaacagttttaacatcatttttttgctctaaatatgttctctcattagttcaaaggtcaatgtgcactgaatatgttttaccttaattcaaggag

SEQ ID NO: 23658 - DNA, 3168 bp, Zea Mays
cttgtataactgcatgaaatgaggtacttgagagttatgagcgagcgtataataacatggtgcgtgttcaacaactttcagaactggaagaggtgattgattactgcactcttcccatggaaagcccgattgctgacggacggagggaacttattcgcaatatgtggaatgaacggattaaaggaacaaaacggaatgtcgaggtgtggcaagccctacttgctgtcagggagttggttcttccccctaacgaagacagagacacctggataaagttcgctgaactttgctggaagaacggtcgtattagtcaggctagatctacgttagtcaaacttttacagtttgatcctgaatcttcccctgaattgacactgtatcatgcacatccacaagtagctctggcttatctaaaataccagtatgcagttggtgatgagcttaaaaggagggatgcattttctaaactgcaagagttgtctgtgcaggttgctaccaccatgggcaatttacctggaacatcagcaaaccatggcaccatgtcaaatgctggagtaccactcattgctcgtgtctacttgacacttggtagctggaagaaggcactatcacctgcattagatgacgattccattcaagaaattttgatttcttaccataatgccacgctaagtgcaaaggactgggggaaggcctggcacatatgggctttgttcaacacagaagtcatgtcacgctatactttccgaggccgaccagatattgctggaaaatatgttgttgcagcagtaactgggtatttttattctattgcttgtgcatctactacgaaaggggtcgatgatagcttgcaggatatccttcgtctgttaactctttggttcaaccatggggatacctcagaagttcaaacagcgttgcagaaaggtttttcccttgtcaagattgagatgtggctggttgtgctgccccagataattgctaggattcattcgaacaatagagtagttagagaactgatacaatctttgctagttcgaattggaaaggggcatccacaggctttgatgtatcctctcttggttgcctgcaaatcaataagtatattgagacaacgtgcagcgcaggaggtcgttgataagatccgccagcacagtggaggtcttgttgaccaggcacaacttgtgtcgaaggaactgatacgggtagcaattttgtggcatgaaatgtggcatgaggcactcgaggaagctagcaggatgtattttggtgagcacaatatcgaaggaatgcttgctgtacttgagccattgcatgcaatgcttgagaggggggatgagacaattaaagaaaatgccttcattcaggcttatgggcatgaattactggaagctcatgaatgctgtttgaaatatcgggctacaggagaggatgctgagctaactaaggcctgggatttgtattaccatgttttcagaagaatcgacaaacagcttccaagtcttacgaccctcgatctgcactctgtttcgcctgagctactcaaatgtcgaaagttggaacttgctgtgccaggaacttatgctgcagattcaccacttgtgacgattgagtattttgttccccaattgatttgttataacgtccaaacaaaggccaagaaagctgacaattcatggaagtgatggcaatgattatgcattcttgcttaaaggccacgaagatttgcggcaagatgaacgagtaatgcagctttttggtttggtgaatactctcctagagaactcaaggaaaacatcagagaaggatttatcaatccaaagatatgctgttatacctttgtcacctaacagtggtttaattggatgggttccaaactgtgacacacttcatgctctgatccgtgaatacagagatgccaggaagattttcttgaatcaggagcacagacttatgttggcttttgcacccgattatgatcacttacccctcattgcaaaggtggaagtgtttcagcatgctttgcaaaatactgagggaaatgaccttgcgaaggttctgtggctgaagagtcgaacttcggaagtatggcttgagcgccgcacaaactacgctagaagcctggctgttatgagcatggttgggtatttgcttggtttaggagatcggcatccaagcaaccttatgttagatcgctatagtggaaaaatattacacatcgacttcggagattgctttgaggcttcaatgaatcgagaaaagttccctgaaaaagtaccattccgtttgactcgaatgcttgtgaaagctatggaagttagcggtattgagggtacattccgaacaacttgtgaaaatgtgatgcaagtccttcgcacaaacagagacagcgttatggccatgatggaggcatttgtacatgacccgttaatcaattggcgtctgttcaatttcaatgaggttcctcaagtgtcgaactatggtaatgttcatgctcacacggttgtcagtagtgaagaagcagtggctaaccgagagctcatgcaacctcagcgaggagcacgtgagagggaactgctacaggctgtcaatcaactcggtgatgccaatgaggttttgaatgagcgtgctgtagctgtgatggcacggatgagtgacaaactaacagggcgtgacttctcttctgggtcagctttggctggagcaggtggtgtccgttctggtgagctctcttggaaacagtagcagtttataacatgtaaatattgtgaataccgtgtgcatagaagtttcgtggtgacagtttgtatgtgcagctttgtaattagcagaacttcaagatgccttggaccatccttttgtcagtttcttagaccgtgtttagcagttcacccttatggccatccaaaacactgtttttgtactgtagattgtattgtttgtagattgtactgttcgcagggtggatttttgaatatgagtataagaatgtgtaagctgttgaagatagccttaggttttcttccgtgccacttgagggtttgttcgattagctctcaatttatgtggattgagtgagatcggattggtttaaatctcaagcaagttaaattttcttcttaatttttctaatctcatcaaatccatgtgtaacgggaataaccgaac

SEQ ID NO: 23659 - DNA, 2042 bp, Zea Mays
gcccaaaattacggcccctctctttctctctctgactacctccgtatgaggcagcttgtgctcgttcgagactgagacaccccaacacgcctccctcagcgcagatctcgccgccgccgagatgctccgccgcggcgtgcttcttctcgcggccatcctcatcgccgtcgcacactcgcccctcgcgtacgcctcggaggccgagcacaagtataaaacagaagaacctgttaagctatgggtaaacaaggttgggccttacaataaccctcaagaaacttacaactattacagtctcccgttttgtcaaccatctgaaaaccctgcacataaatggggtggtctcggagaggtccttggtggaaatgagctgattgatagtcagatcgatataaagttcataaaaaatgtggacaagggggccatttgcacaattgaacttgatgttcaaaaggttcagcaatttgctaatgccattgaaaactcatattggtttgagcttttcatagatgatctgccattgtggggttttgttggggagactgacaaaaacaatgagaaaaagcactacctttacactcacaagaacattgttgttaaatacaatggtaacaggataattcatgtgaatctaacacaagagtcacctaagcttcttgaagctggcaaaaagttggatatgacttattcagtgaagtgggtgcaaacaaatgtggcatttgcacggcgctttgaggtttacttagactacccgttctttgaacaccagattcattggttctccatcttcaattcattcatgatggttattttcttgactggtttagtgtcaatgatattgatgaggacactaagaaatgattatgcaaaatatgctcgtgaagatgatgatctggaatcacttgagcgagatgttaatgaagaatccgggtggaagcttgtccatggtgatgtgttccggcctcctcgtggccaggtgtttctttctgccctagttggtattggcactcagctggcggctcttatcctgcttgtgattgtgttggccattgttgtcatgttatatgttgggcgaggagctatcatcacaaccttcattgtgtgctacgctcttacatctttcatctctggatatgttagtggtggtctctattcaaggaatggtggaaaaaactggataaaggctatgatccttacagcatcactttttccattcttgtgtttctcgattggattgttgttaaacactattgctatcttctaccgatcattagcagctataccatttggcacaatggttgtcatgtttattctttgggctttcatctccttcccgttggttctattggggactgtagttggtagaaattggagtggtgctcccaacaacccgtgtcgtgtgaaaacgatcccgcgcccaattcctgaaaagaagtggtaccttacaccttctgttatttcactgatgggtggacttctccccttcggcagcatcttcattgagatgtacttcgtattcacttccttctggaactacaaggtgtactacgtctatggtttcatgttgctggtgtttgtcatcctcataatagtcaccatatgtgtcactattgtgggtacttatttcttgttgaatgctgagaactatcattggcaatggacatcattcttctctgctgcttctaccgccttgtatgtgtatctatactctatatactattatcatgtgaagacaaagatgtcaggatttttccagacaagcttctactttggttacaccttgatgttctgtcttggattgggaatactttgcggtgctgttggatatttgggctccaccctatttgtgaggaggatctacagaaatatcaaatgcgactaaacttggtctaggctgctagcatgtcttgtcacaatatggtgcagagtaataccttgagcttctgattgacttcggaaattacacaggagggtgattgccttgaagaaacaatataatttatgttctccagtcttcgttatgcgttggagagattgtcaag

SEQ ID NO: 23660 - DNA, 365 bp, Zea Mays
tgttggttcctcctgctctagtagtgatagcatcggatcctgaggagctagagaagaggagagaggagcttgagtctctgttaactgccgagcggtcagagatggcctgatgtcgacctaccatctctcttctggtgtaaataagtgtttttttttttattctctgttgaatgttggtagcatgcatactgctttgccgtgaccatcggtttcatcgccttctctagctagtttggagcatgttgtttcagctgggttctagacattcgtgtaatgcactgtttacttatatgatgatctcctgttgtagatatatgttgcagaaatttacgaatctaagcaaagaatctgggatgattgaggaa

SEQ ID NO: 23661 - DNA, 161 bp, Zea Mays
aagagtgcttgaaattgccgggagggaagcggatggggggtggcgacgcgcaccggccgtatgcagaacgactcctgctggtccgccgatcggctcgggcgtggaccgttgtcgcccgcgccggcggccaaagcccgggggccctaggcgcccccggcagc

SEQ ID NO: 23662 - DNA, 1972 bp, Zea Mays
cgcagccctcgctcagttggccggcctcgccttcgcatccgtccggccgcagtcaacctccggttcggagttcccattccccaccaaccaccgtctccatcgcaccgtcgcactgtcgcctcgccggccgcacctacgccgttgaagtcgctgtcgcagctgcaggacggaaagggcttcaacaagtgtgctaccaactgtccaactaccaagataagcatgcattgctgttttttctgtagtgatagatgcttttatgccaccatttggttcattttcacatgttttctttagcagaatcagtatggaaatactgctctttttttgctgtctttgttccattttctgtactatcttctccttttcatgatctttgttttggaaattgcgacatcaaatcccagtcaatctaaactttgtatgcttgcttggtttatctagtcatgtattaatactcatcacatttcagtgtctgctttgcaaaccaaattgatggttaagtgcttgcctatttgttctgcctgatttcatcgcagctcagttgtatgattgctgggtttcctacttttcagcttttgttttccgtttcatgttgtagtgttgctgtgtttcatgttttgatgagttttgttcatttatttgtagaacaacactctgtgttggtgtcaagatctatagagcaggcatttctagtaagtataggcttgagatgtgatgtttaccttctttatctaaataacattattgtaatgagctgtcaatgttacaagactacagaacaaatgcactgcattctattttagctaataggtttattctttggaaaagaaaatgatgtgctaattagcttagttctggggacttcaggggttccatgccggcctaacctattggaacgacttgttagttgttattccattgcatccaaagtccacatgttattttgttaagctccataatgctgtggcatcgtgttgcgaaaacattaattgggagaacattagtacatgaatacttgatcttcatagttcagttttcgtgcatgtgcacttgttagttgcgaaaatgaactaatttcccttggggaaataggtatcccttggaaaaatgggtttgccaaactagcccttagaggaactaattcctggcatatggtgctcagtgggcagtgcatcaggactcgaaggaagcatagcatcatcggtttttgtgtttcattaattctcatttcaagatggcatctgctggcctaaagccaggggtgcctgttattctacgggagctggagccatcctcagagatgttcaagcaaggagcgtcccttcgagtcacaggaagtctccagtcattcgatgtggagtccgcgactgccaccattcaagacggcagcgtaagtctgaaggttgacacccagcatctgagggatgtcagtttccgcacgaactcggtgtaccaattcattggtgaacttcagatccgtgaagttgatgatgcgattctactcgcgcgcatcggaaggaacgtcgatggcctcgacatgaacctttaccagcaggctctactcatccgacggcagcacgaagcaaagctgctgagctccaggagagcatgatctgcttgctatcttggagcaggaggcgcatggtggttgtagttattaggtttctttgtttctcaacagtgcaattgcatatgtaaacgtgaagagaactggaccaagaactggttaattgagagggtctgctgcatatgatttgcgatctctcttgccctccaaagggctgccatggcatgtgtagatgtgactgccaatttgtgatcatcttacttgcagcagaatgctggttttattttattgacatgagaacagccttgtggatcatgtttactgggatgctttgttgtgttaaaagttgggtcatgttcttttgttgtaaaggtataaataatggaggaggtcatggtgtgaaga

SEQ ID NO: 23663 - DNA, 3065 bp, Zea Mays
tccagctccagccctcccaccgctccagccagtcccaccagctgctccttccctgcctgcttcccctgtttctttggctccttccccgctgccctccgcgccgcacgcccgcacgccacgccatagaacagaatgttcttggatgctctcgcgcccgcaacattcccttcctagtacggcccgccccttcgatccataaacaaaaggcaaggaaggctgcgccgccgtctgcctctctcctctcttcgtccacggcccacggggttcttgcctctccctagtcccttcttcatcaccctgaccagtgggtttagcgagcgagcgcaggcgccgtcggttgatttcccgcgtaaagcttggatcttggcgcgtggactgccgtaggtgccggcggcggcgaggccgcgagggtctggaagtttgggcggatttctctgtcccgagttcaggagcgcttctccgcagatgtgcaacttcgtctggctcttccgcgtgctctggcggatcctcagcgtcgccttctgagccccagcctcccagcccccgcgcgccgtccgctccgcctcgcccgccggcgactcccggactggactggactggactgactgagcctctctccgcgcggggaaaagttttcccgtcggtggggtttcctgtcgagttcgttcggtccaagcgcgtcgcgtgcggttcggcggaaagctgggacgctgctggtgctcgctgggtgctgcctttggtctcattggcgctgcagtgtggcggtgtccgccgtcctgccggctggccgtcttggaggctggaaccagctagcagcagctccgtccgggacgatggcctgcctcaagctgggatccagggctgatgtcttccggaagcaagggcaggagtggtactgcacatctggtcttcccagtgatatatctgtggtagttggggaacagtctttccatcttcacaagtttcctctactatcgaaaagtggcctgttggagaagcgaatcagagagaaaatcgataacagggacgatagctgtgcaattgatctatctgatattcctggtggggcgaaggcttttgaactggctgccaaattttgctatggtgtaaagtttgaaatgactgcctccaacgttgtacaccttcgttgtgctgctgattaccttgagatgacggaagagatatccgaggggaatttgatcgcagagacagagagcttccttacccaaacagtcctcaagagctggaaggattcagtcaaggcgcttcaaacttgcgacaacgtccttgatgttgctgaaagattgcagattgtaaagaggtgtgtagactctattgcgactagatcatgcagtgaccctgatttatttggctggccagtagcccattatggaggccccatgcagagtcctggagggagtctcttgtggaatggtattagcacgggagcaaggcccagaaatagcagcccggattggtggtatgatgatgtctcatgtttaagcctcccgttatacaaaaagctcatctcagccatggagtatcggggcatcagtcagggggttattgttggatcccttaaccattatgcaaaaaggcgtttgcctggtttgaatcggcgtaaaagcatcggtgatgctagcaactgtctttctatgactagtttaacatccatcccttctgaagatgaccagaagtatcttctcgaggagatcgatagactactccctttccaaaggggtgttacatcatgcaagctgctgtttggcctcctgcgcacggcaatcttcctgaaagccagcccctcctgtgtgtcgaacttggagagacggataggtatgcagcttgacaaggccagcttggaagaccttttgataccgaatgtctctgattctgtggaaaccctgtatgatgtggagtgtgtgcagaggattgtagaccatttcttgtcaatggaccaagaaactggtggggcctcccctggcattggtgaagatgggcaaatgttagcatcaccatccttaatgccaataactatggttgctaagttgattgatggctatctggctgaagttgcaccagacatgaacttgaagttgccaaagtttcggtctttggctgctgctataccggattatgctcgtccaatagatgatgggctttatcgtgctattgacatatatctcaaggcgcacccatatctgccagaatcggacaaggaagagctctgccgggtgatggactgccagaagctgtccctggaggcctgcacacacgcggcgcagaacgagcgcctcccgctccgtgtcatcctgcaggtcctcttcttcgagcagctccagctgcggagctccatcgcggaatgcctcatgatctcagagcccctagacggcggcggcggcttctcgcggcagctcggcggcctgcctgtctcgggcgagcacctccgcggcgctggctggcccctggccgccagggagaaccagacgctgcgggaaggtatggacagcatgaagcagcgcgtgtcggagctggagaaggagtgctttgccatgaaggaggacatcgagcggctcggccgcagcaggagcgcgggcaagagcaggttcccgttcgcgctcgccgcaaagccccacgtctgcggcaccaaggacaaggaggctgctccggaatcgtcaaagtcggagacgtcaaagtcgaaggcagcggcggcgaccaggagcgatgacaagttggctgtggtcaagggcggtgccgctgccgccggtgatggcgggccgcagctgaagcacaggaagcacaagacgagcctgtctgcctgttagtttttagatatctacaagcacacagtataggccctgaatgaacaacgactgtgagtgagagacgctatcgatgtgatgctcatttttttttcttggacatttgctcagtgaaaaatgcatagcgttaccagcgtgtcttggacttccagctgtaccatgcttccccgttgtggttgtacatgtccatgaatcggaaaagaatttactagtagaatcctaccgagttcctgtgaaaaagaa

SEQ ID NO: 23664 - DNA, 3207 bp, Zea Mays
aggttaacaagtgcggaaaacttgaaacttggcttgaagacatgtgggcttgtatgaagcagttcaaagatgcagtctgtggtgtgatgaatgagccaggccctattgcaactaaactacttgctctaaagtttgtggaaacatggattttgtgttgcacacctcaagccaacagtgaccaagtacagccaactgagggtaccattttccagtttaaagttaacaagtgaatgggcaatatttttttgaaagagaatgactttcacattgacaagtacaccttacatacaggaaaaaactggagatttgatacttcacgatcatctcaatttcatcctagccttgatcctgctattttggaagctgatgcacatcgagctctcctcctcctcctggatattctgcgaacagcttatgcccatcgagggtccttcctagttggcaccatcaactctcttgcagcagttgtaaagatccgaccgatttactatgaccgcgtgttgccagttttgcttgattttgaccctggcttggagactgcaaagggggcacattcagcaagcctgcggtatgctgtaagagcagcttttttggggtttctacggagtccccaccaggcaatgattgagtctaaagacatattggtaaggcggctgcgtgttctcagccctggtgaggcaatggaacaaaatattaggcaggcagagaagatgtctagaaatatagagcgtgcttctcgtgctagcaaggatgagtctacatcatgggagatgccttatggagatataaatcggaagaaacctgctgttcgatcaagtgatacttttactacgtctgatggcatagctaagagagcaagatttgacatgtctgccacttcaaacctgccagttctgggattgtctgattattctgatatgcaggctgacaatgatgccagtgtgggtcattcatccgatccagctatattgaataatgaagtgtctcctgtcgagaagatgattgaaatgattggcgctttgcttgctgaaggagaaagaggagctgaatccttgggtattcttgtctcaacagtagaggcagatgtcatggccgacattgtgatagaaacaatgaaacatctaccggaagcttcatttcatttagcaacaaataacggtgtccagcaactgaattttaaatattcctctggtctcgtaacacaaaaccttccagccaattcagactccacactattcactgcacaatctacacccacagcagatggagtcagcatctcaccatctgatgcctttgttatgactagcgttcatgatgctaagcgtgatccaagaagggaccctcgtcgcctcgatccgcgtcggatagtttcatcttctgctgtaaattcgatacaggtgaagatggaaaccaatagtgtgcatcaaacagataatttgtcgaacacactctactccaattctcggaaggctgaaaactattcagactatcaaggagatttacacaaaaatgaaggtgaacagcagtcagcttctcaacctaatcaaacaattgccaaagacaagttggagcttctggatgttgtcactgaaccggagccaacatttgaagtcgaggcaccagtggatgtcaggattcattcttctgatgttgatgaagatatagtgaaacccatgtcttcagtggttaattcacttgacgaatccgatagcatggatttagaggttgacccctttttaccagctccaaaggcaccaacaccagacgacaccaatgatgacttgccaattattacatctcagttggaattaagtgaaaaagggaaaatctcaattaacaaactagccattggccggatacttgatgattacaagaaaaatagtttcaatgccagattttctttgcttgctcatttgatcgcgcagagtgctgctgatgataacattatggatttgattcagaggcacattatctttcactcacatgatcaggaggggtatgaactggcaatgcatgtgttgtatcagctgcagagtatcagtgttgctaattcaccagaaagctctacctccacctctaaacattacgagaagttctttatatcacttgcgaggtccttgattgattcactgcctgcttcagacaaatcttttagcaaacttttatgcgatgcaccatatctacctgagtctttgtttagattactggaggatctttgcatgtcagaagacaacagccaacaattaaaggatggagatggggaccgtgttacccaaggcctgggaactgtatggagccttatcttgggtcggcctccgcttcgccatgtttgcttggatattgctctgaagtgtgctgcccactctcaagatgaagtcaggggaaaagcagttagattggttgcaaaaaggctctatgatctaacatatgcaacagaaaaaatagagcagtttgccatagagagccttgtgggagttgctaatgagcatactgtggacacagatattaattcgaaatctttgaaagaatcgacagctgagattgaggtaggtagtcagggaacttcagtaagtggctcccagatcccagatactgagttctctgaaaatgggccattcaagacatcatcggtttctacaaaacagtcagcagtatctgtatctgaggcaaagcggcgtacttctttgttctttgcactttgcaccaagagatctagtcttcttcaacatctgttcaatgcttatggaaggtccccaaaagttgtcaagcagtgtatccattggcatatgcccaaccttataagaaatctggggccctcgtgtcctgaattgctgaacattattcataatccacctgaaggcagtgaacatcttattaccttgacactgcaaacattgactgaagattcaaatccctcagctgacctagttgctgctgttaaacaattatataataccaagctgaaggatgcatctattctgattcccttactgccttcatttccaaaggaggaggtattgcctatatttcctaggctagttgatctcccgcttgagagattccaagacgtacttgctcggatattgcagggaactgctcatactggtccagcattgactcctgctgaagttctcattgcaattcatgatattaaccctgaaaaagataaagttgccctaaaaaagctgctgatggagactcatttca

SEQ ID NO: 23665 - DNA, 3083 bp, Zea Mays
cgagaatgttctttacatcaccaaaacttatccaagctctcgctagccacggccagtcaaccaccgcgagctccatctccatggacgcctgctctctcgtccactgccatctgccacggccactgcagctcccgctccttgcgcctccaactcccagccggcaccggccccgcgtcgccagcgccttggtctgctgctgctgccccgccgccgcggcagaccaccaccaggaacggccctgggagtggtacgaccgcgccatccagtcccacgcggggtccgacctggcgcgctccctaggacttctcgccgacatgcaagcgtccggggggcgccctagcggcagcgcgtacgcgcgcctcatccgcgcgctgtcccgcgcagggcgcgcgctggaggccgaggcgctcctcctcgagatgcgccgcctcggcccgcgcccggaagccgcgcactacaacgcgctccttgagggcctgctcgccgccgcgcacctccgcctcgccgacctcctcctcctccagatggccgacgacggcgtcgcgaggaaccggcgcacctacacgctcttgctaggcgcgtacgcgcgcgccggccggctcgaggactcgtggtgggtgctcggtgagatgaggcgctggggcattcgcctcgacaccgccgggtatagcatgctcgtgcggctgtaccgggacaatggcatgtggaagaaggccaccgacctcgtcatggagatgcaggaggttggggtggaactggatgttaagatctacagcggcctgatcgatacgttcggcaagtatggacagctagcggacgcacgcaggatgtttgataaaatgcgcgccgaaggcgtcaggccagacatatcgacttggaatgctttgattcaatggcattgtcgggttgggaacatgaaacgcgctctgcggttcttcacatccatgcaggaggaagggatgtacccggacccaaagatatttgttatgatcatcagccggttgggggaacaagggaagtgggatgagattaagaagttgtttgatggcatgaacaatcgaggtttcaaggagagtggcgcagtgtacgcaatattggttgacatttacgggcagtatggccattttcgtgatgcacaggactgtatagctgctcttagagctgagaatacacagcttttgcctcgtgtattttgtgtcattgcaaacgcttatgctcaacagggactgtgtgaacaaactgtaaatgtacttcagttgatggaggaagaaggatttgagccaaaccttgttatgctgaattcgttaatcaatgcttttggcactgctggaaggcatttggaggcactagctgtatttcagcatatcaaggatagtggtatgagcccagatgttgtgacatacactacacttatgaagacattcatgagagcaaagaaatttgaaaaggtatctgaagtatacagagaaatggaacgtgctggatgtgctccagatagaaaggctagagaaatgttacatgatgcaactgtagttctagaacaaagaggatgtatctattgaattcggaatcattgctgttgtaattggtccattgtcaatgcatgtaacttcagggagcccaccccctttttgcttacacatgcatgatgcagagcaaacacaggattgaatgttctgatacatgtagatgatcatgtactggttttcttcaaggttgaaacactatgcatgcgaagatttggatggttatggcatcaagccaataactctttccaaggctcctgaatgtctatatgttgatcagaagagtgaaaaaggataaccgagtatagttttcacccttgtacttagtcatggttatggtcaaagcaagactatcaggcataaacataaggatgaatcagaaaatatacataggccatgaacagcgagaagcatatagacactccgaaaatgaagcacatcaacttggtggaatttccttacaggtttctttctttccaagtcatatattatgaattttgtgtgagtgtgacaaggaattgctgaaaacatttggtgttgatcattgattgttatgtaaatgtatccaagtagctacatggtagcttatgcaatcaattgccaagtggtagagtgtaaacaatacaactacattttcactatttataatgtcagttgtaaatacttcaaattcaaagtagcgcaacacaattatgattcagtcctaataaacagactgtaaatacttgatggcttgatgtactattaaaattagaatagccaagtgtaaatatttgattttgttctggttactgaattaactttggcacccatttccacactgttattattgagtttatttattgtgggcttcatcgcttataatttatatacagaatgaaataaaacacatggtcaaaccttttcatcagaattgtaggctctccgttcctatattatcactgatggactccttacatacttgatcagatcatagattttgcttgatgctaacaataacataaaattaagagacaaaaaaaggagcagcgtcctctcgtgactctgctagaacgagaagcaagacaaacattttgatagatttgtggccatcaagacagtcaatggcgtgagctcatttgagctccttttgtcttgattcaaaatgctcttgttgcatgcaacattagaatttgttgtggtgggattttgcacatctagccagaatttggtaacctcatgtttcttttatcccaactgcataatagatgcaaaatctaatagctcacattcccaacaaaattaccctgtccttctcaaaagatacactaatgatgaaattacaatgtgggcaaataaaatcatcccacttactgcatgaagaatgggattacaaaactacctatctccttcctttcgagctcacccttgtcagtcattgagctgccagacacctgagaagaatcgatctcttgctttgtatttcacattctttgtaacctgaaaaggtgccagtaaaattaccagagttctttaggcctttagggacactcatcaccattggtttcttttttttct

SEQ ID NO: 23666 - DNA, 1650 bp, Zea Mays
gagtttggcgcatatgggcccacttgtcagccgcgttcttcgaggtactactatccccaacctcgccgattctccgttctccacagtcctccacactcgccgagcgacaccgcgcgggacgaccgagcaagcagagcatgcaaccgtcgtgcctgggcgcatgcagcggtggaggactagcactttccgcccgccgcctccgcgccccctcctactgccgcgtcgcgccgcatagggcttccgcctcgtgctccgccggtggcggcggcaaggcatcgccgcgggggaaggacaacgtctggagcgtcgataacgaccgtgccgccaaggaggcggtccggggcccgaagcaccgccgcaggaaacgccccagcggtcgccgcctgccgccgccgaggaggaaggggatggatgcggggtcgagggttctagtgtctggagccatgctcgtggaggtcgaaactgtgctccaaactcaggaacctgttataaagccttcttgggatacatttgcaagtagtttaactggtaactggaagggtgttggagctatcttctcgccaatcacagcagagatgggagcctgttggggttgggaacaaagaagagtacctttatgactgctacactcttttctcacatttgagagatcttttgatgggtgggtcatgggctctgagatccgaaggaaaacaaattggggtcccaatcaatccgttttggggaagctgagaagcaaatcacatcatatgatgggtggggagtcaaagcacttccagtggaaagggaattgctgatttaccttcatatgagtctttttgatcttaacagggagtgctgtgcttgacgaagaaactttttctatggagcctaggaattgtattttttgaggacggatcatactctagaggtccagttgatatagcaattggtgaatatgatgaatctaaatacttcctttcaccaacatataagtttgagcaatgccttgttaaaggttgccacaaaagattgcggattgtgcatacaattgagtttaacgaaggaggagctaacatacaaattgtaagggttgctgtgtatgaagaaaaatgggccagcccagcaaatatccatgttgaagatgatacacttgttgaccttaaaccattctctcaaagaagccggaccaaaccgtcagaactgacaggctcctggaaagtatacgaagtcagtgcaacgccaattttcagtgataaagtgcaagaactagagggcggttctccattggtctacttgtgcatggagacggtgaagaagagaaacctgccagagagttcagttttctttggggaggaggagatgctcgacgtgcaggatgtcaccgtgctttggttacctggtggcgtcactgcctatgttgacatcagcgaagacggcatactctgtatcggagttgggtggtactccgaagaaggtatcaacctggtgatggagagagactatggaaccgatgggaggctcagggaggttcggtcgaaaactgaagtaaagcgcagggtcgatgtacttcatagctaagctgtaacttttgttgcctatgtagaatgtgaatgttctggtttgaacgataagaaaaatgagcttaaaatccattctcatacgccacaa

SEQ ID NO: 23667 - DNA, 1865 bp, Zea Mays
atgttctgcctccgcaccctccgatcgcccgccgcgtccgattcccctgaccccgcctcgcccgcaatctccgccgccgcgcccgcgacatccatcacccccacccgcgacatcccgcctcgcacgccatcaactcgcagcggcccttctccgaacgtggtttgttttttcgtttgctcgagcagccagccgactcgtctccagcaatgcggccggggtcggctcgctggaggtgggcgtcgccgccgacacctccaacgcctccaggcagggattaggtgagccgtcggctaatcactcgtcattgggaggatctcctcctcccgttcagatttgggcaagaaaggcccgggcgcgatgtccatggccgaggaggggagtgaggccgaggaggggagtgaggccgaggcgctcgagaaagacggcagcaaggcttcttcaccttcggggccagccagtcgactcgtctccagcaatgcggccggggtcggctcgctggaggtgggcgccgccaccgacacctccaacgcctccaggcagggattagatttgggcaagaaaggcccgggcgcgatgtccatggccgaggaggggagtgaggccgaggaggggagtgaggccgaggcgctcgagaaagacggcagcaaggcttcttcaccttcggggccagccagccgactcgtctccagcaatgcggccggggtcggctcgctggaggtgggcgccgccgccgacacctccaacgcctccaggcagggattagataccacacatatgcattctatgcctgccgcgcgctttacgtagctaacaagttgaattcatcatcaacatatccattgctcgagcttttcttcaagaaccagggcaaagtgaagaaacggaagagttgagcaagatcacattagagaataaggatattcagcttgatatcaatataagagaagaatctcggagttcttcacaacaagggaactttgacacagaaggtaccagctccagtgaggctttcttgcttggaacggtaaggaatgaacatatttatttcattcttctcagccactaaccaaatcagctccagtgaggttagtttacagcaatgttcttgtatggttctcaggttgagttttccattttatttatgtagccaaagtagatgtattatgcatgtcgtcgtttggaaacttgacaaaccgattatacttgtttaggttgcttcagaaaagatgcttgagaaactgaaacataaatctggaagatgtgagcctgctttagaaaaggctattgtggaactggagcatggtataaacggtttgaagtactttgtttgccttgatccacggttgcaggtttgttccgccactgataccaggtgaagcttcacccttcagatccctgtcgtgacgaatggttcgtgggtgctggggagggattggatccgttggattcatgagatgtgtggattgttcctgccggatatcgtgacatgtttttagatctagcagacaaaaccatgaactgtctagggctcctccgttgcctagatctactagagtgagtgagcctacagagttgacctcatccaggctccagttccaccccacggtcatcgtcctctgttgctctacgtttcatgcttctcacctcctctcctcaatctcatcactagaggcggaaagcagatcagatgagatttttggtcttgcgtggttcttttaatctgctcacatgatacttcttattcattgccgtccagtgaaattaattgccctcggttgaattggttcctttgccattttacttaggaggataaaggagacactaccttggtacatgcctgttgccacaatggacaaaagaagatt

SEQ ID NO: 23668 - DNA, 331 bp, Zea Mays
agggttttattccctgttgtttttcaggttataattttattctgttgtggatgctgctaagtgccggtgggctcggccttcttctataagtatatcccgtctttagtttctctattgaggattatcacttaagctagcatgtattttaaaacttataaatattttatacattttaaattgtaattctttttaatcattttcttttgtaatcactccgataattgtataatgtaaaattattgtaacatgtaatcattttgcaataaagaatttatttccgctgcaaatgttggtgtgtgatttgtgtttacttaatcctgcgatcttggcg

SEQ ID NO: 23669 - DNA, 179 bp, Zea Mays
gaaaggtctgtccacgcgatgaggcgggtccctctatggtgcgaacgacgacgagcaattgctcgaaccccgcctgttccctcggctttgctggtccatggacatgctccctgggtccaggtgaatccccagacccacaatcaaggtcccggcaaccccgcagatggcctgcccgcgat

SEQ ID NO: 23670 - DNA, 647 bp, Zea Mays
ccgggccccgcatcttcctctgcctcagctcgcccgcgtggacgcacacggcgctgtcgccgccccgtgctttggcaagcacgcccggcgcctcacctccctgccgtgacccctcgcctcctctcaccacctcaccctcccatgcaagtaacggctgcccgtttcccctccatctcctctacccattcactccaagaaggaatggccgccatgccattaatggcgttgaagacaccgaccgttctccctctctctacgacgtccctccctcctccttctctctataaaacgcgagctcgtgcacatggagctgattcttggtcgccccaacctctccatgatctctccctctctcccgccgtagagaatcgctgtcggttcgctgctcgccgccgttcgacgtccggagccgaagccgatgccgcgccgacgacccccactgctgaggtcgtgccctgcttccccttgctgctccatcggtcatcgcaccctgctcctttaccgaccccctgctcttcaatttcgtccacacgcaagaaccaaggatccgaatctgtttgaggacgacccgcgcgaaaattttgagcaagtcaagtggattctccatctgcatttctatttgtacccaagtaatgcatataataatg

SEQ ID NO: 23671 - DNA, 867 bp, Zea Mays
cgacagaaaagacaaggtgcgcgtgctggaacggatgggccgccagcacccatcgtggacgtctgaccacaccccatgtgtgttagcaccatagaaggagatttgagggcgccgcgtgcgatgcccgctgcgccgccgccaacatctcgctgcaggggaagtatctcgtcgacatgctccacctgccctcccatgggtccgcccctggccggcctctaactcagctacaacaccctctagcggcatccagcaggagctggttgcagatcccgcagatggggccaagaccgtgcgcaagccggtcttcaccaccgtcgaccagctgcacccctagatgcatggccacactcttaccatccgcgtcatctctgcctgcaccatcctcgacaaatcctccatgcacattggtcgtacccgcatcgcccagtgcctcgtcggatacaacaccgacaccgtccttgtcacgcccgcaacaatcaggagcttgatggaggatgagggagaggaatcagtagagcaaatgagcaagacgagacagatgtgtagctgttggtgtttctccactatcgcgacctcaatgcgcaagcatggcctatatagagtgacgagaacaccatggaattgagttgtgttgttgtggtgcggagtaggagtgtccaagcaaggagagaatcacaggcgatttctctcattgttgttctggcatcgtttctgattctacgtttaaacaaagtgtttgtctcattagggcgtgtttcctcactttttctcgcacaagaatctagtaaaaaggttctccaaataggctctttgactgctacagttcgtcgattcgattctcccatctatatcctttgtggttgccca

SEQ ID NO: 23672 - DNA, 2811 bp, Zea Mays
cgtctccgtactggtacggggacgtctctttctcgaaattctctgcccgcaagcctactactacaacttctgcagccgcccgtccgtctccctcccccaaccgagtatatttatcaggccccttcccccgccccggcgccctccttccccccgctcctgtgcgcgttgtttctcgtcgccgtcgtccgtcctccggcgtccggcaacctgcaaccggcgacgacgatggaggcggcgctgggggcgctgtgccgcgccggaggctggtcgtacgcggccgtctggcgcttccatccccaagaccctcgattgctcacattgggggactgctactgtgaagatgaggcaaaagcaatggttcagaagatgcttaatcttgttgaagttgttggagaaggcatcctaggacaagctctagtaagcggagagtgtcaatggatttacgacgatacttgccacgcgttgaatcagataagccatgctgataacggagatttacatcagggttatacttggtggcagcatcagtttctcagtgggatgaagactattgcagtgttacctcttcagttgcatggactggtgcaatttggttccacacggaaggttcccaggagctcagtttttttgaatcaggtcagagatatatttgatcggatgaagaatgcttcaagcgatggtccaatggagtatacccagaataactctcttgcatgcgcagtatcagggaaagttaaagattgcctgcaaactgagagtgacaagtttctatgtaaatctgtatcattcggcagcaacccttgtgcttctaaattccaagaaaatcgcctatcaccataccatgccctcatgcacgaacaatccctgatacctgaccctggagaatctgtgaggctcctctcacaagaagaatcctttattgttcaaggtgactcaagtcaattcaaggatactgccgactttacaggccagggtaacagtacatttcctgaattacctaacagatcacctgaagaagctactgctgaaactctagaaaacaacatgaaggactgtagtggaaacaacagtctgctggaaactatgatgcttgatcttagcaccaacagctttgtgcaagattggtgggacaacagtgttctactggcagaaaaccttccaaattcaagcgaaaaggacccagagcctgctatggaattggccaataggcattcattgccaactggggagagaggctcgcctttcatacctgtcatcgaacaattgctaggtgatgttgcacatccacctacacctaccggacatagttcacttgaggctgaagctactgctttagctggccgtgtttcagattatcagctgcctcagtttgctttccgagactgcctaacagtagacaacgcacaaatcccagcattggcctgcagtaattacacatgcagaactagaagtgcacaaaatggttcttcagaagtgccatcagcaaacgtatctgtggacgacacctgcagtttgaacacagcaaactccaatggcagtcagtcgagcaatcctgagggaacgaaggttgctaagagaagagctagagctggggagagtacccgacctagaccaaaagaccgacaactgatacaagatcgcgttaaagaattacgagagattgtccctaatggtgcaaagtgcagcattgatgctttgttggagcgaacaattaagcacatgctgtttctacaaagtgtaaacaaatatgcagagaaaattaagcaagctgatgaaccaaagataatcgacaaagggagcggtgttatcttgaaagacaacccagttgctggcacaaatggtggtgccacgtgggcctacgaggttgctggccaaactatggtttgcccaataatcattgaggatctttcgccacctggtcagatgcttgttgagatgctttgcgaggaacaagggctctttctggagatagctgacaacatacgtggaattggtctgacggtcttgaaaggacggatggagctctgtgatggcaagatatggtcgcggtttcttgtcgaggcaaacagagaggtcacaaggatggatatatttctgtcgcttgttcagttactggaacagaacagccttgttcgatctactgaccagatggccaaggtcatgaataatggggttccatcctttgcaaaccaccaacggtctccgctgctagttccagtgggcattcctgagagactacagtgacatgcagatgcttcaactagatagagttaggtaccacgactgttaacatatctggtagccggaactccatgcattagactgagcctagtgataacatctgaatgaagatagtctcactgctgctaaagatgactgtatcaagaacatgcatgactggtgcagacatgagcctctagcgcagaaattatgaactttccctgattattagtggtgtgatcagtgaaatggcattatctcctgcttagttggttgacaccttgctcctgagtaactgggtcttgatagtggtgtttcttatgcagcgatggcagtgtattagggtagtagtgctagcttgcagttcgttgcccctgagtcaaccttgggcagttcgtggtaggttcttcatgggcttgggcccaggaccgggccccatgcacgtgcaataagtgcgactgcacagggctcaaaattctgaggggccaatatgtatcaataagcagactaatattacaccatctaagttgaactcagttagcagctagactgttgctcttcaaacacatctattaatacatatgtttattt

SEQ ID NO: 23673 - DNA, 1940 bp, Zea Mays
acctgagaatcttacctggaaggtaggagctcgccggcaacctgcggaagtcggaaagaatgtgcattttatctggtcagcttgcctgtgtcttatcgctatgaatacctgatggcggaaaccatattttcacagctactattgttgccgaatccaccattcaagccaatttactatacactggttatcattgatctttgcaaggcattaccaggtgcattcccttcagttgtggtaggagcagtgcatgctctttttgacagaattagtaacatggatatggagtgccgcaccagacttatactatggttttcacaccacttgtcaaactttcaattcatttggccttggcaggagtggtcttatgtcaaggacctcccaaaatgggctccacaacgggtttttgtccaggaagtactggaaagggaagttcgcttgtcgtactttgaaaaaatcaagcagagtatcgaggatgctgctgagttagaagaactgctacccccaaaagctgggcctaatttcaaattccatagcgatgaaagcaacgaaagcactgatggcctgaagttatccaaggaacttattggcttgattagaggaaagaagtctacatatgatattattttatgggttgaggaacaaataattccaaaaaatggtactgaatttgcacttgatgttgttagccagacgcttcttgacatgggttcaaaaagtttcacccatcttgtcactattttggagagatataataagataatctctaagctatgtccaaatgaggaaatgcagctactgttaatgaatggagtcagtgcttattggaagaacagtacccagatgactgctatagctattgacagaatgatgggttatcgcctgatatccaatttggctatagtcaaatgggttttttctcctgccaatgttgagcaatttcatgtttctgatcgaccatgggagattcttagaaatgctgttagtaaaacatacaatcggatcagtgacctccgcaaagaaattcaatcactcaagaagggtcttcaagttgctaaagaggctagtgcaaaaaacagaaaggagctggaggaggccaaatcagtgcttgagattgtagaggggcaacctgcaccagctgaaagaccaggtaggataaggcgactagaatcacatgtcaaaaatgcagaggatgaggaaagaactcttgaagaatctttagaagcgaagggagttctccttgctcgggctcatgaggaaagcaaggacttgcttaagctactctttaagagctttgttgacgtgctcactgaacgtttgccgcctgtctctgttgatggggaaattcctaatctgcgcagtggagatcaaaatgtaaattttgcagctcaaaattctgaagcagcaacaatggagattgacaatgaaaatggagcagataataatagtgaaccgaatgagcgaaacacaaaaaatgcatataatgttggagagcttgagcagtggtgtctctgtacactgggttatctcaagtcattttcccgccaatatgcaagtgagatttggtcaaacatagcaatgttggatgaggtcttcgttggggatgttcacccacttatccgaaaagctgctttctctggtttgcgcagatttaccaatgaagggtctcatccttgaatttgacaccatacccatattctttatagaactgagtgtattgtacctgtatgatagaggacaacttttctccttgtttaactaatcaaataggcataaacatttttccttggtttcgtatgcctttttttctgttcccttgcttctcggccactaaatgaaaatttttaccaggtaactaagttaatgttcttttctgaagtaacatcagaatatgcatggttcagtgttaatttaacctattgactgagcctgaggggttgata

SEQ ID NO: 23674 - DNA, 1650 bp, Zea Mays
gcaagtttgatgcaaacatggagcatttatttgctattgtacgccaaatgcttgctctactgcacattgagttactatataaccttaaggacttggcttgtcagggattgtttctatattattcacagggatggttatgaagcattacacatattccaatctttcagacaactcacagcgctttgtttctgccttttttcatttactatcatctttagctgaaacatttgtgtaagcatcaggagcacttgtagtgtgtaatggcctaattggaaaatataaccgtgcactttcttattttcttttaggttcatctatatgggtttcgatattgccatggaagagcatagctggtcacatgttggcttcatcttcttctcaattatattcatagttgttgcaagggctgcaaatgtcttttcttgtgcatacttggttaacatgtctcggccagaacatcgccgtatacctgtaaaacatcaaaaagcactttggttcagtggtcttagaggggccatggcttttgcacttgctctccaatctgtgcatgaacttcctgaaggacatggaaaaacgatattcaccaccaccactgccattgttgttttgacggtacttctcattggagggtcgacaggaactatgcttgaatctttggatgttgttggagatgaaaacacatcaagagaaaattacgaggacaacaatggttacatgcctccaagttatgaagaaggaacatcctctggaggaggattgagaatgaaactcaaacagtttcacaaaagcacaacatcattcactgcccttgacaagaactatctcactccattttttaccagtcagacagatgatgataacgatgacgacttcagtcagcaaccccaaaaccgaaggctagctttttatgatcaatagcggaatttgatactctacatatcaagctaaatacacggagcagaactgacgtgcatgactgtctatgtgtgatttggtcgaacaaaatatagcaggagcatacttagttgagtagcatatggcagagcatatctgtataccgtaggacaaaaatcataagggttcgaatcagttgttcccatgggggacgaggatgatgatagccaggcagcatgtatatatttctaggcttccttaagaacttagtggggctccagatgaaaagcagtgtgttgttggaattttatagaccctaccttgtgttaggttaaattttaataaacccgaccgtttgtccgctaagtcggctattatgctcttgttgtaattgacgcgttgcaccagttgccccactggctggttgcaccagtgggaaattgacgcgtaccatatataatgttgccatggctgattataaaaattctgcaaagcactgaaagcaaatatcatcccaggtcagggaagtatgctgatgtttattattttaacgttaacatttactcctattctaacaaagtagttcagttttgaaatggttggccggtttaagctggaactagaatttattgcaagtaccatgtagggattgagctggaaagttgttctccagttctgctactgcaagcaagcaaagtgaaggaggtacacaggcataagttatttcttaaacctaagttctgcatgccacatttg

SEQ ID NO: 23675 - DNA, 1670 bp, Zea Mays
ctaaaaattagtccttaccaaacactgcctaaccgcctaaggattccgccgccggcaccttgccagctgacgccaccaatcaacgcttccctttatggccggagcaatagttggcagactcggccgccatcccacctccttgctcctcctaacactgccccgtcacgccgccgcacaccaccggctgcactctccttcctcctcccaaggtcagtattcaaaaatgggtgatccaagtgagaggaatggacacggcgctcttacccgggtgctattctgtggtccatattggcctgcttctactaactacaccagggagtatttgcaggactatccattcattcaggttgatgaagtaggtcttgagcagaaggagatggatactgctgtgaaccggaaagaccttggtgttccagttggagatacattatttggcaaaacaatccttatccttggatttggggccattggcatcgaggttgccaagaggctaagaccctttggggtaaaaattcttgctaccaaaagaaattggtcatcggacacattgccatcttatgttgatgagctagttgacaagaaaggtgggccggaagatatgtatgagtttgctggtgaagctaacattgttatagcatgcatgaccttaaccagcgagacaattggaattgtggatcataagtttgtttcatcaatgaaaaaggtacatgcttgtttctgtcatactggtctccatgttatcagatctgtgggctcatttcgctgactccatccttttggttttagtgttgtgcataaataatagagaaggaatgatccatgagtcatggtatcagttgagaacatttttactagaaaacattttctggagaataatgttattgggttaacttgaattgcttcaatcttaagtaggggtcatatctggtcaacattgctcggggacgcctgctggactacaaggctgtgtttgatcacctggaatcgggccatctagctggtctggggattgatgttgcttggatggagccatttgatcctgaggaccctgttctgaaattcccaaacgtcattctaacgccccatgtggccggcgtcaccgagtattcctacagaactatggcaaagtctgttggtgacaccgcccttcagcttcatttaggcgaggcgttcacggaggtagagttcgtcaactaaaaaaccgtccaggcggcagccgtagacgcatgccattcgtgggctatcggaaccgctgatgcgatcatttgtagagaataatggatccgcgacttgtaagaataaacatgtagccagatgtttgatggtgatctccatgagaactctgccactggctgccttagctggtagtggtagcaagtcattttctcaaacattgccttctctttctctgtatcactgttgtcgtcatgatcacaactttctttgttagccgggttggttaggtgctctaggtaacactccttaagtttgagttcagttcaattcttaattcgactgaatttcaggctgagttttaaaaataatacctttttttttggtgttgttcacgcactagcctcagctagccgtcgtagtctcggacggcgattaggaggtcagatcgtgaacactgtcatttccatcatgtacgacgaatgaggttttcgcga

SEQ ID NO: 23676 - DNA, 3738 bp, Zea Mays
aactgagaactccaaggggacaattgagaaatttgcccgctcaccctcccgaccgacgacaccgggagaacccaaccactgggcctccctcctgcacctgcagcctcgccgcgacacgctccccagagatctcccccgcccgacttgtcagatccagcaatccgcatcaccgccgccgtgatctccctcttagatcccggagatggcggggacggaggccttcgaggcctacttccgccgcgcggatttggaccaggacggccgcatcagcggccaggaggccgttgctttcttccagggcgccaacctgccgcagcaagtcctcgcccaggtatggatgcacgccgatcggaacaagactggcttcctcggccgcccggaattcttcaacgcgctgcgcctggtcaccgtggcgcagagcgggcgtcagctcacgcccgacatagttcagtcggcgctgtatggtcccgccgctgctcgaattccagctcccaagatagccgcaggggcggttcctccacaaatgggtgctgcgggggcgcctaggcctcaggggagtgctgcgatgacgcccacaccagggcaggttggggcggctcagatgaatccggctgccacaccaaggccccagggaagcggtatggtgccgacatctacccaagtaagcgtgccgcaggtgaaccctggtgctgctccaaggccccaagggatcaattctacgatgccagctgcgagtcagggtggtgctctacaagcaactcagtttgctggaccaagggttatgcagccacagccttctaacttgggaattacgcaacagcagccttctagtaccggtttcatgcatccgccacaggttggagctccagcagcttcattacaagctcaagcacctggaatcaatcaaggtttggtcagtggaggcagcatgggaggatctgtcggttggcaaggttggcaaggcggtaatgctgcctcagtgggaggcattccacaagctataccaggagctgctccttcacaggcagcacaaggtggatttggcccaggtttacctagaacaataggtgtggcgctggtacaacaggtacaagcaatgtctccatcgccattgcctccgcagagcaacagtgccggtttgcctcaggattcaaaagctttggtaatgtctggaaatggccctgccatcagttctggatcaagcacagacatcttctctgcacttacacagcagaagccaagcatatctgcacctgcacctcagacaagctcgattccgagctcatccagttttatgcccacgccaactggctcccagaacctgactaatctcacacagtttggttctttgcaaggtagcagccaacgtcaacagactcagcctgttgtaaagcccagtcctgctccagctgcacctgttgtctctgctgggatttctaatccatctccccaatggccaaaaattactcagtctgacatccagaagtacatgaaagtctttggcgatgttgacagggatagagatggcaaaataactggcgcagaagctcgcactctgttcctcagttggaggcttccaagagaggtcctgaagcaagtatgggatttgtctgaccaagacaatgatggcatgctttctttgagagagttttgcgttgctctttatttaatggagaggcaccgagctggaactcctctgcccccagcacttcctgactctcttaggcatgatgagacactgttacgagctacaggcttgccttcaacagcatacaatgggccatcatggcaacagaatcaaggaggattatcacaaagaggccctggagcacctggggtgcctgctggtggtgtgcggccacccttgccaccacatttgcattcacaaactgatggggctagcagaccagggcagccaagatcttacatgtctgggatggataatcatgtggtagttcaaggaaacaaagatgacaaaagtggagtgaaccagtctgtgcaggaggtggcggatcctaagaaggttgaggtggagaagcaggtcctggattccagagagaagctggagtattaccgcacaaagatgcaagatcttgttctgtataaaagtcggtgcgacaataggctgaatgagattacagaaagggcgtcctctgataaacgcgaggtggaatcattggccaagaaatatgaagagaagtacaagcaagtagctgagttagcttccaaactagcagttgaagaagctgcatatcgcgatgttcaggagagaaaagttgagctgaatgatgcactgattaaaatggttcaaggtggaagtgttgatggtctgcttcaggttcgagctgatcgaatccaatatcaattagaagagatggaaaaagctcttagtgaacggtgcaaacactttggacttcaattcaaatcatccgcatcagttgaacttccttccggttgggaacctgggccacaagagggactcattgagtgggatgaagactgggataaatttgaagacgaagggtttagtattgttaaggataatggtacaatacaggaaaacccaatttctgctgaaaatggaaaagtgccatctctttgggatgatggtgatgatatgtctcctgttgcatcctctaatggtcatatcaaggaagaaaggcgttacagtgtaggtgatcaagtggctgagagtgaaatagcatatgattttggtgatgaatctgtgaggagtcctggaagtgctggaagaagtgcctcagggagtccatttaaatcttcccgctttgggatgcatgattcatctcccagtaaaagggaaagttacagtgaccatggcggttctgaatctgtttttggtgacaagtttggtgatgaaacttcctggaactttgatgatcaagatactgactctgtttggggttctactgcactgaacgctgaggcggaccaacacggtggcagtggcacacataactctttctttgggtccgaggcaggctctccaagtggcgctagtgtatttggaaagaagaggagttcgttctttgatgattctgtcccaagtacccctgcatacacatctgggttctctccaaaattcggtgaaagccgtgatgatagctcctcttatagctttgggaagtttgattccttcagatcccaagacactgggttcttcccccaggaaagtggtttctccaggtttgactccattagcagctccaaaggcgaggatgtatcaggattcgatacagggaatagctcaagaaattttggtcggtttgactctttcgatgacaccgatccgttcggttcgagcggaccttttaaagcatctggaagccggtctccacccaagttctgatacgttttctgctctgagtagggatttttgtgtcttgcgtcctgctgatttgtcaatacaaggttcagattctttgagcgaactctagcgtaacatgaatatttctcctttgctcgacatttcttccgtttgccttgtgtgcaatttttccaggccatctcacgtacaaagtggacaggtttgggttatatctttgtatttgtataaacatttttctgtatcttgtaaattacaccaagtctgtctttgtttatattaaaaaaagattaaacgtagatcttctcacacaggtaatgatacagtatgtgctatgtaggaacatgctacgcctagaaatgtaacttgaactttaagcacctaaacaaactcac

SEQ ID NO: 23677 - DNA, 778 bp, Zea Mays
gaaactttgttgtgccagaaacatgcattgttttatcattaaccagaattgagttagggattatcattaaggcattaaccaaaatggagttaggatgtctttttttgtagtgtagaaaacgttgtgtatactgaaatgtgcatgcttgcaacatgtctgatatggattatatttgagtgatatctttgttgaagaacatgtgaaattagagttctggtggtcttctagaacacacactgctcctcatctttactttctctacataattcttcaatatgttggcctggtgcagtggtgagaggcctttccactgagccaaagggcctgggtttgacgcagcctctgcgcaaaaatgtagggttaaggattgcctcggttattacttccccagacccgactcatgcgggagccgtcagcactgggagatatacgtggagcgtcagaattatatgtgcatctacaagaacagttacaacaattctccatcaggttggtgttcatacatatcagatgtaaatatggggagacggtgcctcatcaatgacgagtaggttgattctcatctagcggcaccattgctcatcacaactgatttgcttgagcaacttaatgtcactctcaagaggaccctcctttcgaccgacaccctgaagcaccacacaagctttagaaagtcggaattgtactccgtatacataaattaccatgatattatatgttcatgtaattctatgttgattctttagaaataatatatatgatattgtaatgtgtgttc

SEQ ID NO: 23678 - DNA, 1762 bp, Zea Mays
attcaagaattgttcggttacattttgcctgtttgctgtttttttcgtcggttcgcctcgtcttctccgcctggcccgagactcacactcaattcggtcgttttctgcattaacggagtcaggcccaggcctaacctcagtacatcagagcagccgaacacgcccgcggcaaccgccgccattctaccccaggtcggacggacccttgccggagacgagcacacgccacagcagagcagcgcgaagcgagagatccaatggcggcggcggaggggcagtgggtgctcatggcaacggggcggacgccgaccaacattgcggtgatcaagtactgggggaagcgggacgaggcgctcatcctccccatcaacgacagcatcagcgagatctcgctattaggaggaaggtttcagagctgcctcagagaaatcagaaagcgtgctcgtgactttgaggacaaggagaagggcgtcaagatcaagaaagaggactgggacaagttgcatgttcacatagcctcgtacaacaacttccccactgctgctggtttggcctcttcagctgctggccttgcctgtttcgttttcacccttggaaagctgatgaatgcgaaagaagattatggagaactttcttcaatagcaagggatctgggagtgcatgccgcagtatatatggtggttttgtgaaatggtgcatgggagaaaaagatgatggaagtgacagtattgccgtgcagcttgctgacgaaacacactggaatgatcttgtaattattattgcagtggtcagttcaaagcagaaggaaaccagtagcaccagtgggatgcgagatagtgttgaaacaagtcctctcttgcagtacagggcccagacagtggtgccaggtcgggtgttgaaaatggaagaagctatcaagaaccgtgactttgaatcctttgccaaattaacttgtgcggatagcaaccagtttcatgctgtatgcttagacacgagccctcctatcttctatatgaatgacacgtcacaccgaataattagccttgtggaaaaatggaaccactcagaaggaaccccacaggtcgcttacaccttcgatgctgggccaaacgctgttctaatcgcacaaaaccgtaaaactgcagcacatctcctccagaagctcctatactatttccctccacaggataatgatttgagcagctatctggttggcgataaatcgattctaggtgtcgccggattgcattccatgaaagacgtcgaggctcttccagcacctccagagacgaagataccggatcagaaattcaagggcgatgttagctacttcatctgcagcaggcttggcgctggtccaaaggttgtttctgacgaaggtcaagcattgatcgattcagtcaccggacttccaaaaggcgtgtagttctagatttaggttggaataatggtttaagctggggattaaagacaatggtatcatacaagcaacctgggccgggaagatacattaggctcgtgtcacgttggtttcgtgctgattgacttgacggtgtattggtcatgtattatgcatttgcgctggtgttcgttgctgtccaataaagatagaacacgttctcgccttttgtttttctccctcgcctagtatgtggctcaaatatttgtttcactattttattgagcacttcagctgagacaaaagcggagaataactttgtatggctgcttgtcacagtggatgaaaaaatctcgacccccc

SEQ ID NO: 23679 - DNA, 4745 bp, Zea Mays
atgacctatctacctcttctagaaaaccctccaagcgcggccaaaaacattcaaagtgaaatcgcctcctcccttgggagaactcatgcaaacccagcagaagggggcaatggtctgaaatcgtggaccaacaatgatgatctgcggaaagatgctgcagaagcgctctgctgcctcgcacatgcccttggagaagactttactatcttcataccatcaatacgcaaaattcttgtgaagcaccacttgcggtacagaaaatgggatgagattgaaaatcggctactgaggcgagagctactcatcactgaaaacttgtctgtgcaaaagtacacacaatgtccacctgatgtcattagagacccccttgatgattgtgatggtacaccttctgagatagctgatgatacacagcgacaagcaagaagtcatcaagtcaatgatgtccggttgcggagtgccggtgaggcttctcaaaggagtactagggaagactgggctgaatggatgagacatttcagtattgcgcttctcaaagagtcaccatctccagctttacgcacctgtgcaaggctagctcagcttcagccttctgttggccgcgagttgtttgctgcaggttttgcaagttgctgggcccaaatgagtgaatcctcccaggaacagctagtgagaagtctcaagacagccttctcatctcagacattcctcctgaaattcttgccacgctgctgaacttagcagaatttatggaacatgatgagaagccacttcctattgatacaagactgcttggtgcacttgctgagaagtgtcgagcatttgcaaaggcactccattataaagaaatggaatttgaagctgtgtgcaccaagaagatgggtgcaaatcctgttacagtggttgaatcccttattcatattaacaatcaactacagcagcatgaggcagctattggcatattgacttactcacagcaaaattcggaagttcaattgaaagaatcatggtatgaaaagttgcaccgttgggatgaggctcttaaagcatacaccgtgaaatcatctcaaacatctggtccctttacaaaacttggatgctacattaggtcgaatgaggtgtctagcagctttggctcggtgggaagatttaagtgcattgtgtagagagcaatggacgggtgcagaaccatctgctcgactggaaatggctccaatggctgcaaatgctgcttggcatatgggtgagtgggaccatatggcagactatgtttctcgcctggatgatgcagatgaaaataagctccgtatgttgggtaacgcaacagctagtggtgacggaagcagtaatggtgctttcttccgggcagttcttttagttcgttacaaaaagtatgatgacgctcggatgtatgttgagcgagctcggcggtgtttagctacagaacttgcagcactggtacttgagagttatgagcgagcgtataataacatggtgcgtgttcaacaactttcagaactggaagaggtgattgattactgcactcttcccatggaaagcccgattgctgacggacggagggaacttattcgcaatatgtggaatgaacggattaaaggaacaaaacggaatgtcgaggtgtggcaagccctacttgctgtcagggagttggttcttccccctaacgaagacagagacacctggataaagttcgctgaactttgctggaagaacggtcgtattagtcaggctagatctacgttagtcaaacttttacagtttgatcctgaatcttcccctgaattgacactgtatcatgcacatccacaagtagctctggcttatctaaaataccagtatgcagttggtgatgagcttaaaaggagggatgcattttctaaactgcaagagttgtctgtgcaggttgctaccaccatgggcaatttacctggaacatcagcaaaccatggcaccatgtcaaatgctggagtaccactcattgctcgtgtctacttgacacttggtagctggaagaaggcactatcacctgcattagatgacgattccattcaagaaattttgatttcttaccataatgccacgctaagtgcaaaggactgggggaaggcctggcacatatgggctttgttcaacacagaagtcatgtcacgctatactttccgaggccgaccagatattgctggaaaatatgttgttgcagcagtaactgggtatttttattctattgcttgtgcatctactacgaaaggggtcgatgatagcttgcaggatatccttcgtctgttaactctttggttcaaccatggggatacctcagaagttcaaacagcgttgcagaaaggtttttcccttgtcaagattgagatgtggctggttgtgctgccccagataattgctaggattcattcgaacaatagagtagttagagaactgatacaatctttgctagttcgaattggaaaggggcatccacaggctttgatgtatcctctcttggttgcctgcaaatcaataagtatattgagacaacgtgcagcgcaggaggtcgttgataagatccgccagcacagtggaggtcttgttgaccaggcacaacttgtgtcgaaggaactgatacgggtagcaattttgtggcatgaaatgtggcatgaggcactcgaggaagctagcaggatgtattttggtgagcacaatatcgaaggaatgcttgctgtacttgagccattgcatgcaatgcttgagaggggggatgagacaattaaagaaaatgccttcattcaggcttatgggcatgaattactggaagctcatgaatgctgtttgaaatatcgggctacaggagaggatgctgagctaactaaggcctgggatttgtattaccatgttttcagaagaatcgacaaacagcttccaagtcttacgaccctcgatctgcactctgtttcgcctgagctactcaaatgtcgaaagttggaacttgctgtgccaggaacttatgctgcagattcaccacttgtgacgattgagtattttgttccccaattgatttgttataacgtccaaacaaaggccaagaaagctgacaattcatggaagtgatggcaatgattatgcattcttgcttaaaggccacgaagatttgcggcaagatgaacgagtaatgcagctttttggtttggtgaatactctcctagagaactcaaggaaaacatcagagaaggatttatcaatccaaagatatgctgttatacctttgtcacctaacagtggtttaattggatgggttccaaactgtgacacacttcatgctctgatccgtgaatacagagatgccaggaagattttcttgaatcaggagcacagacttatgttggcttttgcacccgattatgatcacttacccctcattgcaaaggtggaagtgtttcagcatgctttgcaaaatactgagggaaatgaccttgcgaaggttctgtggctgaagagtcgaacttcggaagtatggcttgagcgccgcacaaactacgctagaagcctggctgttatgagcatggttgggtatttgcttggtttaggagatcggcatccaagcaaccttatgttagatcgctatagtggaaaaatattacacatcgacttcggagattgctttgaggcttcaatgaatcgagaaaagttccctgaaaaagtaccattccgtttgactcgaatgcttgtgaaagctatggaagttagcggtattgagggtacattccgaacaacttgtgaaaatgtgatgcaagtccttcgcacaaacagagacagcgttatggccatgatggaggcatttgtacatgacccgttaatcaattggcgtctgttcaatttcaatgaggttcctcaagtgtcgaactatggtaatgttcatgctcacacggttgtcagtagtgaagaagcagtggctaaccgagagctcatgcaacctcagcgaggagcacgtgagagggaactgctacaggctgtcaatcaactcggtgatgccaatgaggttttgaatgagcgtgctgtagctgtgatggcacggatgagtgacaaactaacagggcgtgacttctcttctgggtcagctttggctggagcaggtagctctatccaacatggcagtgagcatttggcttcaggagatgcccgggatgcccaacctggtctctcagtgaaggttcaggttcagaagctcatactccaagcgacttcacacgaaaatttgtgccaaaactatgtcgggtggtgtccgttctggtgagctctcttggaaacagtagcagtttataacatgtaaatattgtgaataccgtgtgcatagaagtttcgtggtgacagtttgtatgtgcagctttgtaattagcagaacttcaagatgccttggaccatccttttgtcagtttcttagaccgtgtttagcagttcacccttatggccatccaaaacactgtttttgtactgtagattgtattgtttgtagattgtactgttcgcagggtggatttttgaatatgagtataagaatgtgtaagctgttgaagatagccttaggttttcttccgtgccacttgagggtttgttcgattagctctcaatttatgtggattgagtgagatcggattggtttaaatctcaagcaagttaaattttcttcttaatttttctaatctcatcaaatccatgtgtaacgggaataaccgaac

SEQ ID NO: 23680 - DNA, 1150 bp, Zea Mays
taaccttgtcctctgtatccgtgctggtgctctgcttggtctcggtctcgtcaccgccacgccggtctgccgtcgtctcgtctgctgcactccactgtccactccactctcccaccgcactttcctctctcctcccctgttttcgctcccctcgagacccccaaagcaccgaaagggggaggagcggagggagatagagaaagcggcggggttcaagaacgccgcggccatccggagccaggattctcccgatacaccccctcgttcccagttcttcagtggcgccgatttggagttccagagacggcgatgggctccggatctctgctcaaggtcttcgccaacaacttcgacgtccttgcagggcctttggtggcattggcttatcctttgcttcctttctggccttcaatgaaattgatctttatttgctggcttgtcttgccatacttcaatggcgcagcctatgtgtaccagaattatgtgagacctgccttcataaagaaccagatggtcaacatttggtatgtccctcagaaaaaaggccttcttgggaaatctgatgacttcctcacagcacttgataagttcattgaagaaaatgggactgacgcgctgaagaaattggcgaacaaggctggcaagccatttaaacagtctgggaaatcatctaaggatcagaaagagacaaaatcatcaaaggattccaaagaaccgaagccatcaaaagatgcaaagcaaccaaagccatcaaaagatacaaaggagccaaagccaccaaaggtttcaaagtcacccaaggactccaaagaacagaagaaggcaacgctgaaagatccgaagaaagcaccaaaggattctaaaggactgaagaaagcgcttaaggatccgaaagaacaggaatcattggaagacccaaaggaacatacagcaaagaaggccggcaagcgtgtgacgttcgccgaggtggagcctgagaaggagctcaaggcctcgaacagtgactggcacccatcctctgatttccacgcggcgtaccctgagcagaacccatgggctagcggcttcatgatctttgaggatgaaaacagctactggaaccgaggacccctagactggagatcgtgctaaatctagtcgactagtacat

SEQ ID NO: 23681 - DNA, 764 bp, Zea Mays
ctcgcctcgctttcatttgccgtcgcttcggtgtgaatgacatcgttgacaagtacagtacacattctaagaatctggggaaatcacatcagcagccttctattgatttgaatgtagagcagagcaaatacagcggcttgaacgagcaacttgctgaagaaactaatggacttagacagatgagaggtgaagaccttgagggattgagtgtagaggaattgcaccgaatggaaaggaaacttgaagcaggactgcatagagtgattagtacaaaggaccagctattcatgcaacaaatcggcgaattactgcaaaagaaaatatcctcactgaagacgggcagtcgtctgaatctgtaatgactgcattgcattcaggaagctcgctcgactgtgatgatggttccgatatttccttgaagttgtcgttgccttgaaaggaaggaccatcgcatcgcatgttatctgcatgagtggggctgacaccagtgcttctaagaagacaaagactgggatagtcccattcgcggcattatattggtttaaccagatgtgctgtccttgtgcatgtctgtacttcaaagtggctaacgcgaaatttgtatatataatagtgtatgcgctgcgttatcttcgttctaaaaatctgtattgtttcgttgctggcgctatattgttggtgtattatatatatgcacttaactgttatctatactattctattaaaaatataatatagacatctgatgctaccacggcttcgcg

SEQ ID NO: 23682 - DNA, 796 bp, Zea Mays
caaagctggtgggaagatacagaaaagtcaagaaaaggcagttccttgaatttttcaaaaagaaagatttttacagatatttttaataatgacctcggtggaccctatgcatttcttgagccaccttttgttcaaagaccccttctatataagatacaggcaaggagaaaaaagagattaatcgtctcgaagcttccgatacactcagttctcacatgaacgagtgggatggacctccctagaaaccaaacacccctgaatcgcagtcatcatcagagaacgacaatccgtgtgctgttgcgatgtagtagtactactgaagcacagagcgaaccgcacaggctagcccgcacggagcgaaccacacgggaaaagctgatgggaagaaacagaaaagtcaagaaaaggcagttcctgcagcttcaaaatcaagtccggcttccaagaagagcaaggatgacgatgattctgatgaggacgagactgatgattctaacgaggacgagacagacgattctgatgagggtgagggtttgtctcctgaagaaggcgatgatgatgattcaagtgatgaagatgataccagtgacgatgaggaggaagacacttcaactcctaagaagcatgaggcaggcaagaagagagctgctgaaagtttcgtgctgaaaactcctctatctgataagaaagcaaaagttgccacgccgtcagctcagaagacagttcaagttgcgttttctacatggccatggggaccatctgccgtcattttctttttgtgatttggtgaaaaagg

SEQ ID NO: 23683 - DNA, 4543 bp, Zea Mays
actgcacctgcactgcacacacgacgccgactcccacacacacacacaacgagctaagcttattagcttgcaagcatacgttgtcgatctgatcgacgtactagctagcgcgtagccaacagctagcaaggtcgtcgtcgagcgcggcggcggcaggcggcggcagcagcagcagctccgtcgtcgtccatggcggcgattgatcgggtggtgttcgcgttgaacgggcagcggtacgaggtgggcggagtggacccgtccacgaggctgctggagttcatccgcacccagacgcccttcacaggccccaagctcggctgcggcgaaggtggttgtggggcttgtgttgtccttatagcaaaatataacccaaagacggatgaagtgactgaatttacagcaagttcatgcctgacacttctttacactataaatttctgttcggttatcactactgagggtctgggtgatagccaatatggctttcatgctgttcaggaaaggatgtctgggtttcatgcctctcagtgtggcttctgcactcctggaatgtgcatgtctattttcacttcccttatcaaagctgacaaatccaagaggcctgaaccaccaaagggcttctcaaaactaaaagtatcagaagcaggaaaggctttctctggcaacttgtgcagatgcactggttatcgtccaattgttgatgcctgcaaaagttttgcatcagatgttgacttggaggatttgggccttaatatattctggaagaaaggtgataggaacccagatgttagtgaattgccaagttacacccttggtggtggagtctgcaccttcccagactttctaaaaactgagttaaaatcctcgcttgatcatctgaataatccttgtattgcagcctccggggagggttggtatcatccgaaaagtatcaaagaatattacgagttaataaattcttgtttatttagtgactcagtcaaagtggttgttggaaatactagcagtggtgtacctggatacaaggatcaagacatctacagtaagtatattgacataggaggcattccagaactttcaaatattgtaaggatggggtctggaattgaaattggagtagctacatcaatctctaggaccattgagatacttgaggaagaatgtgaatctatatcctctccaaacggaagtgtagttttcagaaaacttgcgaaccacatgagcaaagttgctacaccttttgttcgtaacacggctagtattggaggaaacatagttttggcacaaaaattcccatttccatcggacattgcaaccatactccttggtgctggtgcaactgtttgtcttcaggttgttgcagaacggagacaaattactttggaagagttcctagagcagcctcctatagatgctactactttactcctgagcatatttattccaaattggatttcagattccggggcaaatataagtttgctatttgaaacttacagagcagcgcctcgtcctcttggcaatgctgtttcatatgtaaattgtgctttcctgggacatgcttctttggatgaacaatcagatactcttgtattgagtaatctgcggttggcttttggtgcatatggaacagaacatgctattagagcaacgagggtggaggaattccttactggtaaatcactcactgcatcagttgtacttggtgcaattcaattacttagagaaacggttgtaccaatggagggaacatcacatcctgaatatagagtcagtgcagctgttggatttctctttagtttcctatctccattttctaaatgcatcccagagcctggaaagtctctggccagcagttctactgattcagcagatacagatgatgttcgtaatctgccattatcaacacgtcgagaaacattttctagtgacgaatataaaccagttggtgaaccaattaagaagtatggtgttgaacttcaagcatctggggaggcagtatatgtggatgatattcctgctccaaagaattgcctctatggagaatttatttacagcacacaaccccttgcttatgtcaaaagtataaaattcaaatcctctttagcatcagagaagatcatctcttttgtttccgcaaaggatattccaagtggaggactaaatattggatcatcctctacgtttggtgacgaaccactatttggtgatccaattgctgagtatgctggtcaagctcttggcattgtgattgcagaaacacaaaggtatgctgacatggcagccaagcaggttgttattgaatatgacacagaagatttgagcccaccgatcataactgtggagcaagcagtggaaaaaagtagctattttgatgttcccccagaattctatcctaaagaagttggtgatgtttccaagggcatggcagaagctgatcacaagatcccatcaacagaagtaaaacttgcctcagagtactacttctacatggaaacacagacagcactagcagttccagatgaagataacactttggtagtctacagttcgtcacagtaccctgaacttgcacaaagtgtcatagcaaggtgcttaggtattccattcagcaacgtgcgtgtcattacaagaagggttggaggaggcttcggtggaaaggcattcagatcattccaagttgcaacggcagctgcactttgtgcgtacaagttacggcgtcctgttcgaatgtaccttaatcgcaacaccgatatggtcatggttggtggtaggcacccagtgaaagctcattatactgtcggattcaagaacgatgggaacgttacggccttgcatctagatttattgattaacgctgggatatctccagatgcgagccccataataccaggcactattatatctagtgtgaagaagtacaactggggcgctctgtcatttgacatcaagctctgcagaacgaacaactcatctaaatccgtaatgcgtgctcctggagatacacaaggctctctaatcgcagatgctgtaatcgagcatgtggcgtctgtcctgtcactggatgccaacagcgtgagggaaaagaatttccacacctacggtactcttcagtcgttctaccctgacagcgcgggcgaagcttctacgtacacgttgcattctatttttgataggctggtctcaacttcaagctacctggatcgagccgaatccataaaggagttcaacagcaacagcaagtggcggaaacggggcatctcttgcgtgcccctcattttcaaagtggagccaagggcggccccaggaagggtttccgtgctcaaggacggctccgtagtggtggaggttggaggaatcgaaatcgggcaaggtctgtggaccaaagtgcagcagatgaccgccttcgctctgggaagactgtggcccgatgctgatggcggcggcgaatgtcttcttgggagagtgcgcgttctacaggctgacaccttgaacttggtacaaggtggactcactgctggcagcaccgcttctgaatctagctgcgcagcgaccctccaggcatgcaatacgctgtacgataggttaaagctagtcttggacaggctgcagcagcgatcagagaatgtctcgtgggataccttggtttcgcaggcctatgaagacgatgtcgatttgtccgcgagtgcgtactgggtacctggtcaagcttctaacaagtaccttaactacggagctggtataagcgaggtggagattgatcttcttacgggagcaatcactataataaggggcgatcttgtgtacgactgtgggaagagcttgaaccctgcagtggacttaggacagatcgaaggctcgtttgtacagggaatcggtttcttcgtatacgaagagtacaccacgaacagcgacggcctgatgatcagcaacagcacgtgggactacaagatcccaagcgtggacatcatcccgaggcagttcaacgccgaggtgctgaacaccggataccacaagaaccgtgtgctctcttcaaaagcttccggtgaacctgccttggtccttgcctcgtccgtccactgcgcgctgcgggaagccatccgagcggcgagggtggagtttgcggacagcaccgtgtcatctggacactcgccgctggagttccagatgggtgtccctgcaccgatgacactggtgaaagaactctgcggtctagatattgtggacaggtacttggaaggtctgtctacctgtgaacgtgcggctggtggggcgtagtcttcttctaatctaaactcatgttatctcatacaagggagtggtatcagcctattgtttgcttgtttgtacgtgtatatacaataaaacgtgctcgcggcgtggtggtgtgtgtgtcattgtgtgtgtgagtgtgagcacaatatctatctgaatgctgtcaaccatgtgtccttattaaaactgctggagtggtcatgtttcagtaatctattgttactacttattggcctcgtgcgtctctacgcacatctaaaacttaaac

SEQ ID NO: 23684 - DNA, 214 bp, Zea Mays
ttatgaaattcaagaagtggtttctgaagaggagtctgcttcagtgcctgctcgtccagtgatgggagccatctaactggggtttaatagagggatctagaactccgtctctgcaacaaaggtgatgaggagtgctctatgtgttcgtgaggctggagggcgcttccagttctggaggaggattagttaggcttgtgtataagctttggagggt

SEQ ID NO: 23685 - DNA, 2280 bp, Zea Mays
gatacgtgggctgcgcaactccctcaggcccaagcttaagcatagctaggcagcacgcagcagcccgtctcggcttgcctctccaaacctccgcatcctggaacccgccccgccacgccaccgccatctccccgcgccgccggcctaaaacctagccaagccatctcccccgcccgaaccttccaacgccggccgcttcctatctcaaccactcgccgctccgtctggtcttccttcacaccgattacgtggcgcacctactcgtgctcctcacctacgtctccagcgcttctgctctccgccgccacttccgtcgctcggtcaccgttgactgctgctacggctagctgggtgttaactgaatcgtaggaatttaggaatatagttggcacagcccgccacggcatggaggtcgacggcgaggcacaacatttccgcctcttctccaagagggccaagcccaagctcaagcccgaggtccagccccagccggagccggaacccccaagccgtgaccccgccgccgccgaagcctacctcgaccctgctcccacaatcgtgaccgagaccggccaggccgacgacgcggcggacgctgccggcacggcgccggcgaccttcgcggaccttggcctatcgcagtggctggtggatgcgtgcgaagccctgggcatgcggcgccccacggcggtgcagcgccggtgcattccgcgcgcgctcgcgggggcggacgtgctcgggatcgccgagacggggagcggcaagacggccgcgttcgcgctgcccatcctgcaccgcctcggggaggacccctatggcgtggccgcgctcgcgctcgcccccacgcgcgagctcgcggcgcagctcgccgagcagttccgcgcgctcggggcgccgctcggcctcaggtgcctcgcggccatcggaggattcgactcgctcgcgcaggccaaagggctctcgcgccgcccccacgtcgtcgtcgccaccccaggacgcattgcgacgctcgtcaaaaacgatcctgacctcgccaaagtattctcccgcacaaagtttcttgtgttggacgaggccgatagaattctagatgttaattttgaagaggaacttcgtgtcatatttggctgtctaccaaagaagcggcaaacctttttgttttcagcaacaatgtcagacaatctgagatctttgcttgaactttcggggaacaaatcatacttttttgaagcatacgaaggtttcaagacagtggagaccttaaagcaacaatacatccatgttcctccacagggaaaagagcttcatctttggcatcttttgtcagttatgaagggaaaaacggaagaccctattcgttcagccattgtatttgtctctacttgcaaagactgccaatatttagatctgctgctggaagaacttcgttatcctgcggttgctttgaactctcacaagtctcaggcacagcggctctcagcacttaaccggtttaaatccggtcaggttcctgtattgcttgccactgatgtgggcagtcgtgggttagatatccagacagttgatcttgttatcaactacgacatgccgatgtctccacgtgattacatccaccgggttggacgaactgcaagagcttcaaggggagggctcgctataagctttgttacacagaaggatatatgtcttttacacgagatagaagatgttgtggaaaagcagttggaggcctatgagtgcagtgataaagaagttactaaagatattacaaaggtgttcaaagcaatacgtctctcgaaaatgaggaggagggacgagggacatgatgagaaagtagaagcaagaaaagaacagaagagaagagatcgggcaagaaagaggaaacatgaagactaaaacccatagaaggacgaatgttgaaggccgctgtgcccgatctaaaacgttaaacatgagaggcagttgcttgttcagtctagcgagtagctttaacctggaggagtcgatgatgactcgctccagtgagcccattcagtcgactgctctcagttttgccggcgttgtgctgtggatgtataaatttagggggtggctcggcagatgtgccactgaattcgtggcgcagcagtaatggacgaaacttcaccattgcttgtcagtacttactttgttctaaaggaattataattctcgctctttgacgagttaatctatctctgattaggtgaaacaaatatataatcaatatttacaatataaaatagatatgttataaaagat

SEQ ID NO: 23686 - DNA, 1147 bp, Zea Mays
cgacctccaggaaggaccgcactccttagtccttacacccaccaccaccagacccctgtcgcactcgtgtgccggccggcgacggcgatgatggcgactggccgatcgctcgccggggtatactccgccagagccacccgccccatgcctctacgcgccggcgcacgggcgccctgcgccggtgccgccgcggccgagcctgcggccgagcacgtgcggaggctcgtggcggagttcgacccggcggtcccgctggactccgcggtcacgccgccgagcgggtggtacaccgacccggattttctccagctcgagatcgacagcgtcttcttccgcgggtggcaggctgtcggtcacatatggcaagtgaagaacccaaatgatttcttcacaggaaggctgggaaatgtggaatttgtcgtatgtcgggatgcaaatgggaaacttcatgctttccacaatgtgtgccgacatcatgcttcactccttgcatgtggaagtggtcataagacttgcttccagtgcccttaccatggatggacatatggattggatggcacccttctgaaggctacaagaatatcaggaattaaaaacttcaataagaatgattttggtctcataccaatcaaggtggctacttggggaccttttgtgttgatcagatttgatgatgagtccactgaagataatgtttatgacacagttggaaatgaatggttgggtagtgcttcagatctgttgggtacaaatggcattgacacttcactgccgcatatttgcaggtcttctgtgacaattacctagacggtggatatcatgttccatacgcacatggggatcttgcatcggacatatgaaagagttagtgttcaaagatgtgaaagtgcaccagcagaaccagatgacttcgatcgcttagggacaaaagctctatatgcctttgtttatccaaactttatgatcaacagatatggtccatggatggacactaatctagctgtcccattagattcaaccagatgcaaggtggtatttgattattttcttgacaagtctctgctggatgaccagtgctttatcaagaaaagcctcgaagacagtgagcaagtacagcaatgtttatgtaggatacatatcatgcaga

SEQ ID NO: 23687 - DNA, 3000 bp, Zea Mays
cgtgcacagggtggacgttctgcccccgacatcctccccttagctccgctccctgaagccgtgatcgaagccgccatcaacgccctccaccccctccgcgcgcggcagcggcagccggcatttccagcccctaaaatcctatttccctctcccacaccaggcgccgcgcccgtctgattccgcccgccagccacgcccgcagatctcgcttcggcgccctgattccgtcgtatgcaaggtcacagccctgccttccatcgtcgcccccatgccacgctccccttccatcctcgctcacttccagccgcccccattcccagttgaaggagtcgtccaggaaccaggaaccccatcaccggatcaggagcagctgtgtcgcgagcatggtcgttgctgagctcccgatgaccgcccgatggtgtcggaccccgcaccgccgtcggcaccgcgctactcggcgtactcgctgccgtcgacccacctccccggagaggacatcctcttctgcatcgacgtcgacctcgaggtccacgccaagatgaagtccgctgccgtagcgtcctcggatccacgtccaccgcgtcgccgcagtccgtaggagctgatggtgccccgacggtggggagcatcgagccatggctcaagtgcaaggatcagcccccgcagcagggcaaggagatcccgcagaccaaggccgaccgggccaagctcgatggcatgtacaagtgcatcctctgcgcctgctgctccacctcctgcccgtcctactggtggaacccagaggagtacctcggcccagccacgctgttccacgccaacaggtgaacagggcttcagcagggacgctggtttagcaatggaggcgatccattccttgtctgcttcaaaatcaagttatccaatggttgatctcacccaactcttcaaacaacaaaatatctccttatgtgtgactgaatttttcatgcactctggttttggatccatccattatgttcctcataatgaagtatttcatgcttattcagtagcaaaagacgatattttttcttgaaaatcctcttaattaacacgtgcattttcttgtatgaatcgttacctattccttttaatcatgtatcttggtaattaattgcatttgcatcattaaacctggcttgactcttgtgttgcttgatagttcatttgttttgtctataaactatgtgggcgtcagctctgtataggtccatgtacaattttccaattcttcctatcaagtttacaaaaacaggtggggcctgtccagctgtacctgactatgatttggggtgggtggggtctgaatctttttctttgttcttataatctcatggtgtagaatttctgctggttgggcctgatgacatttggaatctgattacttctttacaccattgtgacattagttgactgtcatttgttgctttttatttgagttgcctggattgaattagtctcaggacagacataggataggacctaagatcgcattagcaaaagctaaaatggtctaggattagaagtgttataccaaatcttccatgaactccagatagcccagagtcttttataatgccacacacaaagctttcatgtgttggaaaaaaatcataggtcaaccgaactaagttatcacaacatttactcaaaccatatcagaaggcacatatgcttacataaatttcattttagttgataccaccggtcctgggtttcatgcttacaactagaaaagggttctattttttcagattatgaacataccatggaaacatgaagcagggttttacttttatatatgctagcaattgttatctgttgtgttgctttacatttctgttacttactcttttgcaggtaaaatatacagactgtggagttagtcctcaggatctacatcatgtattcacaaagtttgctcatcctcaaagtggaggaaaccgagggtttaatggtagtggtcttggccttgccatatgcaagaggtaaacgagagccctggaaataacaggaattaattcaggaaagtacacgagcaagcacccgaggtcaatgagcttacctccattgacaatggagataggaaggaatatcatgaagagaaatgaaagctgattgcaggagagattaaaatcaaagggattgagctacaggagagttgcagtctgtcgttcttttccatgggtgtgattgagactgaaacgatgggtaccagagtgaaggagtcgaagacagttttagtagagaaagagctcgaactgatcgacgagcctcagattcaagagagccctccagttcgtgcattgttgcatgatgaggtggattttgctgaatcgtcacttgctattagagaatctgacattcccgtgaagaaggtgctgataatcgtgacaatcacttttgtttggccacaacagccatattacttgaagcccatgttttgaaagctgtattggcacttcttctatggttagtggtggaatagcccgaacagtcctatgaaacagcaaaaaatctgttacagtccacttaggtggaagaggagtcactacttatagaaaaagcttgttcctagaggtgccagataggctgctggtcgattccatcctgaacaagttgcgccaaagattacatgaatattgcgtgccgagatctgtcttcagtaatgcgatgccatcctgaacaagttgcagcgacaattaggataggattttcccacgctttttagtcttgtgtattccttttatgctcttcatctttttttctcattatatccaccaattagatagtcatgtagactttcttttaggcgcttttgttttttatactttgtgttaccttgcttttgttttcatactttgtgttaccttacagatgtaaaaacgctcccctcccgtacattgcactatttatgaggaaaggtaaaatagcgtcatttagctttttcagtcgaggaaatgcactaatattttgtcgaat

SEQ ID NO: 23688 - DNA, 427 bp, Zea Mays
gaaatatccaactttcacattgtcattgaattccacatttcgaaggtcccggaattggtcagcaatccatatgcacaaaagaagcgatgcctgcggagaacattgacaggtccctggtaactgagttgttgttgatcggactcgacaggatatttaacattatggtacttgtacattcttcaggatttggagaacccaaatttctgttgtatattagcgatcaacagagtcgaatgtaccagtgcataactttcttctcctgacactatgcctcctcgattcatttctgcaagtctggtagatttattgcacttctgcgccctcgtgctccttaatactccctgatgaacgactagtaactgtgggatttcataggaacagagatgcgtgtcaggattgaagtggtaagtttcaggattgaagtttg

SEQ ID NO: 23689 - DNA, 271 bp, Zea Mays
tttttcgtgagctaccatcgccgagccatcgtacagaatagagagagggaaagagaggttggccgccccgctgactgctcggggcggcgccgtcggtggtccggagtcggaccagggagcttcaccaggttgcactgtggtgtttcggagcctcgtcgcgtgagggcgaatagtggggatccgacgatttctcaccggagatcagggaaacattgccggccgcccgccaccgtggccaagggagtctgcgctgcgattgccgaacgtgata

SEQ ID NO: 23690 - DNA, 4080 bp, Zea Mays
caacttccagatcgttctcatcccatcgtttcctcctctgctcaagcacggcagccagtccagccaccatttgggtgctcatctccctctgctcggcacccagccccagctcgcccgagctccctgcgccgacctcatcctccccatggtgcgtcaccttctactcctctccttcccacggcacagcagcgcccctgcagctccccttctccagatccatggcgcccaacaccttgagcgcccctgccgctgctcctccaccgggatctcctcctccactaggcgtccaggcttgtcccaccatggctgcccctcctccatctcctccctccccaccaggttacccagattccatggccgccgccgccccagccatctccctggtggccgacctcgcccctgccccagccacagctcccccttcggccctgctgctgcaagcactcagcccctcccatggcacacggagaaatcccatgatttgggggaagacgaagtccaagcacaacccccgccaatcgctcgatgaaaaatctaaaccaaaaccctcagcgttttcatgggttccggagggattttatgttggtgttgtgcggtgtgatctccaattccctattgctgatgtcttactccatcatgaccttagggaaggatgttttcctctaaattactcgtaataattatgcttggtgtatgtgttgttttagctacttgatgaaatgttttagttgtgtgcgataatatggttgccgttcgagtggaaagtagatgtgttgtatgacctgagttggagttgaagcaagtatgtgtgtctcgtattacgaaactaattagagatatgcatgatgtttgtagatggattatgtgtagagtgttttagtacaagtatttttttaggtatagttgaaccaattattgtatatgaattgtgcgatatcaaggttgttctaatgttcttttaacatcttgctaataaggtgttagagtattctaaatgccaaacataggataattttacaagccaaatagaagttaaattgaaggtattgatgtttagggctgtaggtatagttttagttatgcagctagtccaataaagtagatcatgttttctgtagaagcgttatatataaaacttgtagataatctctttatcttacttgtgtaaaaatttcatgaccataggtgtagtagtttaggagttatgatttttccaagtccagtctcagaatctgtccgaattctatacaggtttcgaaaattggattgtttggctaagctaaactgagaatcagcccttagtaattatagaagaattgtagtacttttcttaagctttccaacaaattttggagcaccctttttggtggtctagagatcaagttacagctgtttgaactatagagtctgaatctgtccaaatctggacagcgaagtctgtttgtagtaactgactttgatatgtattgaattaacctgagatgtttataaatgaattgtagacaattctattaactttctaaaaagtctaggatcaccggatttggatttcggaaactccagttctggacttttgaagtagttagtcgaattctgtccaaatctggacaaaatttatgtttagcgctgtttgacctttctaaaggtcgaatcttgttgtgatggtaatacaaaagttatagaggactttataagctttccaaaaagtcctagtttactatttttggatacatattttatgaattgtgagctaaacagatagttgttgacttgctgttctgctgtccaaacacatgtctactgtctgaaaatagctcattttgtagttacatttgcatcaggctttgatgattgctgtacaaggatgatatggcctcccgcccaaagctgtctggtattcagaagcaggttttggcgctgtacaggggattccttcggacagcacgccttaaggcccctgaagaacgccgcaggatcgagtctgttatcttggcagagttccgtgacaacgcaaggagtgttgaccgtaggaactttgtacacatagagtacttgttgaggagagggaagaagcagcttgagcagctcaagaatcctgatattactggactcgctacccttgtagtaaagaaatgagcaagagaagaaggaagacaagtcagacaaaacagaagacgagaagaggttcctaccataacacttaagcaaggaatcctgtacacttctctcctggggttgtgacttgtatattgtcaaggatcacttggatgtggtaaatgctatactggacactgatgatagctgcataaggattgtgcgaaaaaacgggaagacatccctacatactgctgcaaggattggataccatcgtattgtcaaggcactcatagagagggatccaggaattgttccgatcaaggataggaagggacaaactgcacttcacatggctgtgaaaggcaagaacacagatgtagtggaagagttactgatggctgatgtttccattctcaatgtgcgggacaagaagggaaatactgctttgcacatagctacatggaaatgggagaattttgggattatgaaacaccgcagacgtggcttcgacgaaacggaggcgtaggcgagggattcgacattatgaaaaaccagagaagatactacactctaaaatggacatgaatcctctattaccagggaaggatgatgtttattacactgaaacagacgctgtctcacatccgttacccgcactagacgcacccagtctttctacagagagaatcgcgccgttcttgaatctgccattcgctgaatctgccattcgctgctgttgtttctggacagtgaagcagtattccggacagtgaacaaaaatctgggaacacatttcattttcactgtcattggctaccagagtccgggaacaaaatctgggaacaaaatctgggaacacaaaaatctgggaacaaaatctgcctttggctaccagagtttattgctcccatatcattcgctgtccatttcactgtccattcgctgaacacaaaaagctgggaacaaactcattttcccagtgaacaggtagcacaatttagttcacaaaatctgggagcacaatttagttcacaaaatctgggagcaataaacaggttgaacaggtagaacaaaatctgggagcaataaactgccatcccagaacaaaattcgcagctcacatttcagttcacaagctagttcacaatttagttcccaggtaccacaatttagttcacaagctagttcacaagctcacatttcaatggagcaatacacaggtagcagtttgacaagctattacacaagctcacatttctgggagcaatacacaggtagcagtttcacaagctatcacacaagctcacatttctgggagcaaaaaacaggtagcagtttcacaagctcacatttcagatctatggtttttcagtttctttctaggggtaattttcttaactacccatttgacacttctaggtggcgtagtagcagtcgtgtgttcatcttcatttgcagcaacgacaagttcacggcttggtgcttcatcttcatttccagctacaagtattggtgcttcatcttcatttgcagcttcgactattggtgcttctacttcatttgcagcttcgactattggtgcttctacttcatttgcagcaacgacaagccacctgctttggcgcggactagggttgtggtcgcagcgccgccgccacctgctttggcgcggggccgcgagcagcaagggagaagacgcggagtttggagagaaggaggtgcagcgccgccgccacctgctttggcgcgggaccacgggcagcagatctccgggcagcaggggaggagactagcaggggagggaaatggagattgaagaaaatgagatggaaggaagaggcttgacgggagagagaagaaccttgaagagagaagaacggctctggacggcagaagaaaacggcgcgtgggctgatagcgacggaagatcattattcgttctcctgaacgactaataacgatgctgtctatcttgtttttcag

SEQ ID NO: 23691 - DNA, 1671 bp, Zea Mays
aaaattgtttctaatcctgccctgaaaatgtttgctgaaatactatttggtaaggttgctgcatagctaaaaggttctccaaatgaaaattattcctaatcctgccctgaacaacaagaaggaattctatggtttccaaaaatgagaatatgttttttattcgtacatgaagcttcttatatgaccccttccctcgtatagggagtttttctttttgtattcatacgtgaactagtatttgtttttgtagcagcaccataaggaggatattatttactaatgtagaaatgtttatgttttagcagttgccttgtaatatttgtcttaaattttcgtactttccagctttagtggctcgccaactaaatctagcatggttccctgcttcatataactaaatctagcattattgtcttcttctatttgttgtacaagaaaagatagaatggaactcaaattttggtggcctaacaagtgtggagacttgaattcatatatatttagcacaaatagttctgaccaagttttttaattagtattagtttggatttagagtacacttatgtatgagttattcgacaatgcttatttattagatattgaatggtacttatctatactatattaattataatgttattaaatatatgtttatgtatatttctctttcaaattattataatatggtatctgattataaattaaagaatttactgccatgtaaatcatttcgtttaaaagtacacaaactcggtcctatagcttactgagaactttcatgacctttaattgttgatcagagagggtagcttgatagtaccatagtctttaaacctgtttttagtgtttatatatatatatatatatatatatatatgtgtgtgtgtgtgtgtgtgtgtatctacataacatgaataggacataataaatagctatatttagcgtgaagtatatatgagaatacagacttgggccggcgacatggttgaagctcgtagttttgaattgttggcataatgatttgccaatggattcattgagcgagatggcacagcaaggtgagtttctgattggactcctcaatgaactagcatgttgggctttggcacctggagcagagtcattcttcaggtcccttctgttaggaaggatttggatgcgctccttgtttgagtgctccaaatctgaaaaccaagcaggaatgtcctcaggaggcttggagccttcatgctggtcaatcttcccaagaagaaaggtgtattgagacttcaaatgcttctagtttgtcttcactgcaaccgaaacagtagccagctgaacatgctgacatgttaatgcgggtggtcaaggctcaggattcagagcagaagatacacataaatactggtgaatgatgccatcgacgatgatgaaatgatcaaacgatggatgatgccatcgatgaaagatggaatggaactcaaatttgggtggtcgcacaagtgtggagacttgaatttatatatacttagttagtctcaatgttagcacaaacagttgatgagcaagttttcccattgtattttagtttgaatttagagtacatttatgtaagagttatttgacaatgcttatttatgagatattgaatgatatttatctatattatattaattataatgttattaaata

SEQ ID NO: 23692 - DNA, 324 bp, Zea Mays
aattaacaggctcccaaggaggagatccaatcttgctagcgggcgtccccattgcccatccatcgatctgaatctgcaggctagtgaccaccgccgctaggagcacctcgccaggaacgtgcgtacctccctccagtgtatccttcaacccgccatgaatttcttggtttcactcgctggatgatcgactgactgacacacgtactctcctgtctttaagtcaatccatgatcctatccacatcaagcgtggcaatcaatcatcaaatagtatttttctttggtcggttccatcaagcgtggcagtaatgttttgttcttgcaa

SEQ ID NO: 23693 - DNA, 767 bp, Zea Mays
gacattgaacaccttccaacattcttatgatccacccttggttgactatttcgttgattgtcactattctgtgcctgatgaccggctatggttgattggcggcacaactgcagggacgttaggttacttccctgtaagaaatgaccatgatggaccaataggttcagctgaagcaatcctcgaaggaggccatacaggagtcgttaggtccgtgtacccctcttcaggaatccatgggagacttgggcaaaacaggggcatctttggatggacaggaggtgaagacggtcgtttgtgctgctggcgctctgacgaaattgcagaaacaaacaaatcttggatctctagctcactggtgtggaagcagcaaaagaaaaccaaaaaccggcatcagccctactagccgcaatggataccgtttggaactttcggcactgacaagggaaagccctgtatgtgctgtgagcatgttgtatcttttctttgaattctactaggtcgtgatgaaacacagcacattgtaggtgcagttttgacgttgcttattgtttgagaatgcttgtctatttcagtaactggttattaatctagcaaagatatggtaagttgagtattgaagttttcgtgctcggaacttttagcggcccggaattgaacaggcgatgacgtgtatttggttcttggacattgtctgcagaataagtagcatataaatggagtaggttagggtgcatttggttcttggacactgtccgcataagaatttc

SEQ ID NO: 23694 - DNA, 1278 bp, Zea Mays
tgtaggcgtccatctcgcggtgcacacgttctgccgctccgcgcacgcccgcggccgaacgctccccgcaccttcatcctccgcgcagccacgcatccacagccgtgattcccgccgccccgccgcgctcaccttccagcccgcggccgaacgctcccccgcaccttccatcctccgcgcagccacgcatcccgcagccgcgattcccgccacgctcaccttccatccccgcgctctcccatcgacgtcgatgctcatcctccgcgcagccacagccgcgattcccgccgccccgccgcgctcacctaccagccccgccgcggatccctgatgttgagatctgggagctgaagctgaagatctcgcggatgcgggtgcggctgacggagctggagcgggagcaggggctaatgaagcagcaggggaggatgcgcggcggggacggcggcggcggcgagcacgaccgcgccttccttgcgtcgctctcgaggggcatcggcagcatcaccatgttcggcgggcccgcggcggccgacagacggcgcaagaattgtggcggccggagctcccagtgctccgacggcaaggcccgcaggcggcagaaggcatccttccctatgactgatgcttcgctgctagcgtcgacagtggaggcgcggcaggcggtgatcgtggatggatgcggtctcagcgtctggaggatcggtcggagctaagcagggacggtgggtgctgacagctgagtgatacgtgtatttctaggaagatcaagcccagagctgtcgcatagccagaactgcatctacttccacggcaccgtcagcaaggacaagttggtcatccagctctctaggaagatcaaggacggcatctgaagactgaagtactttgaagtttgatgaacaacaaggacatcctcacgcacaagtttgatgaacaagggagttgccgacctttctctaggttcctgcctgatgactcatttctccagttctttgatttcaccacaaattcgaaggttcaaggtcaacaaaattcttgagccagttcactccaacccaatgggacaaggatcagtggtatcctttcatggggccactgcggtccatccaagtgttgttcatttgtgttgtcttcgtgatcgtggagatcaacacattcttccttaagcttacgtccttattgccgagttcctcaaaaggactaagtcgttactgtggttcagtctctacttgaatgatattagtgacaaggcttttctagctctcgagtgatgtg

SEQ ID NO: 23695 - DNA, 467 bp, Zea Mays
tatgggttaaaaactccagaagttttagctcgtgatcggcttctaggctcgttttctgtcaagcctgtggtaaacagagtgaagttcaccttggtgggtctggcaggctccctcatcctttgcattcttctttacttgggatgcgtaccggtggaaggtctatcccggaagtgtacagtgacgttgccgcaaggtcatttgggcctgatgcgttctgtggagaagctgatctgtcgtagcatcgcaaagcgtggagcatgagaagtttttagatggtggtatatggtctcatagggtaggtatacaagttcccctttgtcttgccttgtggttggtggatggttccatttctgtacggggttttttatccatcagttactgcatcagggtaatgttaataagtaatatttgatagcacgtagtgccgttatttttatagtggcaagctccttacgaaagtttatatg

SEQ ID NO: 23696 - DNA, 1230 bp, Zea Mays
agcacacggacagaggatagagaaaacagagtgcgacgccgacgaagagagagacagagagcaaaacccaaaccctaacaatcatttgcagcccccggcgtctcgagaacctccaaggaaccatccacaggagaaggcgcgagcgcgggtgtttggatcgggggaggcaacgctggcggctcgcggcggcagcagctactgcccaacatgggcacttacctggaattatagaagacaaaatttgctgcgtgaaattattggttatcatgctgatatcatctgtctacaggaggtacaagtaaaccatttcgaagattttttttcacctgagcttgacaaacatggatatcaggcgctttacaagaaaaggacaacagaggtgtattctggaaatcctatggccatagatggatgtgctactttttttcgtagagacaagttttcacatgttaaaaaatacgaggttgagttcaataaggctgcacagtctttaacagatgctattattcctgctgcccagaaaagagtggctttaagtcgattgattaaagacaacattgcactaattgcggttttagaagccaaatttggtaatcatggagctgaaaatcctggtaaaagacagctcctttgtgtggcaaatacacatataaatgtccatcaagacctaaaagatgtgaagctatgggaggttcataccctcctaaaaggattggagaagatagctgtcagtgcagacattcctatgttggtctgtggagatttcaactcaacccctgggagttctccacatgcgcttctggcaatgggcaaagttgatcagcatcatccagatctggcaatagacccccttggaattttacgccctccaagcaagttgaatcaccagcttcctttggtcagtgcatactctgcatttgcaagaatggtaggtgttggctatgatttggagcatcagcggaggacagaccctgcaacaaatgaaccactcttcacaaattgcacaagagattttactggaactattgattacatattttacacagcggactcattgacagtggattcattattggaacttttggatgaagaaagcttaagaaaagacacagctctcccatcccctgaatggtcatcagatcacatagcactcttagctgagttccggtgcaagccaagaatcagacgttgacacattaggaatcaaagagcaagtgaccaacaatgaca

SEQ ID NO: 23697 - DNA, 3370 bp, Zea Mays
ctgttggtcgcccctcctggagctcgccgccgccctctcgctttattttcccgaccacaacgccaccgcccgacgcaaagttgccgctccctgagtctcgacaaccgtccaccggcgttcgtgtcgcagcgagtcagtccaccggtgttccccaggcagccggccagcggcggacgctttcaggcgtcgagcttctgctccttcggcgtccaggcatcgggcgcgtctggtggcgcagcggcgggcgacctccttctccaacgtcgagctcttagttgtagtctaaggagcaagccttctagaagttaaggaagcagcagaaccatggcatcccgtttctggggacagggggacagtgagtctgaggaggaggaggtggaagaagttgagtcagaacagggcagtgatagtgatgatgatggaggtcgaggtggtgcgggacgcggtgcccaaaaccgatacttgaagaatcaagaagatgacagcgatgagtctgatacaggtcaccgtgtgatccgctccctgagggacaagcgcaacgaggagatgagatctattgttgatcagatgcgtaatgcaatgaagatcaatgactgggtgagcttgcaggagagttttgagaagcttaacaaacatcttgagaaggttgttcgtgtcaatgaatctactgaggtaccaaaaatgtatatcaaagctcttgtgttgctggaggacttccttgctgaagcccttgcaaacaaggaggccaagaagaagatgagcagcagcaattcgaaggcattcaatgcgatgaggcaaaaactcaagaagaacaacaagcagtatgaagagcagatccagaagtgcagggagcatccagagagttttgaagatgaagctgcagatgataaagatacggatgatgacgatgttgatgaaagtgatgcagagattgaagatcctgataaaatagctatgtcagaatcagaagaggaacaagatgaagaggatgatgacaaggatggttgggaacagaaaaggagtaagaaggataagctgatggataagcagttcttgaaagatccaagtgaaatcacatgggatattgtcgataagaaactcaaagagattgtagcatctagggaaagaaagtttgatgttaaccctagtctacttgggcatatgccagtcaatgtgtggaagaagtgtgtcaataatatgcttcttgtgcttgatatactccagcagtatcctaacattgtagtagacacctcgtttgagcctgatgagaatgaaactcaaaagggtgcagactacaatggaacaatacatgttgtgggtgacctggttgcattccttgagagactggactctgaatttttgaagaccttacagtgcacagatccgtacacaaaagattatgttcagaggctcagagaggaacccctgtttctggttgtcgcacagaacgtccaagattatcttgaaagggttggaaacttcaaagctgctgccaaggttgcactgcgccgtgttgaactagtttactacaagccccaagaagtgtacgatgcaatgagaaaactcgcagagcagcctgaggactgtgtggacgatgatgatgcagaggctggtgatgaacataaagcagtagatgacaatagaggaccatcaccatttgttgtgattccagaggctgtgcacaggaagcctacttttccagaaagcggtagaactttgatggatggattgatgttcttaatctacaagtatggggatgaaaggaccaaagcccgtgcaatgctgtgtgacatatatcaccatgcgatctctgatgagttttcagtggctcgcgacttgcttttaatgagtcatttgcaagatggtattcagctcatggacatatcatcgcagattttattcaatagagtcatggcccagttagggctgtgtgctttcagggctggtttgataaatgaagcccatggttgcttgactgagctctattctactgggagggtgaaagaattgcttgcacaaggtgtgcaacaaagccgataccatgaaaaaactcccgaacaggaaagacttgagaggagaagacaaatgccttaccatatgcatataaacctggagcttttggaagccacacacttgatctgtgcgatgctgattgaagtccccaatatggctgccagcacctatgacaagcggagacctatgagcaaaacattccgaaggcttcttgaagtgagtgaaaggcagacatttgttgggccgcccgagaatgtgagggaccatgtaatggctgccacaagagccctcaacaagggtgatcaccaaaaggctttcagtgtcataaattcgttggagatttggaagcttttgaggaacagagagcatgtccttgagatgttgaagcttaagatcaaggaggaagctcttagaacctatctcttttcatactcgtcttcgtacgagtccttaagccttaaccagctcactaccatgtttgatctcagcgagcagcatgcccacagcattgttagcaagatgatgatgcatgaagagcttcatgctagctgggaccagccaacaaagtgcatcgtattccatagtgtggaccaaactaggcttcaggggctactcttccagatggcagataagctctcggtcctggtggagatcaatgagagggcatacgaggcaagaactggtggtgctctcgagggggtaccgcccaggcgcaggggcgagggtcaggataatatgggaaagtggcaggataactttgtctcgtcacaggggcggcagggtggtggcaacaggtttggatactccagcagaggtgcagtatctggtcaaagtggtggtggacaccagagggacaggggcaatcagggttaccgcgggggctatggtggcgtttcaaggtttcaggatgcaaggggtcgcaaccagtctaatccatcaggcagaggtggtgatggtggtgcacgcatggtgaacctgaacagggttggtagagtttagaagtgataattttcagctcaagtaatcctgaaattctcctaaaagccaagttctgaatcactgcattttacatagtttcctgttctgggctgagtcatctacctgtttcctacatttcgttgtagccttttaaattaaggggctaagaaattgaactaagagtttggtactgttttgtgggagtgtgacgatgtattcgctccaatatttgatatctatccgtgacacttgctataaactgtacttttctttgtgttatgtggtgttcattgggttatgaaaaagaaaaaggcatgtcgaagagagaagatcgttattctattcgcgttcggtaaggtaagattgtgtgagcctatct

SEQ ID NO: 23698 - DNA, 1622 bp, Zea Mays
acctgggccgtcagactcgccgcgcggcgcggccccgaccacatcgccgattcctcgtttcctccgcacccgcacgcttcccacccgctgccccgcgcccagccgtcgccgtgatcgccagagcgttcctctgccgagccgttcggccggtccactcccgcgaagcttccagtagaggcgaccttcggatcgagtctcggccgccgaggagtcgaaggccatggaagtggtggcgtcggcgccggggaaggtgctcatcgcgggaggatacctcgtgctggagcgccccaacgccggcctagtcctcagcaccaccgcccgcttctacgccgtcgtccgccccctccgcgacagcctccccgccgacgcttgggcctgggcgtggacggatgtcaaagtgacttcccctcagctctcacgggaggccacatacaagctgtccctaacgaagtcgacgctgcaattgacgtctgcgagggaatctacaaacccttttgtggagcaggccatacaattctcggtagcagctgctaaagcgaccattattgataaggagaggaaggatgtagtagataagttgctgctgcaagattgaagcacgcggtctccctcttactccagaggcactgctttcattgcctccattctcttcaatcacatttaactcagaggatcatctactccatcaatggttggatctgtgaaacggtggcagaagtctgactctgagaaatgcaaagatacatggagtaaactggcctttgccaattcagcgctggagaaccaactgcgaatcttaaaaggactttctgaaaatcaccgagaggcatatgagtcggtagtgctatcctgtagccatctcacttatgagaagtggacagaggtggctactaaccaacatcaagaattaattattaaatcattgttggctgcaagggatgcttgccttgagataaggcttcacatgcgagagatgggcatagcagccggtgttccgattgagccagattcacaaacacggctacttgacgccactatgaatatggagggtgttttacttgctggagttccgggagctggtggcttcgatgcagtattctcagtgactttgggggatgcaagtaatgctgtagcaaatgcttggagctctgctggcgttctgccacttctcgttcgagaagactgccgtggtgtctcattggaagatgctgacccaagaacaagggaggtatcggcagctgtatcgtccattcagattaattgattctactgttaatattctatttatgtattgtgccgaatgctaggaggtacgtggttaaaataagtgctgcacttgcagcaagttagcacgttgtttacaatgactgttcatgagtgtagaaaataaggaattcaatggatttccatggaattagtgcttgtagttatagctatggaatgtacgtgagaaaatgtcaaggtatccaacaaactcatactgtaaaccttgtatttgtaacttttgcggtttgtatgataattcggcatgtgttaatgtttgatatctgaccttatcccatgataggtagtggtcgcggctataagtctgtccgtggtcagtggtcagtagccaactgttt

SEQ ID NO: 23699 - DNA, 3420 bp, Zea Mays
cccatcagtgggtttgtaacacaaatggatgaagtgaggagagttaacaaatggatgaagtgaggagagttagcagaagatgcagcactgtagactgaccaaattccccccgcgggcgacgaagaacatcactgtagggctgatttggtgaccggggatcccgaggggaagaaatcctcttgctattcaaaattgaattgcaaggggattcctcccccatggatcccctagggatccctaatcaccaaatcagcccgtagactgaccaaattccccgcgggcttgcggccaaacctttcaccgaggccgcaccctcccgtgcatgtcactcctgccggcgccgggcgtcctatggtagagactcgccgctcagcgcggaggagcggcagcggttcgctcccggccgacggagcgccgtccgagccggcatccagctcccctgcaacctccctccccccgcgggagaataatggcctggttatctctaatgacaacacattgaagcagaccgtggaggtagaaaaacaggggaggcaaggtaaggaggtcttagtggttcatgaattggatgagtcgaatgaggattctgggtcattggatgagccgccgggttggcttcctgacggttggactatggaggtttgtcaagaagacaatggctccatctacaagtactacacttccccaatgtccggatacatgttcacatcaaagatggagacattgcattatcttttctcaggggtggaagaacgcatgttggagttgcaggcaagcgccgaggacaacgagcttcatgagtcacatacatggcttccacgtgggtgggtgattgaagtcagagccggtgggaagaaaatggacaaaatgtacaaggtaggttggagatttgttgcacaataacatctagggatgcaaggaggcttgtccgtgaacccactaacagccttaatttttgaagttctccgcggaacccacaaaaatcaagcatatttgcaggttcacggataagctcacctgtgtgggcctttcattacatccatatggtgtggtactttactgcaactatacatattggatataaaaaatacaacagtcttccaataagatgtagctggcaagacaagatgttcccttctaaaagcgagtacaaaaccgaaagaacaattggggtaggtattggctgcaggcacacactggcatgcttggtcaggagccaaggtgatgaagcttgatgtcacctcaaccttggatggtggctcatagcatcctctggttttaccagatagatgcagaggatacatgtcatggagggttaggtgagtgaggcaatgccacagctgtggatggaatggaagaagatatccaaagaaaaaaaataaagcaggagttcacttgtgactctctcaatgcttattattttcagctcaacataaaccatgatatcaatcaacattgtacacgtagttaccatatcaatggaattctagggttcaaggggatcatctgcagttgtttgaatggttgaaataaatcttctcttttataattcagggttgaattttatgtctttaagagtgggtgttgttagaatacaagtgaattgcccatctcttctatcagcttgagcttttgggttgaattggttggataaaagattgaagtctcgagttcgaatcttggttagcgcaattaaataaaataattgttgcttgcttttattccacgtctgaggcttgagagagcctcggcatcaggagtgttagaatacaagtgaattgccatgacttaatttgtgtaggggcaggaggtataaatctttgctcgttcagaagaaagctgttaggttgagagtgaggaggaagttttagttacatggtggatatgttagttccttggaggaaattgaagtcacacaaacgttagatgagatatgagcatatgacatttctttttgttttgaagcttatgccttctgcagttttatgttcacctacctactgggcagcgattcttatcaaaagcatggtggatatgttagttccttggaggaaattgaagtcacacaaacgttagatgagatatgagcatatgacatttctttttgttttgaagcttatgccttctgcagttttatgttcacctacctactgggcagcgattcttatcaaaagcagaagtattgcactttgttaataagggcatggtttctacatgtgatatggatgtgctgtgcgacactagcactgatgataatatacttgctcatgtggaattcaatcctgatggtttaccagatggatgggtgaaagaaacgatatctagaaagttcaatgatggaatcagaaaagaccagtactataccgatcctgttagtcaccgtgtatttcgcacgcttaagtctgtattgagctaccttggaaccggagaaatatctaggcattcctatttaccaaggagaaatgtcattgacatgtattcatttgataagtgtgcagatctgcccaaaagcatggtgaaaagattgaaagcaaaaggacaagcaaagaaaaaattcatgagagcacaggttttagacaaggacttatctaatgggcagacttcaaatcactgtgaaggtgctattgggttaactcaatctgacccggaaggagataagtttggatctatggaagcggcatgcgaaaaggggaccagttcagagactatgaaacagcgaatagggaggccaaagaaaatcttgaagcaaacaaatgatagcatttcggatcgtgacaagggttcacatcaggagcacatcgaggccaaagaggaagttgatatctgtggtgggaaagacttgacgcatttgaaaactctggagcgtaccgaggctcagaatagcacaatgataaccaaggaagtaaacaacaacgacacagcagagaaaaacctatccaagatagagggagacaactcggatctggtaaccggcacgggtttgcacaagcaagagaatagcagattaactgaagttagtgagaaggcaacattctccacaggttacaaattttacaagaggagaagttgcaataagacatgaggttcaagaaaagcataaaattagatcaagttatctggtgagttttatgggtcgccgcccaaaagttgtatcatacttcttcagggaacaaatggaaccaaagttgatctggtgtgtccaggttttcatttttttcgttttgtttattcccttctgcatgcttctgcttctagttgatgtggagggtgtctagtggaagtaatctgtttgattcttgtatcataggaattaatactggttgtagagagcaggatttaacacttgacagcaggagcatcaaaggaatcaaatttaagaagctttcgttaacctgagggctgagacataaatgccgtcaa

SEQ ID NO: 23700 - DNA, 2545 bp, Zea Mays
acccgcaaagcacagcagcacacccaccgcggctccagaggcggaccccatcggcaaccggctctgtccggaaagcccccaagcgcaaccgcttcttcccggaaagggcaaaaaggaaacgcgcctcgtccggtcggacggaagcccttcttcccctccccatccgccgccactgccccgcgagattcggcgagaattaaaggcaccatatcctgcctcctctctcgtctccctatttctctctcactccccacctcccgcgcattccgcaccgataggtaggctcacccggactcgtctcccgctcccccctcccttttcccaaaaccctagcgggtttcgacctcccaggccaatcagatcgaccgctgccgcgcgcaattgttgagccatcgaggtttgacttcatactgccctgccccaaaggatcaagatcgcatcaccagtggaagcctcgggggctgctaagtaacgttatctgactggctgactgcgccattgataaccttgggttacaactgcacaggaggctgcgacccacaggccatccggggctcattgcagctgacgaagcccctgcagactactccccgacaatatggcgacagcgacaatggcaaccgccgcgggggccgcggcactgctttactacacactgaaccgccgcctgcagacagagaggctgaataaggaaggggagtgcagcgatagcagggatgtgacacccagggccgcacagggttctcccagcaggagccgtgtatcgcggagggacgtccgcgcccctgccacctggcttgagactatctcgacgctgtcagagacgctgcggttcacgtattcagagacccttgggaagtggccgatcggcgaccttgccttcgggatcagtttcctcctcaagagacagggaaacttatctgtagcaagcatatacgctggaaatgatagtgtggagctcaaaggagctgaagtaattgctgatttaaagtatcttctcaatttgctgacactttgctggcatttctccaaaaagccattcccgttgtttttggaggcgactggctacactacggaggatgttcttatgcaagaacctaaagcaggaattttgaagccagctttcaccattttgcttgatagagacaaaaagtctatacttctattaattaggggaactcatatactaggatatgctcattttgggatggttgccgctgctaggtggattgcaaagctctcagggccttgtctggcacaagcattgcagatgtacccagacttcaaaataaaggttgttggacattcactgggaggtggtacagctgctctgttgacatacgttctgagggaacagaaggagtttgcctctactacttgtctggcatttgctccagctgcatgtatgacatggaaactggcagagtcaggagtgcattttatcactacagtcatcaatggagctgatctggttccaacattttctgctgcgtcagtagatgatcttcgttcagaggttacagcgtcagcttggctaaatgatctccgccaccaaattgaacaaaccagaatcctaagcactttttatcgttctgcgtcagccttgggatcccggcttccatctatggcaaatgctaaagcaagagtagctggtgctggcgccatcttaagacctgtatctactgggacgcaggttgtaatgaggagagctcgcagtgtagcacaggcagcatggacaagaccagcactgcaactgtcctcatggacttgtattgggccaagacggcgaaataatatatctacctcaactgtcacatcagaggaaataatagcatctacaggcggtggatctgaatccacttcattgttgactgaaaccactgcggaaaccacagagacagttacatcagaagctgtatcagaagtggttcagagttctgtttctgtggcggtcgatgctgttgacttggtagatgacaagggagatagcgatgatgacatcgtcgatcaccatggggacgaggacaggatgactgatgtggagctgtggcagcaacttgaaagtgagttgtaccggaagagggagggagaagaggatgacatagccgaagagatggctgaaagtacaattgctgaggaggtgggtggcgtggctgaagatgtgctcagcgagacaaaggaagtgcataggttctaccctcctggaaaaatcatgcacatattattctccagcagggaagaagcagatcgtggagaggagcctgaggatgatgttacggatggggaggcacaaagcagcatagggatcttcttgacgccaagatctctgtacggcaagctgaggctttcgaaaatgatgatcaatgaccattacatgcctatatacagaagaaacattgagcagctgatcgcggagcttgagaaggattcctcggatcaaatagggtgcgtcaggtgtagttgaccgttgtaagagctgatcaaatagggtgttataggtccgacatgtgtatatacttgcttaagtttaccgcttcccttctgg

SEQ ID NO: 23701 - DNA, 3383 bp, Zea Mays
cggaacaaatgacccagcgaaaaaaccccaaccccgaaggcaaggggtgggaaaaaacacgaggcgggggtgggggatagaaatacgagagcgagcgagcgagcgagcgagcctgcagcagcgagagggacgagaggcgagagagataagcaagcggcgcgcgttaaccctagcccccgtctccgctccgctccgctccgctagcgctcccgcccgccgcctcgctcgccggaggattcgtacgcgcgccgggcccgacgacctgccgcgccaccttcgcgccgccgccgccgcgcgcgggcgcgcctcggtcgttgcagttgtccttcaccacagcggagtgatggctgttgtcaacccaaccaaccttgctattgacgacgatgacgacgatactcccatttcattcaagaggacgagtaactctacgaagactgccaggcccaccccttccaagcatgaggggtcgtcaggaggtaatggtgcacctgttaggatccccaaacctgtgtctcccaatccgcagaagaacggagccaccggggcttcaaggccgttgcatatgaagccaccgtcatccagtccaaaccatcgtccttctggatctggccagccaaacagtttggcacaacatagttcaaaggctaatagcattgacatgagtaaactgaaaagacctctcgtcaaagatgagagatctgatgactcagatgacgaggtgccgattgggttaaggagaaaggttgaggagaagaagttgaagggagttgatactcgggttcagaagacagatgactcagatgacgatgataagccattgggtctcaagatcaactcatccagaatgtcttccaacagagtgaataagcctgttctgcagagaactgtaccaaaggttgagcagcctgatgaagattcagatgatgataaaccattggcaagcaggttgcccagtaatgccggtccaaaaagtggaggtgatgtctctgaggattcagaggatgagaagccactggctgccagattttcaaaagttgctggtagtggaaacccaaaaatagcttcttccagcaaagggttaaccagtgatacaaatggccaacaaagtttgggtaaaaggcctctagacaatagtaatcaaacaagttcagctcttaagaaggctaaaccttcaaacgtttcagcttctgcaatcgttagaagagaaatcaagacagatgacaacacacctcttgcacaaaggctgaaaatgggagagtcttcgaaaggcaagtcatctgcaaagagtgtctttaagaagagtcctgcttctgtgaagaaggacatcaagaaaatgaaagggaaagggaaattaaagaagaacatgaaaaattctcagttctcaaagataatgaaggtcccccctggatctggtggaggaaagaaatggactaccttggagcacaatggtgttattttccctcccccatacaagcctcatggtgtcaaaatgctttacaatgggaaacctatcgatctgacaccagaacaagaggaggttgcaacaatgtttgctgttatgaaagacacagactatgcggccaagccaacattcattgataactttttcactgattggagaaaagttcttggtaaaaatcatattattaagaacttcgagctttgtgatttcacaccaatatatgaatggcacctcagagagaaggagaggaagaagcagatgacaacagaggagaaaaaaacattgcgggaagacaaattgaaacaagaggagaagtacatgtgggctgttgtagatggtgttaaagaaaaggtcggaaatttcagagtagaaccgcctggcttgttcaggggacgtggagaacatccaaagatggggaaacttaagcgccgcattctaccaagtgatattacaataaatattggaaaaggagctccagtccctgagtgcccgatacctggagaaagttggaaagaagtcaaacatgacaatactgttacatggttggccttttggaacgatccaattaacccaaaggatttcaagtatgttttcctggcagcaagcagctcactgaaggggcaaagtgacaaagagaagtatgagaagtccagaaaattgaagggtcatatacaaagaattcgtgagaattatacaaaagatttcaaaaacaaagatgtgacgaggaggcaaatagctgtggcaacataccttatcgataaactagcccttagggctggcaatgaaaaggacgacgatgaagctgatactgttggttgctgtacgctgaaggttgataatgttacatgtatgcctccaaatcagattcagtttgactttctgggtaaagattcaataagatactttaacaccgtagaggttgaagagcttgtgtacaaggcaattgagggtttccgtgctggaaagaagccaggacaagatctatttgacaagattgatacatctaggctaaatgctcacttgaaggatctaatgcctgggctcactgcaaaagtgttccgtacatataatgcttccataacattggacggaatcgtgagttgaaaagaatcttgtcttactgggtttcatttgtccattctttcgaacttcttaggtttgcatggacacttagagctgttgatgtagatgtattgttttcttctggtattttaatgtttataaatgttacttgttctacagctcaacttaatgcaaataagtaattggtcaatgttacacagtttgtcatatcttcattttttgcacctctgattttttactttctgatagcatgtaagcatgctattgacttattacgcatgttcatgtgactatcctgttagaatggtctaagtgtatatatacttgtgctgatattacagttgcatgaagaaacagaagatggaactgttttagaaaaaatcgctgtctatcagcgggcaaacaaagaggttgccatcatctgtaaccatcagcgtagtgtctcgaaatcacatgagtcccagatgactagaatgaacgaaaagattgatgagttgaagtcccagatggaggagctgaaagcagacttgaacaaagcaaagaaagggaagcctctaggctatgattcagaggggaagccaaagaggaacttggctcctgaagcgtaacacatctcaaccaccaatacattttgttgtattttgtttttgtgtgttagaacaaagagtagggtaggcaacctgacaaaacctacttgcaggattcaaaagaaggttgcaacacttgaaggcaagatagagaagatggagatggataagaggataaaagaggatctgaagacagttgcgcttggaacgtcaaagatcaactatcttgatcctagaataaccgaggagag

SEQ ID NO: 23702 - DNA, 2126 bp, Zea Mays
ggaagggttgccgcgtacaccccagttcttgccagccgtatctttctaggtatctgtgcattcctgccctgctgtggttggctaggtaggggtggtaactggtaagaacagcaagaaccaaccatggctgctgatgttgggcttcggttcaacggctggtcatactcggatttgccttacaacgaccacaatgcacaggattcatcagttcaggaaatggtgctcaaccatggctcggtgtcattcggtagatttgctgcagaatcattgtcatgggaaagaaggtcagtgtttgaacataacagacgccaagaggaactaagcaagctcacagcccctggtttggttgcacaaaagaaggctttctttgaagaatattacaagagggcaagacatctcaaggctcagggggtattgcaccaggctggagccgcagtggaggagaacgatagcagccaggcagatgaattgccagcagctatgtctgaagatccagtagccactgctccaagttctagttttgagccttccactgatgttgagagcaaatgccaggatgctcatgagcacgggtacttgacatttaatcctttattttctcagacagcaagcttgccaaacattcaggaggagagttctagctctggtcaaaagcatggattcagttgtgaaactattgagagaaaagttcttgcaccaagacgtgtggcatcaaatgataatgatcaaagcaatattgctggatcaaggattgtcttaccaatagtcagtctacaatcagaatacctcaaagctgatcctgagaagagtgaggcaagcaaaaatgtacctattattaataggtcaaaaaaggtatcaaaggacctggcaacttctgttatcagcatcccaagggtagatttaagaaggaattcagaaaacggaccctctcgagacttggaggatccattccacaagagagttgagatgaaattgcgtgctttatctgatcggatggatgctgacagaactacggcctctagtagatcatcctcttaccaacctcctgagagagctatgacctcagctagatctgcatatcaagatagactagcaatatcttctagatccagtgtgtctcagaacactagtaaagccttggcaccttctaaattagctgctcaagcttcccataaatttcttaaaggtgtgcagcgtttagatgccatgccccgtggtattttcgttaataaaggatcaagtgcttctcttgttgcttcttgcaacagtagtgcaactgggaagttgtctgccaagattttggtggcacccagttcgtctcaagttggtgcaaagacttccaggactgctcaggttacaccgaaaagagcagcaggacctaccagtgtaaacaatgtgtcacacaataaaaggaagcacacaccggtcgcattgggtgaaaaatacccaaagagagagtatgtgcgcagatctgcacctccaagtgcaagaagcagctccgagaatctccctcgtgctgcaaaggcgcctaagatatcaaaagtgatgaatgcggtgtccaaggctgaagctgtgcagaagtcaaaatcatcaagcaatcttgttggaggaagaaatttatcgacaaagcgctccgcaaactgcaatgaagaaaacagaaaggcgatcccgtcgcgcaaggtaaacatggctgaatgcacgaggagcaatctgaaaggtggcccatcactgactaagaacaagccacggcaagagaggccacggtggagatgattgccaggcgagagaagccacgaatccaccacggtgattattaaatagtcttgagaagcatcgatcacctggagcctcaaacgtgtacctctggttagttttgcaacacgaaattgagtgccggccatcaaaagcatacagcaccaagacttgccttgtcttgtagctgtagcatacagtggctggctgtttgttccccttgttgttgtaatccaacaacagtcgcaagagaatatctggatgtgcaaggcagtatcgtgccgctgctgtgctgtcgttacggcccgtgacatttctggccgtcgcgtttgttgctgctttgcgaaggggatacaccggaaccatttgaggtt

SEQ ID NO: 23703 - DNA, 4225 bp, Zea Mays
ccgccacccccgcccaaaaaagaaaaagaaaaaaaacaccctcccttctccttgcttgtcagctcgcacccatggaaccctcgtcgccggccaccacggccaccttccctgctgccgtagaagaacatgagacgtaccctcccatggtgtcatcctctctattcccacttttccccttcgccgcctccacctcctctgctccccccgccgaatcccaatggctttcaaaccctagcttctccttcgatgcctcctccctgaacatcccggctaccacctcatcgtcgctcccgtcgccgcagagccactcgtccgatgaggacacgccgctgcaggccgctcctgcgaaatacgagctggtgccttcttcgccgtcctccgacgaggagagggggtcgcggaggaagagaagtgggaggaggaaacggaagcgcgagaaggagcgctatgatggggcagcgacatcgcggaaggctgggattcgtgcctgggctggattggagacgaagccagccaaggattactatgtcgacgcgaagggcgaccatgataacctggcttttggatccctctacagaatggatgttgcacgctacagatcccagaatatgatggaggcatttggtttaaatcatctgaggtttggttcatcacatattgatttggattcagacttggatggaatggataacaaagtaagagctggaggccgttactattctgcaaaaaatgcagtttctgaaagaaataaaggtttcaaacatctgaaaatatttaagggaaacacctctgtaatgctcgctgaagattttgtcccatttggtacacaatcacttcctttgaaaagcacaactgtggaacaagagctagaggagtcttgggaagatgaaatacttcgccggactagggaattcaataagatgtctcgtgaacgccctcacgatgaaaaagtttggctggctttcgctcaatttcaggacaaagttgctagcactcagccacaaaaggctgctcgtttacaaactaccgaaaggaaaattagcatattggagaaagctgtggagctcaatccagatagtgaggaattattgctttgccttctgaagtcatatggcaagagggacaacactgagactctattgactaaatgggagcaaatacttacgaagcacccagatagctctacgttgtggaaacagtatctgcttctgtgccaaggggaattctccagattcaaagtttctgaaattcggaagtcctacgtgtatgctgtacaggctctatctgcagcttgcaccaagttatgtaggcaggataataaaagcatggattccaaatcttcatccttagttcaactagaagtggggttggtggatatatttgttaatctgtgccgatttgagtggcagacaggacatcgggaactagcaactgggctatttcaggcgcagatggagtttagcttatttgcccctcctttgtatctgacaacaagcagtaagcaaaggctctttgaacacttctggaacagtggtggtgccagaattggggaagatggagctcttggatggtctgaatggttagcaaaagacgaggagagtagacaaaagttgtctatgcaagaaaattcacaagagactgaaacaggaggctggagtggttggtttgatccttctctgggtaatactgagacaaatgatttatcaaacaaatcactggaaccatcattgaccgatggaaatgatgctgaagaccttgatgctgaggactcaccagcacaagatgatgttgaatccttgctgaaaaagcttggtatcgatgtagatgcagagtccaatagtgaagttaaagacgcagaaacctggaatagatgggcctcaatggagctgtcacgggacaatcagcaatggatgcctcttcatgaaaattatggatcaattcattgtggtgatgctccatctggggaagacaatgaccagctttccagagtaattttgtttgaggatgtaactgagttcttgttttctctatcttcagaggaggcccgcttttctctgatgtgccaatttattgatttttatggtggcaaaatctcaagatggacatcaacaaacagtccaagttggctcgatcgaatattgagcttagagaatattacagatgacatcctggaagatctaggtgctgtatctgacgttgtaaacaagaaccaaagttcatatagttgtaaatataaattggaatcattactgggaagcatgtgtgacctttcacaaaggccgggcctgatgaaatttctcaaaaatgcgatactgcttctgcttggtgttttccctcgtaatcatatcctggaggaagctgttcttgttactacccaaatgtttactcctcaagagaactcttcctccattcaaactaatgcatcacgggctttggccaaaagtatgttgaagaaagaccgacaggattttttgctttgtgggatatatggacgaactgaggcaatgaatgggaacattgaacaagcaaggaagatatttgacatggcactgttatcaactgaagcaacttctgaggatcttaggaagaaggttcccatcctttatctttggtacgccgagatggagattacagtgtccgcttcaagaaacaactctgactcaatgcatcgtgcagtttacatcctatcctgcttagggagcaatctaaaatattctccttttgttggccctatttcaaggcttcaggtcttgagggctcgccaagggtttaaagagcagattagaagctcacgatctgcattttcctgtggtgctataaacaaagaatcagttgctctgatctgctcagcttctttgttcgaaagcatgacaacaggctgttactcgggtcttgaagtgatagaggagacttttccaatgacattttcagagagcaataatttggagtgtgaggatttgtgggtgtactacatcaaaatgcttcaaaaaaatcttaaccaattgaatctatcaagggtctggccaagcatatcacgcggagtgcacaaatatccctacaatccaaaatcatattcagcgacgttaaccctgagttatctttacagtgtatccaacaatctccgtctcacactcgacaaatgtagtcaaagggacccttctgtaatcaccttgctctttgctttgtcctttgaatggggtaaagctggatctgacaatagaatacacagcctgtttgagagagctctagctgatgataagttgcagaagtctgtcctattgtggcgctgttatctagcctatgaggcagaaatagtctgcaactcttctgcagcacggcgtgtgttcttcagagctatacatgcctgtccatggtctaaaagattatggcttgatggtttccaaaagttgggctctgttctgacattgaaggagttgtcagatctccaggaagtgatgcgtgacaaggaattaaacatccgcactgacatctatgagatactcctagaagaagaaacaaatacatgattctggtttgtgtgaagatcccgaaactgccccgcatgacatgctctgcagttataagtttccaaaggttcatgaaatattggttctgcattgctgttttgtggcctataagcatcgaactctgaagtctcaatcaagaacctgctatctatcatcaaataagatggatgggaagtacaatgggcatgccttggattgacaatcttgccaaatatgaccatgttttactatttttgttctttcaagatggaccttgttggctgccgttctgaatatctcacatgattcattatcggtatatagatagaagtggcttcagtgggcccttcaactgcacgataagatcaatgttaggaaggcctattacaaattcctgtacggaaatcatgccacgaacaaaaccgaaacatcaaaagcagcatatatttttgtttgactatcagtaaagcaactgcagccaggttaggggatcctgcagtgtgcttgagtgtccaaacaaaaaggcttcgaatgtatagcttcacctggcgttttgttgaaggtccccaaagttatggactttaagatgctggtatatactggctgggagcacagataagagaagtagcagcactgacatgacggcctcagctaacgactgccttgccggacagactcaggccgtgagccgacacggcggggccgaacgcgaacgggcc

SEQ ID NO: 23704 - DNA, 568 bp, Zea Mays
ttgctatatataggccttctcgtctcgtcatccacccgctcgcccattcccctatccacgagcaaggcacagcagcaggggagtcggagtgacagccgcccgcaggatgccgacactaaacctgagcaccaacgtgccggtggacgcggtggtcgccgccgacatcctcagggactgctccaaggccgtcgccaggatcatcggcaagcccgaatccggacacaacttcggcttcaacggatccacattctaagtcgactccagcagaaaccgaagatgatggtcgctgcgtccaaacatccagctcaatacataccaacaccactacatcaataaacgctgatcatgtgtcatccatcacccgcacgtccatggaaaatcccgctcgagcacgagacgcaccaccactagtttatgggctttgtactttcacctgaaagcatgcagtgcatgatggcatgtatctgattccaaattttattgaacttcattttttcagtaatgcaattctacagccctaaagaaaatgtaggcgggaacaggtgtaacaggaaattgcactgacgcg

SEQ ID NO: 23705 - DNA, 2771 bp, Zea Mays
cttcttcagtcagagcagagccatcacggcatcctcgctccctcccctccctcccttcctcctttcccacccttctctctctctagccgccgtgctctccttttctatctccacggcaggcttctccctccctccccctcatccccattgcctttgggaggctatatagggcgggactggactggattggattggaaagggagctcccggcgagtttgaacccaccccaccccacttttctcgcctcgtcccctcgcgcttcccgccgccgacgccgcgtctatctggtctaggaccaaatgccgcgagatcttcgcgcgtgacgccgtcccccccgccggagccgccctccgagctccgggccacggagcgcttcgtcccggatctctctggtggctcaggacagtagaaaggaaaggagaaaagcttgttgtgtctgtgtgtgagctgcagaccccgagaggatggatcagtatgaggtgctggagcagattgggaaaggagcatttggttctgcactcttggtgaggcacaaggccgagaagaagaagtatgtgctcaagaagatacggctcgcgcggcagaccgaccgcacacgccggtctgcccaccaggagatgcagctcatcgcgacggtccggaatccgttcattgtggagtacaaagattcatgggtggaaaagggttgctacgtttgcattgtcatcggttactgcgagggaggagacatggctgaagctatcaaaaaagtcaatggaaaccatttctcggaggagaaactttgcaagtggcttgtgcaacttctcatggctctcgattatctgcacgcaaatcacattcttcatcgggatgtgaagtgctccaatatatttattgccagagatcaaagcatacgccttggtgactttggtcttgcgaaaatattgacttcggatgatcttgcatcctctgtggtaggaacaccaagctacatgtgcccagaacttcttgccgacataccgtatggtactaaatctgatatttggtctctaggatgttgtatttatgaaatggcagctctcagaccagcatttaaagcctttgacatgcaagccctcattagcaagatcacaaagtcgatagtatcgccgttgcccacgagatattctggttcctttaggggactcatcaagagcatgctacggaaaagcccagaacaccgaccaagcgctgcagaactgctgaagcacccacacctccagccatacgtgctgcaggtccagctgaagtccagcccctctcgcaccacgtccccaatctaccaagctctgacggacaaagtgaagaagatgacgttcgtgagcgacaccgccgattccgcgaggaggagggctgcgagacggagctctctggggagcgagaggaccgtgacgttctgcaagccatcccccgagcgcaactccgtcagctccacgcggagcatcaaggagtacacgacgacgacccagagtgccagggagctctctgtcggcagcagcctgcaggtcgacgacgaggtcacgagtaaggctgttgtgacgaagacggcaggcgttctacggactcccagcaagagccgtgctccggcatctaagacgttggtggcggctagaagccggctggatcctccgaagacgtcctatgccagaacgaaccgtgccgagttggactcaaggacgcctctgagcaagagcagcgcgcggacggcaaggagagcatccctcccgctggcggcgtacagagcacccagcggcggccgcgccggtagcttcctggagcagctggactcgccggacgtgtccgtgaacgcgccgcggatcgacaggatcgcggagttccccctagcctcgtccgaggagcccctggcgcccatgaacaagaagctgtcctgctccacgcctcccttcagcacccggtccatcacgaaggacaagtacacggtgcaggcggtggcgccgcgcgcgggcgacggggacaccgccgcgagcgactcgtcggggcgcaacgccacggctgcgtccagccgtgggtccagcgactcgtcgtcgaggcagcagcagcatcacttgcagcagcggttcgacacgtcgtcgtaccagcagcgcgccgaggcgctggagggcctgctggagttcagcgcgcagctgctgcagcaggagcggtacgaggagcttggcatcctgctgaagccgttcggccccgagatggcttccccccgggagacagccatctggctcaccaagagcttcaaggagacggcgccgtcgtagccgtgggacgagcgggaggaaggggtaggggtaggtaggtagctgccagttttgtaacgtgcgatgtactactagctcaggtagtttaagctaatgttaggacataaaagttctcgtgttgtattagctattctccagtttccagtaggaattcgagcgatcagtggtagcattagagaggacactgcaagctgagcccaggatctggcaaagatcttgaaaccttgatgtatcgaatcatgtgtcacttgcaatgcaatgtgtgtatgtagtacgtactaaacagtctaaactggagggcttggccgctcgggatggatatcgagtagcagcaggcagcaggttggtcgtccactccagttgggagaggtctacgtctgccactcttgaatgtctcaccgtgaccgatgtgcatgtacatgtacatgggagacggtatgcatgagaattcagatacacgtcacgttttcacatgatgccgtg

SEQ ID NO: 23706 - DNA, 165 bp, Zea Mays
gattcttgttcctacgatctaattacgcagcgtataatattattacacagttcattcttatgtttggtgtgatgttaattttgcctataccatgcttgtttgtattgctacgactagctcgaggttacgagtcatctgaagaatcaccctggtaactggaatctc

SEQ ID NO: 23707 - DNA, 5262 bp, Zea Mays
aggagcggcagttagggttaggaaaccctaaccggccactaccttcccaaacggcggcggtcagcacctggcggcggtgggcgcgaccccggtccccggcctcccctggcggtcgtacgggcagcaccgacgcgaggccactcggtccctcggcgtaggccggcgcacgcccgcggcggcatggcgtcccggtgacgctggcggccagggcgtagctctctggcggcgcgggcgcggctgtgggtgtagccccggcgtcccacggcgtggacacgaggcgtggccggtggagccccggtgcagcgcggtcgcgcacccggctcaggccatcccggcccaaatggcgcggcggcgccccctggtggccggatccgcccggcatggccaccccacaaggggcgggcgcagctcggcggtccccctgcgcaggctcgcgcgaaccggcgcggcttcctggagggcgcgcggctccctggtgcgatgaggggcggcggctggggggcttgggctccctggtggcgcgcaggcgcgggatcagcccgactcgggcggatcggctactgccacggcgcggagggtccggcctcggcggctcggcggcccccagccccggctacctggcgcggacggtccggccacggtggcacagggcgcggagggtccggcctcggcggctcggcggcccccagccccggctacctggcgcggacggtccggccacggtggcacagggcgcggcccctgttgacgcgctagcgcggtcccctgacggcggcgcgcgggctcgcggccctcctgcgcgcgcgagcacggccccccggcggtggtccggttgccaggcgcggcgagcccgctgtgtcctcccggcatcagcgcgggcgtatggcccctcggcatggcggccccctcgacgtgcaggcgcagtggccctgtcaatgcgctgccccgacgaccggtccggcgcgggctaggccagcgcgtgtgcgcagccccgacggggcgcagtaccatgggcaggacgcgtgcgaagcccccgcagaacccctggtggcccgtggccctgatccggcttggaacatggccggtggccccgatgagccatggccgtgaatggcgaagcaaccatcagaaacaagaaagattaaacaaaatagtgataatgcgtaccacataatccttctgcacatttctgtttcttaacttctgtgagcgattccttctctcagcaacttcaacttctctctgtttctcacgagcagtgctgataacgtgttaaactctatcacaacgctcagtggcaaatgaagattaacagagacaaagacaaatcgctgggacaatcctttattgcagagtagtgaagtatatatacaagagttcccaaggggtgtgtcccttgggaaataactgtcactacgacatatggatggattagatcacatgtataaaatgttttataacaatgtgaaaccacatctgtggaactttcagtgtgtgatgactgggtcactggtggaataccgtgttttctgagctggtcgctttcagttcgcggccaaagtcgatagctcaactatcttttgagtttagctcccaggttctttggcttcatttcaacaagcccgatcttcttctgacctctaaggtaaacctgcgaggaaaccattcccaaagagcatggcactctggaacggcataggtcaggtggcaagcatcgcacagttagccggggtcgatgcctatgggctcatctccatgatcgtggaggctgcaaagacggtgaagaggaaccgggagacctgccagctactggcacgccgtgcaaggatgattggggaccttctacatcagcttgaaaggacacagctgatgcagcacatggagacgaggaacccagtggagcatctggaggagacgcttcggcatgcgtatgtcctcatcacatcctgtcgcaacagcagctacctatacaactgctgtatgggagggaagcaggctgatcggcttcgagaggtgcagaatgagattaccttctacctccaacttttcccccttgtcagctttgtcgacaacacccgtacttgggagcggcttctgagtagagcttgtcctctgtgcacaacagaaaacatggatgagttacatgcagcagcacatcatgtggaacatgaagatggatcagaggccatcaaggcaactaaattcgaaaatctcggaagtcatcctaccctaaaacctgacatagatcaaatggaaggccaagtcatgaggatgggaggattagtaaatctcattggtggtacaaaaggagcagagttatcatgttttaccttttctcatattttggcggcgacagacaacttttcagagaaaaatttggttggtaagggtggatttggttatgtctacaagggcaatcttattaatggtcttaacgttgccattaaaagatttgatgcatgttcatcatatcaaggtccacatgagttcagaactgagattgatgccattccaaatcttcgacacaagaacataattggtctacttgggtactgtgttcaaggagaagaaagcatacttgtctatgaatatatgtcaaataaatgcttggcatctgtcattgctgatgaaacaaaaagggggttgctaaattggtccaagcgtcttcaaataatcaaaggcatagcagatggtcttgcttttctgcatgggcattctcagatgtgcattgtccacagggacataaaaccaagcaacatcctgctggaccatgaaatgaatgccaagattactgattttggtctggcattaatgttggctccaaaatcgactgcagaggttcctgttttgggcacatatggctatgcagatcctgaatatattgttactggaaaaatctcggagaaggcagacatatatggatttggcatagtactttttgagataataagtggaaggtcgatccattcttatatgaaggcagagggcactcgagagctaccataccctgcttatgcacacaaatacaacccaaagacgctgcacaagcttgttgatccattgttgcgcgtggacgagcatgaacgggctcagattatggaatgcgtgagggtggcgcagttatgcgttgaccatcgtgccaagcatcggcctgtgatgtcagaagttgtcaccatgcttggcatggcagcatcaaagggatagttgtagctttgcaagacccacaaagggatagctgtgaatgatgcaagtgtgaactaattaatgagctctactcaactattttcccccttctcatgcatgattgtgtaaacatcagggagattagtcagtgaaatatttggcatgcaccttacttgagcgctgtggctaataaattgtggttggctggaatgcaaattgctccatggtgttgttaatttggtctaagctggagatgaagtgactgactccatgggcatgtggttcacctccctgctggtggtggacgacaaatatcaggctggcattcacgtagaatgtgcggcaaagactgatgactgatgagtgatgactggtgaggaaccagacaaatgatgagttgaatctttcaaagtttgacagttcagtctccaatttttttttctcaaatcattggtactgtgtacaagcttgaagcttcctggaaacagcccctcctccacgggtttgttcaaccatgtccaaagcaagcaagaagaaacgaaggacgataatggctctggtcgggcaggtggcgacggtggcgcagctggtgggcgtggacgcgttcagcctcatcacgatgatcgcggaggcggcgcagacggcgcggcggaaccgcgccgtgtgccggcagctggcccggcgcgtggagatgatcggcagcctgctccggcggctgcgcgagcaggacgacaacgacgacatgcggctgctgcggcacgcggagacgcgcggccccgtggaggcgctggaggagacgctccggcgcgcctacctgctggtgcggtcctgccagcggcgcgggtacgcgttccgctgcctgatgggggcgcggcacgcggacgagctccgcgagatgcagggcgagatcggcttctacctcgacctcttccccctcatcagctacgtcgactgggcgaggcgtcgcggcaacggcaacggcaaggccgcctgtggtgacactcgttctttgcaagaggcacctatggtaagaccatgtcttgtgccgttcctgtttctctcgctcctgcgatggatgcaattgttcagggagtacgtcatgcacctgctctgcttatcagcttatgtttactgacgtgtgtatctgtgaaatcattttgcatgttaattttcattaacaatgatctagctagctagctagcaccttaattttcattgctgggaaacaagctagctagctactagtatgcagctgttgttggtcctctgtttttcggactactatctgtcgagttcaggtgaaattgcctttcttttttgaaccagattaaataggtatgttggaataatcctatttttttcctcttgggaacgcaaccagcacacgttcatcaggagtgtttctgtttggcctggctatctgtttcggtttggatacatacagatagcttaccttcttggttcatcaggagtgcaaagttgcaggatctcaggcggcgctgacgatgacgcagcagccctggagccttccacggccgagcaaggacgagtaggaaggagggccacatgcgtcgtggccccgtgacacctgcttcacgttctctcagattttaattttatgacgcacagcgaaaagcccaaaaggaggggggggaagatgctgtcgatacagatcgttcgatccacacgggaagatctgaagcatgagagcatgtctgaaacagtcgagatgtcagacatgtcctgccgccattttattttttacccgctcatgtacgggggttatttttttttcgtatttctttcctcagcggcgctgcagaatagaaccgatcgaggcggagttgtctgtcatctcatcatctctcagtaatattcacacgcgctgcgtctctcccaagggcgccgccaacttgtacatatagcagcatttttttttgggtttttttaagatggtgccctcgattttggtggtgtgctcagttttaccctcagtggtgttttttgctcagttttgcccttctgttctatagcactggaagggcaaaactgagcaaaaaacaccactaagggtaaaac

SEQ ID NO: 23708 - DNA, 1889 bp, Zea Mays
atagaattctgcgctcatagagaaaacaggggagagagagtactatgagaaacaatttgccacattgaggtcctttgaggaagttgactcactagaagaatccaatgaaatcaacgaggatgaggagcttgcggagcaaatccagagtgaatttgctatgaagatatcaaattatgcaaacattgttctcttagcgttgaaggtatacgctacaataaaaagtggatcaattgctatagctgcctcaacactggattcactgcttgatctcatggctggtggtatcctttggttcacacatctgtcaatgaagagcatcaatgtctacaagtaccccattggcaaactgagggtacagcctgtaggcattatcatcttcgctgctgtcatggccactttaggcttccaagtatttattcaggctgttgaaaagctggtagtgaatgaggctccagataaactgaaccaagtgcaattattgtggctatattcaatcatgatctttgcaacaatagtgaaattaggtctgtggctctactgccgaacgtctggtaacaagattgtccgtgcttatgctaaggatcactatttcgatgttgtcacaaatgttgtgggtttggctgctgctgtccttggtgatagattctactggtggattgacccaattggtgcaattgttcttgcagtgtacacgatttcaaactggtctggaacagtgtgggaaaatgcagttttaactgcttatacctgcactcatttacatccgtccaaccatactcacgagaaggaagtgagcctagctcaactggttaggttggaggtgtggtcgtacacccaaccaaccaggttcaagtcttctccagcttgaatttaggtgcctactttctctattttctctttgttgataatgaaaaaccacctactttctcttagctactataaatggattatttttaaccttgaagtggtgctaccgttacaaataaaagttacttgagccaaatgcttgctctggaatcacttcggactatcacctagagcagttgccacatgcagcaccaagattacttgcacgttacaaattggctaggactgacagacaaccttgttattgctatcctccatgtagtatcgctggtaggtgaatcagctcctccagaaatgcttcagaagttgacatatctggctatcagacaccatcctcagattaagcgtgttgacaccgttcgagcatacacctttggggtgctttactttgttgaggttgacattgagcttccagaggacttgccacttaaggaggcacacgccattggagaatctctccaaatcaagattgaggagctacctgaagttgagcgagcattcgttcacctagatttcgaatgtgaccataagccggagcattcaattctcaacaagcttcccagcagccagccttgatccgaacgaatcctgtgtggtagattgtcgtgcagaatctgctgcagttcttgcattggcgtcttgtgctgtatgacaaaactaagagttcaattagttttgtggcggtgagtttaagatcaggcgcatctaagactacgagagatgaaggtgccgaatgcagagatttctcgagtgtggaaccctttgtggttctgttggtatggtcttcgttttgagcgaaattaagcattttgctgttggcatcatggcatgtgattggcggcgatctagctgtgtgctatcgactacggtgatgtttagacatggtttcgagaaagagagtagatccttgatttctttaagcaaatctcagtgcctttttattttagggctagtttgatatcagtttctaagtgatttctattttttttattttttagaaaataaagtaattttacttgaaa

SEQ ID NO: 23709 - DNA, 1948 bp, Zea Mays
aagccctatccggtttctcaccctacagatttgtcttcttctcgcacgcttgccttgtccaccgagagaaattcgagagagagagaacaaaaaatcaaacaggcatccaaaaagaagggagaggaagagggagggattgaaaagctagggttttcgccatggccattgcccacctcgagctcccctctctcgaatccacccttcccaagctctcctagctcccgcatctcgtatcttcacaaaaagcagacgcctttgattccccttcccgctgcgtcgcccccattcgagggttttccctccttccccaaatcgaatcgcagcattaccgaccgagcaagcaacccaccaacccacccgctttaagggtccgagccgagcgacggcgctggcgatccagctgggcgtgagggcggcggaggcggccggataatcaatgtgtacgctgtgcgccgtgcagcggtggtcgcggcgcgtcgccaccatgctcccgtggctcgtcgtcccgctcatcgtcatctgggccgccactcagctgctcctcccggccgcctaccgcttcgaggttagtccaaatgtgcagccacaccctactggccttaaaaagtcatggcatcagctttttatacgctcagcatcagtggccccttatcctgacgttacaacttcagctcatgatatgattcggaagccagaaccaaatggagcacaaataaacaatgctcatacatttctctctcagtatcctcctctggactgcaagccaagttcaagccagtccatgcaatatcctggttttccaccacttaatggagcacctcccagtaacccactatttcatttttctgctggacatatgcccttctatgatgatgcagaatcaacactactcgaagaatcagagcaatttgaggacccatgctatgatccagatgcaattgcattacttgggccagtttcagaatctttagataacttccctccggacttagattgtggattcttctcgagtgatgttgctaaagaaccacatgggtggccttcaccaattgagtctcctctctcaagatcccacacggttgaagaaaagcttaccaagccctcgcactcatcagttgcaagaggttctggtggtcccattctgcctgtgactagcagtgaacaaggcacatggcaaatgtggagcacgccattggttcaggaaagtttaggtttgcaaggtcctcagagtcagtggtttcaacaaaacacaaatcaatttaaccatagtgctaaccttttcagtagtggaggcagggcaagaagtcccctgggtactggtttgaatgacagtgatccatggcttcagaaagcacctttccaacaattgccacctgatacatcaagcctgttcctttcacatgaaatgccaggaaaattgcacaatgacttggctttcgggtctccaaacaaatcagcccgcgaacacccctttgggccacctggttatttgttgcctaaggaggaactggtgctggatggagctcaggaaggcggcggcgggcatgttctgtcgccgtccggtgcacatgttggcttgttttctccaacaagtcctgatgtgcagccactgtggccattcagtgaaaaaagagagcatagaacgaacagacttttgtaatagaaggaagggaaaatgtggagccaaggcttccttgcctcctctcatgtagggtttacggtcggatataagctggactgtgttcctcttttttgcactgcattgggccttgtttcacctgatgatgttttatgcctgtatgtatgctattgtttctgtgatgtcgcaagtggtgggtagtggaggcaggcgagagaggcggatatggtgtaggagtagaagagaagggtctatcatgtcttgttgttttgttgccattgccattggttgatgcatgcagagaaagaa

SEQ ID NO: 23710 - DNA, 2348 bp, Zea Mays
cgggttcccatcgaaccgcatctgagtatctgaccacgtcacacgacaccaccaccagccctccccttcatcaattggagcacggcgcccgttcattcccctctgctccgctgcttgcctccggctccccaattccacgagatctccaattccaccgcgtcgtctctgcatccggaccccataccccgatcgatccctaaggcccatggttttctccgccgccgcgtcgcctctagtagccaccgctgctgactctgcttcctcctgcgtcgcccacctccgctgctgctgtcgcgttagttgctgccgttgttgaagacgcgtagctctttagggttcgcgatttctcgccgatcggttcgagaattggcacgcggtagccgcgccgctgcgcctgttcgacgacgcggaggagccgaagccggagcgcgtcggggccggagaggccgacgcggagagggatgacgaggacgggggcgaccagcacttctccctcctcgggcactccctctgcgtcaagcgcccgcgccgcgccggcaacggcggcgggggcggagagacgtcatcctgctcgtccacgtccgcggcgcttcgccctgccaagcgacaggcgacgggggagggcagcggcgcagatctggagacccgccgcgccgcggtccgcgcctggggcaatcagtcgctggcggaggccgacccggacgtgcactcgctgatggagcaggagttggaccgccaggtgcgaggcatcgagctcatagcgtcggaaaacttcgtctgccgcgcggtgctcgatgcactcggcagccacctcactaacaagtactccgagggggccccgggtgctcgctactacggcgggaatcagcacatcgacgccatcgaacggctctgccatgagcgcgctctcaccgccttcggtctcgaccctgcctgctggggcgtcaacgtgcagccctactcgtgcacgtctgccaacttggctgtctacactgggctccttcaacccaaggaccgcatcatggggctggagccaccgtcgggcggccatgttagccatggttactacacgcccagtggcaagaaggtgtcaggtgcctctattttcttcgagagcatgtcgtacaaggtgaacccacagactgggtatattgattacgacaagcttgaagaaagagcaatggatttccaccctaaaattctcatctgtggtgggagctcttaccccagagagtgggactttgcacggatgagattgattgctgataagtgtggtgcggtgcttctttgcgacatggcacatatcagtgggcttgtcgcagcaaaggaatgccgtagccctttcgactactgtgatgttgttacgtcaactactcacaagaatcttaggggccctagaggtggtataatattcttcaggaaagggaaaaatttaaggaaacgagctggatctttttctcaaggagatgagaatgaatacgacttcgaggataggataaattttggtgttttcccttcaatgcaaggagggccccataataatcatattgctggcttggctataactctgaagcagattggttacaggtggcacagataatcacttagtactttgggacctcagaactcttggcttgactggcaagatcttcgagaaggtttgcgaggcatgccacatatctgtcaacaagacaccaatatatggagataatggctcgatatcgccaggtggtgtgcggattggaacacctgcaatgactactagaggttgcttagaagaggacttcgaggtgattgcagacttcctcataagggctactcaaattgctaacaatgttctgaaagaacatggcaaagtgcaaaaggagtttctaagaggcctacagaacaataatgatgttatagaactccgaaatcaggttgaggcatttgcgtcacagtttgcgatgccaggttttgatgtatgaatgtgcatatatacgtagtcagcaattatcagattcacagcaacattgccatcctttccgttactccaatactagcaactattgctttcaactgcacaatgattagggagtttttttttatttgatggtagacggtctagatggttgattcaaacaattatgtacagcaagttgtgatgaattatgtatgcagtgaaccttggtatgacgggttcctataggagatattttcttgtcactacaacagaaccctttgttgccttttgacacctgtttgttgccgaggctgaataagctttaaccatatggtttctggctaattattagacgatgatatttggtaaattgtactggggcttgcaactagtttcgtcagtttgc

SEQ ID NO: 23711 - DNA, 1728 bp, Zea Mays
tgtgatgcaagcctttgcagagagcagcccctgtatccatcttactaaactcctagcattctagttctactgctgatcttctgcatggccatggtgaggaacccaagagaccttgaaacatactaggagtactagcagtagaggatttaaacctatcttggagtttgcaactggtatcttcttgcaagatcccaaggccaccatttgttgcagcgtgagacaggagctgcggctgcggaggaagtgagcaaaagcatggatctttccggcacgcagggcgagctgccgatggcaacaatgcacgccggcgggtcgccgtacctggggctgcaccacgggcacccacagcagcacaaccatggcgcgaacggccggcacatgtcgccgccggatgtggtggcggaggaggccaagaaccggcagctggcggtggtgcccgtgggcacaggaggcggaggcggggcaggggtgaggtaccgcgagtgcctgaagaaccacgcggctgccatcggcgggagcgcgacggacgggtgcggcgagttcatgcccgcgggcgaggaggggtcgctggacgcgctccggtgctcggcgtgcgggtgccaccgcaacttccaccgcaaggagccgccgggcggcgacgggcggcagctgtacgggcaccaccaccaccacccgctgagcccgctggccgcggtgcacccccaccatcaccgggggctgctggtggcggcgcttcccccggcgccgacgcgcatggtgatgccgctgagcgccgccatgcaccatcaccagcagccgccgcagcagcaccacagctcggcgtcagcggactccgacgacgcacacgtgccaggggtgcgcgggggggaggtgcagcagcagcagcaggcaccggcacggaagcggttccggaccaagttcaccgcggagcagaaggcccggatgctggggttcgcggaggacgccgggtggcggctgcagaagctggacgaggcggcggtgcagcgcttctgccaggaggtcggcgtgaagcggcgcgtgctcaaggtgtggatgcacaacaacaagcacaccctggcgcggcgcggccacgccgggctccccggcgacccggagctgctggggccgcacgacggccagctcggcatgccgctcccggagccggcggcggagcccgcagctgctgctgcggctgcggctggacttggagtgaccgaccaagccatgtctttcgggactggacgacattgatcaagagagtctaatgctgactgaatcagccttgcggcatagggaagctgttttctttgttaatctgctgctgatctcatcaatctagccgtagctttagctgcattcgcattccactgttccatccatccatcctagctatccatcaaccacaaactgatgatgcggagtctccatggatttctattccttgttgatttctgtagctgctctccccgctcttgactttaattttttagtgctcgagtgactggtggtttgggaggtgagactgaatcactcactcttccgccttatgtgttgttcctttcatttcatcatgctactgtcgttgtggtgtttagtcagccagccagagagtgagtgctacactagtactagtgattgatcaacagctggtaatctgatacgcctggctgccgtgcatgcttagcaggcctgtaaccgaaagaatctactagtaaattatgatcagat

SEQ ID NO: 23712 - DNA, 2351 bp, Zea Mays
gagggcgagaggcttcttctctgaccagcgaccggctcgccgtccagagaagaagaagaagaagaggaggaggaggaggaagaagaagaagaagcgctcttgggctccgtcgtcgcatgaagaaggaaaccatggaggggcatgtgccattgccattgccattgctcccggacggagaaactgcggtgggctacagcaaggacgacgcctcctcgcctctgcaagaggagatttcgagcctgcggtcaaggcagcggcgtgttgacaggagacggcgggaggcgctcgacaggctcgttgaactgaaaggaagcgttagggtcttctgccgggtccggccgctggctcacacgaacagcttgcatgcccagtcatcacctgttaccgtcgagcaggagaggatcacggtcaagcagccgggatcaagagggagttcggcgctgatagggttttcggccaggagtccacgcaagaggatgtgttcgaagaagtgaaaccgatcctcaggtctgcactcgacggccacaacgtctgcatcctcgcgtacggccagaccgggacggggaagacctacacaatggaaggaaccggcggtaataagctcggcgtcgtgcctcgggctatccaggagctgttctctcgcgcttcggaggacggctcatgcgcctactctttctccatgagcatgcttgaggtctacctggggagtctcagggacttgctggcagcaccgaggcagcctctcttcaggcgaacagagtgcaaagcagcggcgtgtagtagtagcctcagcatactggcaacgaaaggtggcgccgtggaagtggaggggctgacggacgtctcgacgccggacctcaagaacgccagccagtggtaccgcagagggcggcgagcccggtcgacggcctggacgaacgtcaacgacgcctccagccggtcgcactgcctgacgaggatcaccataaggagaaggatgaggcatggaggaggaggaggagtcagcaagctctggctcgtcgacctcggcggcagcgagcggctgctcaagaccggcgcgtccgggctcaccatggacgagggcaaggccatcaacctctccctgtcggcgctcggagacgtcattgctgcgctcaggaggaagaggccccatgttccttataggtaacagaaacagcaagcttacccagattctcagcgactcgctcggcgatggttcgaaagttgtaatggtggtgcacgtcagcctatccgaggacgacgtcggcgagacggtctgctcgctgaacctggcgaaacgagccagatcgatcgagccgaacagagaaatcccacaggatctgaaaacgctgaagcagaagagggtcgcagagctggacagggagatccgcgccgccgaggaagagctgaagcgtctcgacgagcagataaggagagcggaggagaaggagatctcactcgaggaggaggaggaggaggaggaggagaagaagctcttcgcctcgtcggtctgccaggctctcagcgacgacgagaaggggtcgccgaggagcactctggtggtggtggggcacaccgatgccgcggagagcccgcgcgcgacgacggagaaggcgaagggcaggaggccgccgccggctcgtggccatggtggctcagcagctccccacttcatgtcctccacggtgtgcagccggcagagacggtgcgcgggaggctaccattctgtcggtaacggtaagccgaggctgacggcggtgtcggtgaacaggtacccgccgccggctgctgagctgagtgggagccagaacgcggcggccagggctagcaggtcggcgtcagtggcactctcgtccggtgtgcacaagttgaggtgcttgcgtgtcaacaagtccgatcaggtcaacgtaataagcaacagcagcgtcgactcgaccgctgcgtcggcaccgccgccgcggcggagggaaagctgcttcggctccaggccggttctacaaagagcggcagcgcccctgcatctgcacaggaggaggatgtctagcctgacatgaacaccgattgcacagttatgatttttcttaacttaattgtttttattagtggtgaaagggttctgaaagatgtttgtgtatgtatggttgttagcttcgtagttcttgactgctgtaactattggttggaggccccttgggcttttgttttttttttgggtttggcttggaaggggcaaaatgatgcgaggaataattgttgatacatggaataatggaatttacctgtggttctggttgcgatggattttgaatggaatttgcgaggtagcaaaacaatctaacaagttacgtagg

SEQ ID NO: 23713 - DNA, 1938 bp, Zea Mays
atggggctgggggctgcgatggcactgggcgacccaccggcggactacgcatccatcgcggcggtggggctgtttgtggcactcatgtgtgtcggcatcatcgtcgggcacctgctcgaggagaaccgctggatgaacgagtccatcaccacgctcttcatcgtgttaagccaagatgagacaccattcttgtacagcctcgtgtttggtgaaggtgttgtcaatgacacaacttctgttgtgttgttcaatgcaatccagaactttgatcctggaaatatcagcggtgccaaattactgaacttcattagcagtttcctttatttgttcggctccagcaccattcttggagtagcttctggacttcttagtgcttataccattaagaagttgtactttggcagcccggtaaagtctatcgctttgagcaacaccattttagccttggtgctggtttcaagagctgcttttgttttcccactatcctttctatcaaatttgaccaaaaaaactccaaatggaaagatatcttttaggcagcaggttattgtttggtgggcgggtctcatgagaggtgttgtgtctattgcgttggcttacaataaggcgtttgacttaatgtttccaaggttctgtggaagtgcgaggcattttgggaggtgtgcgaggcattttgggagggacatcatcatgcccaacttgaagtcgtccgtgaccacaacagcgagcgcggtggagtacatggatgaagtattgaaggcgttgccgctaggtgaggccaggaatgaggattcacgaacactgcaattcaattatggttcattcaaacataagggatttttgaagcactaactgcattccccttctccccttctcccttcctgctgtgcgaagccgtgccccaaaccctctaccatcttatttcagttcccactctctaccatcttccaggaaaaaacactagcaatcttacatgagttccaagttttgcaggtcgttgctgtttgtgaatgtggtttggattatgacagacttcagttctgtccgacagatatgcaaaaaaagtactttgagaaacaatttgagttggctgaagcagtaaagctgcccattttcttcacatgtgtgctgctggtgaagacttctatgaaatcatgacacaaaatttgcacagattccctggtggggttacacattccttcactgactcaacagaagatcaggataggctactttcttttgagaagatgtttatcggtgttaatggttcctctctgaaaactaacggaaatcttgaggttgtacgaggcattcctgtcgagaggttgatgatggaaacagattctccatattgtgacataataaatactcatgctggaagccagtatgtaaaatctgtctggccatccaagaagaaagaaaagtatgagccagattcaacagtaaaaggtcgcaatgaaccttgtttagtcaggcaagttcttgaggtagtggcgggaagcaaagaaatttctgacatagaaggcctgagtagaactctgtaccacaacacatgcaggctcttctttcctcaggatcttgacgcgtctactaatgcgcagcttgagagtggtactgccgtccaggattgctgatgtcagagtgattttttttaaaaaatgtttccttttggttggcgtttggtttcgtacaacttccaatatgcctatgaaatgtttttggtcttataattttccctcgctgccaattttgccatgtttcatgagcctgatgacatgtcaggcaagtcctgactatgtacaagtaccctactgagactatgccctaaaatcatttagggctgagcatgtacaagtacagtttgatggctatgttgttcactacaatcaaacaacaactaagctctatatctatattttatacaaatttttaaattcc

SEQ ID NO: 23714 - DNA, 620 bp, Zea Mays
cacaccctccaaatcctctccacgcgcctacccacgacgtaccgagcgtccgagccacgactcttccctcgctcgctcgttcgtctcctcccaccaaggcaccaaaccaatctagccaccaaggcaccaaccaagagccatggcatccccgttctgcgccgctgccgccgcttgccgcctcgccgtccccgccccgtcccctcccgccgcacgggcgcctaggccccgacgcggcctggtggcggtgcgcgcggaggcgggcggtgggataaacccggccatccggaaggaggaggacaaggtggtcgacaccgttctcaccggcgagctcgccaagccgctcaccgcgtactgtcggtgttggagatcaggaacattcccactgtgcgatggatcccatgtgaagcacaacaaagcaaccggtgataatgtgggccccctgctcgttaagaagtagatgcagtttctttcgacttttgccctagcgtcatgttgagcgctgagctgaacactatctgtatgtcatgatatatgtttttttagccaagataaactatcatgacgcaacgatccttcattcggaataaagtatattgtatacgggtgtaattggattgaat

SEQ ID NO: 23715 - DNA, 3414 bp, Zea Mays
aaggagccttccgctctcacgacgtctcgacccgtcgaccgcttcgccaccacaaccccgccggaaccctaaccctagcagcgggagccccatccgccgggccgtaccgatgggacggtctgtgaattgaagtagcttggaagagcggtgttatgcactgggatgggagacaatgtcctaaaattcagggtggggttgttaggataaactgcattatggattctggcaacagttcgtgctctagaacacgaagtgggcttgtaaggaaaaaagacacatttgctctcagtagatcttcatgttcaagaactcgaagtggacttctaagagtaaagagctctgtggattccagtgatgtttcgagttccagaactcgaagtggccttctaaggataaagagctttctggattcccatgatggttcattttcgaggtcacaaagtgaccatgtaggaggtagccctcctattgttgaggctataaatgatgaatcagttttgaaggagtctcctgatagattgatgaaagaagagatgcctgttacaactccaaatgggcttgttagacagagctttactgaacaggctgtaaccaaggacaagtcaggcatgaggacacttctcgatggatgtttgagtgaagatatgccttctagaacacggagtggacttgtcagaagaagccctactgttaagactctaagcaaggacaaatcagtcattaaggggctggcagatgggtgtctgaaagaagacaagcctcttggaacacgaagtggccttgttccaatcaaggctgaagtactcacaaaggggcagcatgatagatggctgaaaaatgacaaggctgctgcaatgcggagtgaccatggtggcagaagattggctgccaagactgtaagcgaggacaaaagaggcgttgagggtttgcctgatggatggcaaaaagaatacagacccaggaagaatggtccatgttcagatccgtactacattgatccagtcagtggatatgaattccgctctttgaaggatgtgcacaactatcttgaaactggagatattagccaatgcgctgtgacaccaaagaagagcaccatctgcgaagatataacagaaagtcaaactcatactagtacatcaccgcagcacatgaggcctggtactgcgaataagggtattcagtgtgaaatattaacttcggatggtatcatggcgccatgggaggataatggaaatgatactgaacataccatgttaccagagcctgagagcttgaaagcaactcaagggtatggcaacaagcttgaaacttcagaacccacgagggttcaaccggtttctccacataatggttcaagacaaaccaaatctgttaaaaggaaagaatcaaatgcagaggtcaaatccaagaagcgtaaaaccagttctgctgtgactcgtgttcgagcgtcgccccgcttagctgcattaaatgctcatcttgatgtaagcatcgaacatgaagatgacatggttagcacaaatcatgtggactgggtacagactattgaagagagagccatcgatcaggcacagaaaagccaatcaggctcttttgatcagatacatggtaatctggaaagcactttcagtcagttacagttgagccaagcagaccctgctaatggaatgcaggttatacaggcaaacactaccattcattcacaaccaagccaattggatactctgagtcctacacagaaaaaacaggaaaacagttccaaacagttacaatctgtggtcacagattcttcgattccaaaacgaaccacacagaaatgcactatagatcagccaagccagccagacataaatcatatacgcacagatcaggaattcactgggaatcagttcccctcgagcctaccagttgacactgttatttcattaggggatactgaagaattcacagcgggtcactcacagccaagaaatagtgacactgcaggacaaattcaggccaatgaggaaaatactgccgatcaagtacagttgagcctggcagagacagtcattctggtaccggctattcaagaatatgctgctggttattcactgctgagcaaagctgacactactgatcaaacacaggccaatcaggaatacattgctgatcaagtacaatcgtgcctaacagacgcactcattccagtaaaagctattgaggaatacacaactgattattcacatattagtaaagctgacattacaaatcaaatacaggtcaatcaggaaagcactgatgatcacttatatttacgtcaagtagactgtctcgctgaaatgcagataattgagcaaaatttgtccaagcaacctcagctgagccaaccagacactggggatcaaatacgaattgatctggaaagcactaccaatcacttgcaaccaaactacgatgaaaattctatgctgcaatctggtttctcttgggctcctgaacagaacagaggagcccctactacagatttctggaaaaatgttgaaagtcaggcgtcatcggtttccatgccaataaatggagcgcctctttcaagctttccagcaaatgtcagattccaaaatgcagcagcagcagcagcagcagcagaacctgctttgccaccacaggttgctccaaccgaaacaggttccgatcagtctgggttggccttccaatcccttttcggaaacatctggtcagatccttgcatcgagtttgctttcaagacccttacaggcgacattcctgttctcgacgacacaacggctgtcacagactacttcccagagcaacaagacttgaataaagacccagcgccaaactgtgcaggctctgtgtttgacagttcaagaaaccacacacaagtcgacgtcaaccttccaccgcctgctccggatggtttctacgatggcagctggttccctccccaatgaatttgagtgcagggaggggaaaaatgcaataacattttgtacctgtgaaaaggcaaatcagagaaggctagtggccgaaacataaaagcaatagtcgcactcttgttagggctctgatctgaatgtctaatcccacaggacacattttgtaaaaaggcggtagcttctttagccttattagactgttaatacactcaactgaatgatgtccagttccatcaacaaggcttcaccgagactgtcgagtgactgatcaggatcatgttttttttttcacgttttgcttctgtgcagttgcctaataaacccattcgttgtaaacaagccagttctaactttaaaaaaaagggcctgtgcatggcgctctaggttattgtgcagatggaactgttcttgatattttgaacacgcaaatgtagaggctttgctgtcacagttcttcagcggaattgcgaag

SEQ ID NO: 23716 - DNA, 190 bp, Zea Mays
ttttatcttcctagttcctactccattctattgatttggaaatctagtgatgtaagttgtaatatgtaactgaacaaccttgacatgaactattaaattagagctgggttgtactcttttttcctttctagggttttctcacgaggagtgagtttttacctagaaaggtttttaatgaggcagccattgc

SEQ ID NO: 23717 - DNA, 1507 bp, Zea Mays
cgaggtgttaaatcatcgaagtgattcagaatcgtctttattcgatctcgtcattcccactaaaggctggacctgtaagggcatgcagagctttagcaagcaactacaccaggcaaacatctgaaacagttgatttggactgggagaacctgggttttgggattgtgcaaactgattatatgtatattgctaagtgcgggacagacgggaatttttctgagggtgaaatggtgccttttggacctatagcgctgagtccatcttctggagtcctaaattatggacagggattgtttgagggcctaaaggcgtataagaaaactgatggatccatcctattatttcgcccagaggaaaatgctgagaggatgcggacaggtgctgagaggatgtgcatgcctgcaccctctgtcgagcagtttattgatgcagtaaaacaaaccgttcttgcaaataagagatggattcctcctactggtaaaggttctctgtatattaggcccttacttatgggaagtggggctgttcttggtcttgcacctgctcctgagtatacattcattatatttgtctctcctgttggaaactactttaaggaaggtttagcaccaataaatttgatagttgaagacaagttccatcgtgctactcctggtggtactgggggtgtgaagaccataggaaattatgcttcggtgttgatggcacagaaaattgcaaaggaaaagggttattctgatgtcctctacttggacgctgttcacaagaagtaccttgaagaagtttcttcatgcaatgtttttgttgtcaaggacaatgttatttctaccccagcaataaaaggaacaatattacctggtatcacaaggaaaagtataattgacgttgctttgagtaaaggcttccaggttgaggagcggcttgtttcagtggatgaactgcttgatgctgatgaggtattctgcacaggaactgctgttgtggtgtctcctgttgggagcattacatatcaagggaaaagagtggaatacggccaccaaggtgttggcgttgtgtcccagcagctgtacacttcactgacgagtcttcagatgggtcaaaccgaggattggatgggctggactgtgcaactgaattagttggccgtggttcgtggatcattcccaacagatgatgggttcgcaagatccaaatctggaggatcacaaccatgtgtacctcttcggttacagttttgtagtgtcttatgcgatggcgtcctgctgtatatttcttagacggtatttaaaccataaaacagtattcgtctgtacgactgtacccttcagttctgtagcatctgccggagacgagtactagttttgttattttctttcttttacaaaccaagaacagttctatagttttattgtagacactggaccatcatatgatctcaatgggtagctttttcctttttatatttaaaaataaacagaattttaattttataaattttatattttaa

SEQ ID NO: 23718 - DNA, 1624 bp, Zea Mays
ttgataataataataatagttcggtgcctttttctagcggggaggaggcaggcggcgcaatctggcaccggccatcacgttccctccggccgcttccccctccctgccctccctttccccagatccgaagccattaaaaccagcggatctcacctcggggcgcgtccgcggcatctgggcaagcgagtggtagagccagcagccatgagatggtatgcatcggtagcctcctgagggcgctggtcctgagtgcggcggcgtctgcgggcaggcgccgggggcccaggatcctgtgtggccacgaggcggatgtacgcgtgactcctcggcacggacacggctggcgcggattccgggcagtcacgggaaggatgatgctggactcctctgactgtgcctctgctgccgccgccgcggagacggggcaggtgcagccgcagcgccgcgcggtgggggccgtgcccctggcgcacgacggcggctacgccagcggcggatgggagagagaagatggcaaactgagttgtggatactcaagttttagaggcaagagagctacgatggaagatttctatgatgtaaaactaactgaaattgatggacaagctgttagcctgtttggtgttttcgacggtcatggaggatcacgtgctgctgagtatttgagggagcacttgtttgataaccttctcaagcaccctgatttcttgacagatacaaagcttgcgataagtgaaacatatcagaaaacagatacagatttcttggaatcagaagcaagcgctttcagggatgatggttcaacagcttcaactgcacttttggtgggtgaccatttatatgttgcaaatgttggtgattctcgtgccgttatttcaaaagctggcaaagctatggcgctttcagaagatcacaaacctaacagaattgatgagcgaaagagaattgaaaatgctggtggtattgtcatttgggctggcacttggagggtgggtggtgtattggcaatgtcccgtgcatttggcaatcgtttactgaagccatatgtggtggcagaacctgaaattcaggaagaacaggtcagtggtgggctggaatgcctggttcttgctagtgatgggctttgggatgttgtggaaaatgaggaagctgttttccttgggagatcggaggacacgccagagtctgcagctaggaaattgacagagattgcttactctcgcggcagcgctgacaatatcacatgcatcgtggtccaatttcaccatgacaaaaccggatgagccgtatggctgccaatttcagttgtaccctgcttcagtctattattatcctgcaagctgggtggtgggcttctcccagatttaccctgcttcatgctattattatcctgcaagccgggcggaaacatttgttccgacaggtgtagtagacacttttaaactgataattcaataaacgtatgtttacgattactgtttagtggaaattggttttcattttgccttatataagaagattttaactagtctgtcatgtgcgtgtgccatccctaattaggtatgaaaatggatacttttttggatattatttttttgtctttttctttgaccgtgaataaata

SEQ ID NO: 23719 - DNA, 291 bp, Zea Mays
ttaggaccgagagatgatgatcgagccattgatgtggtgccacccacaagatgcagttggtggacgacctgaggaatggacttaaccagtggatgctcgccaagcgagtacctcccccagcaaacactatctaagtgtcaaattaaaggcaagccccggttttatgcataaccgttatatatgctattttactgcacttaatgtttgtaggcttgtactgtgcacttaagtgtaggagttgcctgaaaccctagttgcatgaactcaggatacctttgagatggatactag

SEQ ID NO: 23720 - DNA, 2370 bp, Zea Mays
ctagaaatcctaatgattcagcagcacacctgtccgcctagccgcctacgcgtacacagaaaacaatttttttgtccacacacgcgcgcgctccgagccgcagatccgagctagcgcggcgcatccgacggccacgacagcgcagtgccgtcctccgccgccaccgcttggcgattgtccgcaccccaccagtccaccacctcccccacgagcgaaaaccacggtccacggaccacggctatgttccactccaggtggaggctgcagccccggtttcgcaagccgcgccgtggtttgcttgcccacaggcggccaaaccgcaccctccttcccgctcatctcgctttggatcgattggtttcgtaactggtgagggactgagggtctcggagtggattgatttgggattctgttcgaagatttgcggaggggggcaatggcgaccgcggggaaggtgatcaagtgcaaagctgcggtggcatgggaggccggcaagccactgtcgatcgaggaggtggaggtagcgcctccgcaggccatggaggtgcgcgtcaagatcctcttcacctcgctctgccacaccgacgtctacttctgggaggccaaggggcagactcccgtgttccctcggatctttggccacgaggctggagggtatgttctattccccgatttacttcactatgttgctgactatatatgtgctgtgtttatattttgcatatttattatgtttttgcgtctgagtttatgggtatggttggtggtctttgtttactgttttactagatgcatgtggaagagtcagaagaaatagtttttgtttgaaatggtataccaacggttggatattatctgtgtggacatcagatgttctgggttactggcagtggactttgacagatttatctatgattctttcattagcagtttcttcagctaatttactcttactattttttcagtatacaaaggcacgtacagctagggttgtgtagaatcattttagatctgttatctgaggcaaatttgcttattctagccgcctgaaatttcttgattttgccagtatcatagagagtgttggagagggtgtgactgacgtagctccgggcgaccatgtccttcctgtgttcactggggagtgcaaggagtgtgcccactgcaagtcggcagagagcaacatgtgtgatctgctcaggatcaacaccgaccgcggtgtgatgattgccgatggcaagtcgcggttttcaatcaatgggaagcctatctaccactttgttgggacttccaccttcagcgagtacaccgtcatgcatgtgggttgtgttgcaaagatcaaccctcaggctccccttgataaagtttgcgtccttagctgtggtatttctaccggtcttggtgcatcaattaatgttgcaaaacctccgaagggttcgacagtggctgttttcggtttaggagccgttggtcttgccgctgcagaaggtgcaaggattgctggagcgtcaaggatcattggtgtcgacctgaaccccagcagattcgaagaagaatttgtgaacccaaaagaccacaacaagccagtgcaggaggtacttgctgagatgaccaacggaggggtcgaccgcagtgtggaatgcactggcaacattaatgctatgatccaagctttcgaatgtgttcatgatggctggggtgttgctgtgctggtgggtgtgccacataaggacgctgagttcaagacccacccgatgaacttcctgaacgaaaggaccctgaaggggaccttctttggcaactataagccacgcactgatctgccaaatgtggtggagctgtacatgaaaaaggagctggaggtggagaagttcatcacgcacagcgtcccgttcgccgagatcaacaaggcgttcgacctgatggccaagggggagggcatccgctgcatcatccgcatggagaactagatttcgctgtctagtttgtgatctggcctgggcttggggttaataaaagaggcaatgctagcctgccctttcgatgaggaggtacatacacgctggcgatggaccgcgcttgtgtgtcgcgttcagtttggcttttgccaagcagtagggtagcttcccgtgtcggtaattatatggtatgaaccatcaccttttggctctacatggtatgaacgtaagatacaaattccaactacctctagctcgcttgtgtggtatctgtatcagtattcatgtgtttgtttgcttatgtgtttgtttgcttgtatttgctggtgcttgtatcgcgggatgcaatgagttgttgtttggttgttgtcaaccaggctctatgtgtgtgtgcgaggtgtgtgtttggtta

SEQ ID NO: 23721 - DNA, 4379 bp, Zea Mays
ccttcctctcggcccttgacggaaaattcgggtggaaaaagggaaaaaagtcaggcgtcgggtcctcagtcgtagcggcggcgatggcgcgcggcggcggggggcggtcgaagaaggaggatgaggaggagctgcggggggcgaagcgcggttacaaggaggcgtcggcggagggtaatcgggaggaggaggcgcgctgggctaacgtcatcggcgacatctacaagcgccgctgcgagtacgtcgaggccctccggtggcttcgggcggactacgaggtctccgtaaagcacctcccgcagcggcacctcctcccctcctgtcagtcgctcggcgaggtctacctccgcctcggccgcttctcggaggcgctcacctaccagaagaagcatctacagctcgcaaaggagtctgatgaccttgttgagcagcagcgagctaccacacagcttgggagaacataccatgaaatccttctaagatctgaaaatgaccatagtgccataaggaatgcaaaaaagtactttaaatcttcgatgaagctggcaaggattctaaaggagagatccccttcccaaaagtcggactttctaaaagaacttattgatgcgtacaataatatgggcatgcttgagctggaacttgataattttgaagaagctgagaaactacttatccagggcctgaagatatgcgacgacgaagaggtagattcgtatgatgatgctcgcactaggctccatcataatctcggaaatgtttatactgaactacagaattggaaaaaagccagggggcacattgagaaggacatagagatatgtagaaaaatacgccatcttcaaggtgaggcaaaaggattcataaatctgggggagttacattatcgagttcagaagtatgacaatgcaaaactttgttacaataaagctcttgaagtagcaagatccttggaagatgaggatgctctaattgaacaaattcaccagaatattgaaactgttacgaaagcagttgaagtatttgagcagttgaaggaggatgaactgaagctaaaaaaacttatccgggacacttctaatgctcgtggaacatctaaagagagaaaactcctacttgatcagcatgcatggctggatagtcttattgagaaggccaggatgatatgtgcatggcaaaaacacaaggaattctcaaaagggaaaaaaagggtagcaaatgaacttcgcgataaggaaaagttgagtgattctcttctgtcgataggagaatcataccaaaagcttagaaacttcagtaaagctcgtaagtggtacatgaaaagttggaacatatatcggtcgatagggaacttagagggacaagcattagcgaaagtgaacattggcaatgttcttgattcttgtggcgactgggctggtgcattgcaagcttacgaagaaggctaccggattgctgtggaagcagacctacctaatgtgcaactttctgccctcgagaacatgcattacagtcatatggtcagatttgataatatcgaagaagccaagaaaatgcaggaaaaaatagacaatctgaagcaaacactgaatcaatgtgaagcaagggatactgttagtgactactgctcagaaactgacactgaaggtggttgcacatctgataacacgcttgatgctcagaatgaccatggacaggctgcaaataactacgaggaacctgatgatgatgttacgcttgcttcactcgttcagaggagtgggagctcatccaagattaaggtacccaagatacggaattcttctaagaagtttgatgaactatgtgatgtgactgaagacatacataattcttctaagaaggttgatgaactaggtgatatggctgaaggcactagggcagttttaagtagatcacgttctgatcactctgttggcagaaaacgtgtccgtgtgatcttatcagatgatgaatccgacgagaatcatgaaaacgttcagtttaaaaagacatcaactagtcctgcagatagtatgtcagtctcagaccatggagcaagcagcagcagaaaccaggatactttacaagttaatcaaacaagggatgcaccctatccagctgaggagagcatttgttcattcaaatcaagtagtcctattgatcatgcttttgaaggcataggattaggtgcttccagtgcaggaaagggaccaacctccaaatcagcagcaagtttttccaagctcagtacacctggctcaaacagtctgaatgaaagccaaaatgctgttggttctcaatccaaagatgctgataatcacttctgggccttcagaatcggcggccatctggtttacttggatggacgtgcttgtgtacatgaaggtgcttttagcattgactctctcaaagttgaagtagcatgtgtatattatcttcagatttctgatgaaaaaagggccaaaggtctattgcctatcattggggagctaaagtttcgtgggaaggtattggaagatgcggtatccatatattatgatgatcagctcgcttctgaacagaagtgtgttgatgttgttattgatgattgggtgccaaagcagctgatgaagttgtatgttgatttctgcatgaagtcattagaagcacccaataagaagctgctgacgaaactatataatcttgaggtctccgaagatgaaatcattgtttctgattgcggactgcaggatatgtcaattgtcccctttcttgatgccctaagatctcacaaaacaatagcagttttggatctttctcataatttactaggaaatcaaacagttgaaagacttcagcatatatttgcttcatcaagtcacacatatggtggcttgactctggatttacattgtaatcgattgggtccaactgctttatttcagatatgtgagtgcgctgttttgactgatcgattggaagtacttaatctatctgggaatcgcctcactgatgcatgcagttcttacctattcacaatcctgaaaaagtgcaaagcttgaatgtcgagcagtgttctatcacgtcaagaactgttcagaagatgacagatgcactccatgaagagtctgtcctttcacatctctcattaggaaagaacaacccaatttctagcaatacaatgcttaaccttctatccaaacttgcatctctcacaaggttttcagaactaagcctgactggtataaaactgaataagttaatggttgataagttgtgcctccttgcacaatcctcgtgcctatcaggacttctgctaggtggaacttccattggaccggtggagacaactaggcttactgaggcattgtcttgtacatctcaagatttcctaaggttggagttgtctaattgtgggctcacaacacctgatttcacacaaatctgtacaaatctctcccggatcaatattcttgagttaaaccttggaggaaatccaattaacctggagggatgtgatgctgtacagcgaatgcttgtaaatccccaatgcagtattagatctctcagccttgacaaatgcaatcttggacttgctggaattgtccgtgtcattcaatcattaccagccaattagaggagctgcgcgtgtctaagaacaccaacttggcgttggagacaacaacaaagtatgacgaagacatgcaggaagtatcaacagcttctgagcaaaagcaatgtaatgaccctgaaacaacgaatgatatagctccagggaacatagattttgcgaacatgcaggttccagacagtgaagatgaagcagataatgatgcccaccgtgccagatctggttcacgcaggagctgtgcaagttcatcgcagaaaaactcttactcttcttgtcagatgattgaagaactggcgaaggcccttatttcagcaaagcagttgatggtgcttgatcttagctgcaatggtttgtcggaggaggcagtccagtcactgtattctgcttgggcgtctgttccgagaggcgatggaatggctcggaaacatgtaaataaggaggtggtccacttttcagtggatggtatgaggtgctgcggcctaaaaccctgctgcagaagagacctgcaaatgtgaaccctggacgaccttccgatgctaaattatggttgcactctgtaaataaatcatgagtgaatcaactaggcgttgaagcattgtcaatgcaacttcacactagtcacgatagtttggtgagtaattatgctgattcgcgggaatgtatacactacaatactagatgcttgagatttgggtatgcagttgtttcctgaggtgcagttactccttcgaaatcgtgccgtgtgacaagtttttcaattaaaaggaag

SEQ ID NO: 23722 - DNA, 2363 bp, Zea Mays
catggggccgctcatctcccctactgggtccgcatggcatatgtaggaattttagctgtcttttagccgattgaatcaacttctagaatcactacataaacttgtattcgttgagatttacttctttaggttggtgacatattttgccagattactgggtatattgtcagctatattagtctactaatggattttgccttctcttggtggtagctttaactgcgatttcggttgtttgtttcgtttctatcagatattaataatctaaaatggtgtgcagcttaggttaaaatcaaaaaaatttgtcgggcggataatacaaggcctacaccagaaggaacaccctttgtgcgacaggcgaacagctgtctctatctctctctgcagtgttatttggtttattatatgcagttgcaggggagaaaactaaggcatgttcactgcagctagaagcacagccgcagcagatgcagcaggcttcttatagtatttgcagcttagaagttggagtggcaactgcagctagctgcagcaaacactcctaacaataatagtggagagagactttcacgctgtttaaatttaggtgatttttgggaattaacttgcagatttattaattattatataggtaaaaagtgtagtatcagttactaggagcaagaacttgccctgatgacacagttattttggtttttctgttcacttctcctaatatttaaccttttgagtaagtgtgcagattaggtcttaaaaagggattgcgattaagattttattgccagagcctgagctgtagaattttccatttacacacgtggctgtacagggggtaaacttgcaggattattacttggtgatcctataagatacacatgctgtgaaccctgatttgttttagctgcttttgttcgtttttgtctacttagccttgcacactgaggacctttattgaggttgccggtctgcgggttgaatcatggcggagcacttggcttcgatcttcggcactgagaaggacagggtcaactgccctttttacttcaagattggggcctgtcgtcatggggatcgctgctctcgtctgcacaacaggccaactatatcaccaactcttgtgcttgctaacatgtatcagcgccctgatatgataacccctggagttgatgctcaaggccaacctattgaccctgagaagatgcaggagcattttgaggacttctatgaggacatctatgaggagttggggaagtttggtgagattgagaatctgaatgtttgtgataaccttgctgaccacatgattgggaatgtctatgtccagttcagggaggaagagcaagcagccgcagcatacaatgctcttcaggggcgcttttactctggccgccctataattgttgagtattctcctgtgaccgacttccgtgaagcaacctgtaggcagtttgaggagaacagctgcaaccgtggtggctactgtaatttcatgcatgtgaagcaaattggcagggatctcaggaggaagctgtatgggcgttctgcttccaggaggtaccatgggagaagccgaagccgaagcccgccaccacaaaggaggggccaccgtgaccgtgatgactaccaccaccgtgaccgtgatgactaccgtggtggcggcggtggtggaaggggaagaggtagcaggtatgacaggtacgatgacggagcaggcagaggtggcaggcatggcaggtatgatgatggagcaggcagaggcggcagacatgacaggtatgatgatggaggaaggcgcaggcatggtagcccctcaaggcgtgcaaggagcccagtcagggaaagcagcgaggagcgaagggccaagattgagcagtggaaccgtgaacgggagggaaaacagtgagctctccgtggctactgtttgccggacttgttgcttagctccggctctcatcgctatattctaagtatgcttgtgtggattgcattctgcatggctaagtaaaaccttttaagatcaggattcctcggttcattttatggttaaaccagacatcatttgtttccatctgtgttgtgtcggatcctttgctattatgttattttgacaattggtgtcaaatcttttgtggtgtgctattagcttatgatgatgtcagttgtggtttgtcactagatttgccatctggctttcagtcgtgtgttatgctgttccatggcggatttcttgttttccctcttctcatttttgctcaatgctcctagacagtgcttgggctgccgtcattgtactatgtgcagtagcacggagcaggttctattcagtttgagctgtcttttgtcttgggttcatggcaatctgt

SEQ ID NO: 23723 - DNA, 2808 bp, Zea Mays
agccggtccagcccacagtccacgaggacacgatccccgacctcatatcaggttcccctccccatcccggagagcaaaagcgcttctctcgctagcgagttcggcagtagaaaccctaaaaaaagacaccgccctccccttcgctagcggaaccgccctcccctcgccggggtaggggtttcgggggtagacgcccgccatggacgcgttccggaaacagctggacgtgctcatgggcgccaaccgcaacggcgacgtcgaggaggtgagccgcaactactacgaccgcgacgtctgccgcctcttcctcgccggtctctgcccacacgacctctttcagctcacgaaaatggatctcggtccttgttctaagattcactctcttcaactgcggaaagattatgaagaagcgaaagcaaagggaacagaaaattttgatagagaactcgaggatatgatagaaaggctcattgtggagtgtgacaggaaaattcagagggccctaaaacggcttgcagatgatgatgccaatgctgctattgcgatatcggtctctgaggttactctgacggatgacatactgcagctgtcaaaacagataaaggagaaaatggcagaagttgatgcctttgattttgaagggagaactgatgacaaaataaaggcccaggaagtagtggaagagctaagagctaaaagagctgatatgcaggctaccctcttgcttgatgcttttaacaaggacagagcttcattaactcagcctgctccacctcaagtggcagcagttccaccaccagctccacctgatgctcgtactcaagaaattatcaacgaaaagcttaagaaagctgaagagcttggtgaacaaggcatggttgatgaagctcaaaaagctttggaagaggcagaagctctgaaaaagctggcgccacgttcagagccaccttcagacccttcgaaatatactgctgctgatgttcgaattactgatcaaaaattacgcctctgtgacatatgtggagcatttctgagtgtatatgacaatgatcgacgtcttgctgaccattttggtgggaaattacacctaggctacatgctgattcgtgagaaacagaaagaacttcaggagcagagaaataaaaggagaccgggcaaagctgaagatgatagacgatcaagagagcacagcaaggatcgcaacggccggtcgtccagggatagagaaccagaaaggagagacagggttgagtctcgagatggtagaagagattatgaaagggatcgtgatagacgtcatgatagggacaggcgccatgaccgtgatcgggatagggattatgaccgctcccgtggacatgattcaaggaggagagagcgttcacgctccagggagcgcagcaggcgccacgagagatactaaatgttacaccatgcctgacagatttaggagtactggcggcgtctgttcaagatatggtttgagcttgtgcttcgtatcttctgaagaccggtctacttgacgctaaattcgcatggagtgttaagcatttattaaacgcatctggaatcaaatgaagttgtacttgcgaacggcttcacttaaaattcgcgccatttctaatattgtaataagctgtgcttgaaccttagctgtctctgtgtactcgacgtaccactcgctcccacaaatagcttcgaacatcctgtacctgaaacatgacgctgtttggtggaggtggagctgagaattcaactccgaagaaagatgtttatcaattgttcgctgagaaggttagggataacaaacagctggaatcaagatgggcaatcatgcaagaaacccgtgtggagtattttcgtggaaaagatttcaatgccttcatcaagaattatccagaagtcagggaaattttggggccagataaggatttagaagtggaagacattgttaacactttgttgaccaagaaccttgtgataaggtgtgaccgagttatgaaaactgtgaggcctggcaagaaaaagttatcatcatggcctgctcacttggagatacataatgaacaagtgtttactgaaaatgatgggttttatgcttggatgtttctgaaaaggcggaccttgtggcagacagttctttcatttgtttggcctctttttgcactggcagtctgcttatttccagtttacccataccaatgcaagattgttgtactgtactcatgtgctggagctctacttttcattgtctccattcttttgcgtaaaatttctccctctctcccaactgtattttcattcacgataaacattacgcttcagtagacattttcaatatcacattttaatcactagacatacttgagtaatgagctacatttttttgcctgtgtagtgttgcgcacactgctaacgtcagtcatatgcatcttgattaacaaatactctttacctgctgttcataaaacagcagctatcagaagttggttttgacttactggaagttttgtagtatatattgataaccttgcagttacatgttagtcacggatttaaacctaacatcttaagactttgtgtgtgggaaccatgagttcaacactagagtagcgttcacttgtttcattacaacaaactatctgtttttttaaccttttcaattcaggcacatcttaacttttcttttttgtccgtatgattttttacgggatccattcaataaaccaatgctgccagtggtaactagctggcaatgtagattccctgcttttgtttgttaatttgttttcactacacaattggtag

SEQ ID NO: 23724 - DNA, 5187 bp, Zea Mays
gtcgtcgtcttcgattcgagcggcggcgcggctgtgaagtaagcgggcgagacgagacgagggatcaacctcgatggggaagcagaagggccgcgcgtccagcagcggcatggcggcgtcgctggtaccgcacgcccatggcgccgtccccaccgtcggtttcggcggctaccatggcgccgtccgtgttgagcccgctgcgccctccgacccagacgccccgattcgccttaccccagatgtggatggtgaagtactccagaacctaaagaggctgggaaggaaagatgcaacaacaaagatcaaggccttatctactctctctatactctttggacaaaaaccttgtgaggaagttgtgcagattgttccacaatgggcatttgagtacaagaggctgctacttgactataacagagaagttcgccgtgctactcatgaggccatgtctagcctcatcacagcagttaggaaaggtatagcaccgcacctgaagtctttaatgggtccttggtggttttctcaatttgatcctgctcctgaggttgctcaagctgcccgacgttcgttcgaggcagcattcccacagtcagatagaagactggatgcattaatgttatgtgtgaaggaaacatttctttacctaaatgagaacttgaagctaacaccacaagctttgtctgacaaggctataccaatggatgaactggaagatatgcatcagagggtaatgtcatcatcactgttagctatggcaactcttatagaaattttactaggagtgaaattgcaaagttgtgatggtgagagtaccaatactgaaaacaaaaatatgtcaaaagttaggtcaactgtactttcttctgctgaagctgcattttgtatgcataaatgttttcttgacgtcctcaagtcaaaaagttctgttatacggtcagctacatactcactgcttacaagttacatcaaacatgttcctcatgtttttgacgaagaaaccatgaagaaactttccccaactctacttggtgcattccatgagaaggatgcgtcatgccactcttctatgtgggatacaattcttgttttctctagaaagtttccagaggcttggtcatattgtaatattcacaaagttgtcctcagtcgggtttggcatttcctacaaaatggatgttatgggtccaaacaagtttcatatcctcttctagttcagtttttggactctatgccacctaaagcagtcatgggacaacaatttgtttttgattttttgcataatctttgggctggaaggaaccagaggcagttatcagctgctgatagtttggctttctgtggtgcctttaaacagagttttttgtggcttctaaaaaatgcatcaagatattctactggagattcttcagatgatgtacccatcaagcttataactgatgtacttgccaaaatagtttggcgtgactaccttttattgtctggagacacaattggtggcggtgttctcttatctcgtaaaacttcagggttagctgcgaacatgcactacccaacatactatcttcaggatttgaagaaatgcatcactgaaatactggatgtgattgcagatacagaaaatcatttacttaatatttcttgtcagtcgctgttaagtgactgtttggacataattcaacaaggagagaagctttccaagtttcagaatcatgtagaacaacttgtgtcgttctttctatctttggatcaaattgttgtatgcaaaggtgaattatggccactggaaaggttagcaaaaccattggttgagcaatctttgccagctattaagttcatggacactccatgccttgttaaacttctttcagttttggttgaaatatttgggcccacccccttattttttaagacttgtaaggaaaatgatgaaaagttggatatcaagtcttatctggagtttttcaatgatgaattgctcccttggtgtttggatggaaaatatagcacctgtaactcaaagattgatttgttactttccttatttcaagatgaatccttctttgaccaatggtgttccatcatcaaatgtacgacaactgaacaaaagcagtccgttgatgataagacctcaaatattctgggacgatatgaattgcttacactgttacttcagaaaatcagagaaaagattgctggggggaagctaagaaatttgcaggaaaatggttatcttctgcaacatttgcgtcttgatatattagattctactgcagcttctgtcctctgtgatttgcctgcttcagattgccaagttagttttatatggaactcaaacacgagcgatttgttgcctttgttgataggcttattctcaaacttggctttagtgaagtggttttaggtattccaggaaatatacagtctgccacatcacaatcaattgatatcacttcacctgtctcttccttgtccagagtatgggtggctggtgaggtcctttgcacttggacatggaaagggggctgtgcattgaaaacattcttacctttgctggttcagtacatgaaagacgagtcatatcttgagatcaacattgtgccattgttgcttgatacactgttaggtggcgcccttatgcatgatagtggtccgtgggtactgtttaatgcttggcatctttctgacaacgagatcgataaaattcaagatcgttttcttcgtgctcttgtggctttgttatttactattaatacaaatgattgtctctggagagaatctgatgcacttgtattttttgagcaactgctgagcaatctttttattggctcatcagttaatagaaaatgcctgaagattctaccctatgttatgacctccatcataaaacagttctcagccttgaacaacggagattcttcgtatgctgatttggtgcggaaaagcatacagagttggcttgatgcaaccatttcttgtctgtcatcaagctcaagggaggtacctgtgcaagatattgaggactggatgcaagtggtgttgtcttgcttcccattgaggataactggaggagcccgggaattggtagctgtggttgagcgagagatcagtgatacagaaagatcactgatgttgactctgtttcagaaataccagattttctatggtagtacagcttcatcattggtcactagtggaactgccgtatcaacgacagttgaattactgggagtgaaactgacagctgttttggttggttattgctggagcaaccttaaggagaatgattggcattttgtgttccgcatggtattcaaatgcattgaatcgtctgttttgcttgtggaagaaatgactgatggcataaatgatgccacaataaaccaggtatcaagtgaagatgccttggagaagcttaaattagtggttggcactacagataagttaacattaagccttgcagaatctgctttggttacaatgtgtcagctcaaccatctttgtaatatccaagaagcagaaaactcccagtgtgtacagcttattaaatcaggggactatgctgagagtaatgacaagatggtagagagtgtcctccgtttgttcttggcctctggtgtttcagaggcaatcacaaaatcttgcagtgaagaggcttcgtctgtcataggttctagtcgccatgcttatttgcacttttgggaacttgtggcatcattcataaaaaatgctccactgcaaagtagaaagtctgcacttgagtccatggaactgtggggactgaccaagggttcagtcagtggactatattcgattcttttctcctcacaaccaatatttcacttacaacttgcagctttctctctacttctctctgagcccttctgtcaactttcactggttaaaaattattcaatgggagaaagttgctcatctgctcagcaatctggcacaagccaaagtgctgagttgatgccagattcagacaagacagtgcatctaagagaggaactttcagacttaatcgagttcccaacatctgaacttctcaaaactgatctgacagctcgagatagggttgatgtattcattgcctggtcattgttgctgtcccacctgcaaacactaccagcatcttccagtatcaagggagatgtgcttcaatacatacaagaaaagcatatcccagtaaaggccgctgcaccgaatgggaagaaaaaggataccgagctagcgcctgaagcagaagctgctgccaaagcttcgaagaatgccatagctacttgttctttgcttccgtacttggagtctctttggcccatcgggactttgcagatggcctcacttgcaggctcactgtacgggatgatgattaggctgctgccttcttttgtgcgcacatggtttactaccttgagagaccgttcattgtcatactcaatcgagtccttcaccaaacaatggtgcagccctcctcttcttctagatgagttttctcaggttaaggagtccgtatacggcgatgagaatttctcggttagcgtcaacaggtcggctttcgagatcgttgctacatacaaaaaggaggagacaggaatcgaccttgtcatacgcctcccgagctgttaccctctgcgccacgttgatgtcgaatgcacgagaagtttgggtatcagtgaagtcaagtgcagaaaatggctgctttcgctcacgtcattcgtccgcagccagaatggcgcgatagcagaggcgatccgcacgtggaagagcaatttcgacaaggagtttgagggcgtggaggagtgcccaatctgttacagcattctccacaccagcaaccacaacctgccgcggctggcgtgcaagacgtgcaagcacaagttccacggcgcctgcctctacaagtggttctccacgtccaacaaatcgacttgcccgctgtgccagactccgttctagtcctagctctagacacatgcttgtttgttggcaccacaccgttcgatccttcgatgtaaatggcgtgtgtacgcagcgcagtgttcagcgttttggctgttaaatactctcgaaacaggacgggacctgcagagactgagttcagaggtcttataatctacaattaccgtggattcgctagattatttttaggttaattgaacatgaaaatgtctaaattcttaacactta

SEQ ID NO: 23725 - DNA, 4238 bp, Zea Mays
gtctacgcatcacgttggtcgttgggctcggtctcgtccgctcctgctcttttctccgcacccagcgccgccgcgggcgattctagggtttcgtcgccggcggcaacaacctgcctgtagcgattcgacgtaggcatccctgttcctctcctccggaggcctgtctcctcgccatctcgtcggtgtagcctgagtgtgggtccacgccctgcagacccacgacgacggcctgcagatccagtccacctccgacgacctcgacctatctgcaacttgtggacagcctgcagaaacagctcgtattggaggctacacagaaaaacctgcacccaaaagttgtaaagctcaccaagaaccttgcaggataacacaagtgctgaattttggaaatggatcatgggcgttatgctccacaacatggatgggagaacaacagtgtaattgcagttttttcctttactaactactgaagatgatgaatagcagaattttggccttgcggttggcctgtgtatccagcgttagttgtaaaggagttcaagaagaggctgttgcttaaatggattggatttacctgcctgttctgtagaatttgttgctgactcgacttattctgttgaatctacaggcaccaaatgggtatggtgtaattaatgagccagattttaggtctggtggatcctacaatgctaggagatctgtggatgaaggctttcctagagattcatatggaaggggtgcattctatcatgatacacatgatagaaatatgtatgcatcaccaccctctgccggtggaatgtggtctcagcctcgaaggaatcatgatgaggactatgcaactgcaagagaccatagaagtcaccgtgattttggtgctgataggagcaaaaggattggaagcagagaacgggcggagtttcatggtgagtttgaagaccggtaccgcagttctcaccaaagcagggaggacagctatgagagagatcatgaatatggtcgttatggttatgattcggattatgaaagaggcaagagagatagtagctggagaagacgtgattcatgtgacagcgaacgtgaaaggagtggattaagtcgtgaaagagaggaaagcccgtacacgcgccatagccgttctcgatcacatgggcgcgatgaccgatcaagatcacggtctagatcaagatctcctcgtccgagaagtcatggtcggaaccaaagagatggcctgtattatgataatcgatttgacagaagaagggaatatgattgggatgatagggggcatggtgattcagtggctccatctgccactgttgttgtcaagggactgtccctgaagactaatgatgatgacctatataagattcttgctcagtggggacctctacgcagtgtgcgtgtgatcagggaacggaattctggcatgtctcgtggatttgcttttattgacttccccactgtggaagcagcccgtagaatgatggaagctacaggagagaatggtctcgaaattgatggcaggaatgtgttctttcagtacagtaaaccaaccggggggatgggtgggccttctcttggacaagaaaattttacgaggcctacttatgggcacaggactgctgctgcaccgtgtgactggatttgtactatatgcggatgtatgaattttgcccgcaggacctcctgctttcagtgcaatgaacctcgtactgaggatgctcttccagctgatgcgacaggttccgcttcacactttgggagaaggggatctgaactaggtccaactcatgttttagttgttcgtggcttggatgaaaatgctgatgaggaaatgcttcggtacgaatttgctaagcacgcaccaataaaggacatccgccttgttcgggataagtttactcatgtgtctagaggttttgccttcgttcatttccattcggtggaagatgctacgaaagctctggaagctacaaacgggattacacttgagaaaaacggtcaggttttgcgtgtagcatatgctaaaagtacacatggacctgcatcagggggttctcagtcaaacagccttgctgcagctgccattgaggctgcatcatttgctcagcagtatgatgccataggttgggctccaaaagagtacaatcctgatgacaaacagaacaacaactctgaatctcaaaaagatggcagcacagcacagtcgggatttgtttgggatgaaaaatctggttactactatgattctgcatctggattctattatgatggaactactggcctttactatgacagcaactctggagtttggtattcatatgatcaacagactcaacaatatgtcccttgtaatgaccagagcaacactaaggcagccggggaggcggccagcgaaaacacgaaaacctcagatagtaatagtggcaaaaaggttgtgatctctgcgcctgctgccacaattaaacaaagtgagaaaacttcacttcctgacgctgttcaagctgctgcaaatgctgcactggctgcagaaaagagagaaaaggagaaggcaaaagagattaaattggcctcaaaaaatagtctcatagctaataagaagatgagcaatgtcctagctatgtggaagcaaaggaatcaagaagggcaggccgcacgaattgtccttgatgacaaagaaccagcaaattctgatgataaatttagtcattcacgtagtggaactggattctctttgaaaagcaagccaaattctgaccttgaaaatgctatgggcaattctcttggccaaggaatgacatcgactcaaacattggattctgttgtaaagcctagacctgtcagtaacagcttagggactacagttatgggtgtcataagaggttctgctagaggagtgatcaagtcagatactacgtttcacgcattatctgatgctggtagcactgattcccgcaccactataaccacaagagcaagtgggttaatgacaagttctgaggcacttataactcctgcacccttcaaaactgatgtgtctgccttagtctctaatactccatcgggagtttctgggagtggtaaacgtcggttttctgaggcaccgggacaatcccagtacagggatcgagctgcagaaagacgaaatctgtatggatcatctcatggcactgatactgttggattggattcaagtaagaatacactttcatacgtttttattgcgtgcaattgctgtcattttcccatactgtccgtccagaatttaattttcttattctcatcattatcattttgctgaagcatcgttggcagtatgcttagatttacattagtgtttatataatggcaactttgtatttctagggatttttttgttaccattggaatgtatccttgacccaacatacagtttagggatgatgttttcggttttgcttgtaagatttttattgattttctggaaattacctgttgtcaagctggtgactatccgtcccgaaagggttcaagtgagatagggtcgatgccgtttcctcctggtgtgggtgaacgttccagtggtgaaattggcaacagcgaaaactatgaagttattaccgctgatagagcaatcgatgaaagcaatgtgggcaaccgcattctacgcaacatggggtggcaggagggactgggtctcggaaaggatgccagcggtatcaaggaaccagtcctggcaaaatccgtcgacgccagggctggactgggaagtcagcagcggaagcctgatccatcccttgaagcccaagccggggacagctacaaaaccatcatccagaagaaggccatggcaagattcaaggagatgtcttagctacactgttttatctattttattgctgcattttgtagtccgtttttaacagcatgcatttttttgtttgctcgtgtgttttttaaataaactgagccgctgaattgtgatttattatcctgaaaggggcactacatagttcgagacctggatgctttggttcccttgtgtgttagttttcatttgcacgacctatgtgcccgggtgttcataagttgatttgccacaatgtggtcgtagagtctcaacatcaggtcatatcacatatcgtttttttaaacggtgagcatgttttctccattattactggatgaagagaaaggttcttcttggtttgagggaagggtgatttaagggattaagattctttttagaaaaatac

SEQ ID NO: 23726 - DNA, 2907 bp, Zea Mays
ctagcaggtagcagcagtcgcttccgtcccccttcctcttgtattcgcttcgccgcccaacccagcctccaccgctgccttcccgaccgttctcgccgccgctgtctcctcgcccaccaccccgcacggccggcgaccagcgcccacgcggccgctcgatccaaggccagaacgagcccaccacgatccgcatcacgccgatatttttcaggttgttggtacggatctagggttttcctgctgcggattcgttcgattcgctcatggccgctgggcgccatgggggttacagggactacgaggagagggagcgggagctcgacgcggaggcctccaggaggagcaaggagcagcaccaccatctcggcggccgccaccgcgacgtggaccgccgccgcgatggcgggcgcagcaggggtggtagagactttgccaacggccacggtcgccgacgttcgcccccgcccaggagccgcctcgcgggaaggcttggtgaccgtgagcctggcgaggtgctgagcggtagcgcatctgatgactccggtgggaggtcggatagagggagggaaaatggcgtgcgcagttctagcagggagggcgacatggtggcaggcactgggatctcgtcaccgatcaagaagaggaaattctcaccgataatttgggacagggatagcccaaagccaccgcattctggtgcagccagggacaagaaatcggtagaatctgttccttctgagctccctccgccgccgccgctgccacaagaccacatcccactgagcttgtctgtggagaagtcacctatggatgtagaaactactgttggtacagagagtgctgagcagttgccggaacatgaggtcaataaggtgatagagcaggaagaggactatccaagtccaacaatgaggaacatatcgacttcaagatgggcgggtgcaaatgatgatgaggaaggtggggcagctccaatgaagaagagaagtgtttcacctgcagactcctctgtaccaggtcagtggaaacgagcaagcccagaacctggtgaagtctctggaggaagggcaatgtctaggtcatctgattcagggaaaataggtaatgatgagaaagaagattccgaggtcgataaagatgactatatggatgttgacagggagcatgctagtgacagtggtacagaaaactgtatgtcggatactgactcagacaatgaaatgtgcaggcctgaaacccctgaaccagagaggccaccacacaggtgtatcaatatgcttcaaggttgcagaagtgttgatgagtttgagaggctcaacaaaattaatgagggaacatatggtgttgtatacagagcaagggataagaagacaagtgagattgttgcattgaagaaggtaaagatggagagggagcgagaaggtttcccattaacctctcttagggaaataaatatcctcttgtctttccaccatccttcaatcgtggatgttaaggaagtagtagttggaagtagtttagatagcatttttatggttatggagtacatggaacatgatcttaaaggtgtcatggagaccatgaaacaaccatatacacaaagcgaggtcaaatgtttgatgcttcagctgctagagggtgtaaaatatctacatgacaattgggtactccatagggatctgaagacctcaaatcttttgctgaataaccgtggtgagttaaaaatatgtgattttggactgtctcgtcaatatgggagcccattaaaaccttatactcaactggttgtgactttgtggtacagggccccagaactgttgttaggaacaaaggagtattctactgctattgatatgtggtccgtgggctgtataatggctgagctccttgccaaagaaccattatttaatggaaaaacagagtttgaacagctagataagatttttagaacacttggcacacctagcgagaagatttggcctggctatgctaaattaccaggcgtgaaagtaaattttgtcaaacaaccgtataataggctaagggataagttcccagctgcatctttttctgggcgaccaatcctgtctgaagctggttttgatctattgaatagactgctaacttatgatcctgataagcgcatatcagcagacgatgctctgaaacacaaatggttctctgaagttcctctgcctaaatcaaaagacttcatgccaacatttcctgctcttaatgaacttgacaggcgtaccaaacgttatctgaagagtcctgatcctctggaagagcaacgtctgaaagaactgcaagggaacataggcaaccgtgggctttttggctgaactaagagtacttgattggattcctgtccgtactaactgttatgcttcaccctgaatccacgaggtcagatgtcttctgaggtgaggtgccatggacatgaagtatcacatcttctcggtgtctagcagcgactgatagtgttctttagcaggcttggtgccggtttgagtggataaggtttctccttgtggcccatcatagaaattttgttgcaggattaacactccatccagattgatcataaaagcaaatataaaccgtcttcatcgtaaggtgtgacatgttggctttgaatgggtacaccagtttcacctttggaacttctgtatgtaaaatattccagattggtacgttgtaaacaatccccagtgtgtcggatttaaatttaaataaaacatcatcattattagttttcttcatgctccttgtgccttttcttttgatctttgcattttgtttgcaagagacgaaagaagcgcaggggaaggaagccttttgcttttatcaggaaatcaatgacattaatacaacttagaaggtgaattaattgtgagatatgtc

SEQ ID NO: 23727 - DNA, 1418 bp, Zea Mays
cttctcatgtcagctgtacatcggcctacaaaagaagaggcatttcaccgatttattgggcagccagtttcaataatcttttctagccgaacggatgcaggtgttcatgctttatcaaatgtttgtcatgttgatgttgagcggataagtaaaaggaagcctggcgaagttttaacacctcatgagcctggagttgtaaaacgtgctgtgaaccactttctactgaagagtgaaggtgacataatggtgactgatgtctgctgtgttgcaccagattttcatgctagatacaaatctctagagcgcacatatcactatcgcttgcttgctggacctgaatcaacatctgtttttgagaaaaactctgtttggcatatatctgaagatttggatattcagtcaatgaagaaagcatgcagcatacttgttgggcatcatgatttcagttcatttcgagcggctggatgtcaggcaaactctccagtgcgaactctggatgaacttagtgttacagaagtattccctttcatgttttttccttcaagtgtagaaagatcagagttggaattatcaaatgtctctcttgtttattcaaggaaaccagacatggaatcttctgggaaaggatctgatggttcctgtaccagtagtgtgaaatcagattttgagaatggaaaagattttggaaagcggtcaaggcaccgttgctttgttgttactgcaagggcacggtcttttctttaccaccaggtaaggttgatggtcggtcttctaaaatctgttgggactggagatctaacaactgcagatgttgagagaattctggatgcaaagacggttactgctgcacccagtatggcaccttcttgtggtctgtaccttgctaacgttaaatatgatctgaatacctgaagacaagttttatctagtggcttctgttggtgggcctccagattttgtcagctgttggctatcaaaggaattatatgctgccacttgccaaagctttcagttgcctgttttgtccactgaatcttgcatggtgattgaaaacctagaattaagtttatctgtcagcacaagagccggcttcattctcttcttgtacacagagctcttctgcatgttcagaaacaaaataggtagcttcattttagttaagttcaactatccactctttaaatttcagctggatccacccgattttgttgggtgtacgtagatttgacctggtaggggcaaaattttatttcttggttttctcatgactgtacttggttcttgatatataattaattagccaaatgcgttgtgtgcatattgaaaatattcttttctgttccttgataaattacatcgagcaagactgcaagagaactttcttcaagaaaatattcttttctgttccttgataaatt

SEQ ID NO: 23728 - DNA, 1566 bp, Zea Mays
aggaagatctcaggaagatagataactggcaatatattagttgtgtcaccctatggtttcggtttctgtgttgtcactataaggattacaatctccatcccttattttctcaagttcttcaagtaataagaggagtggctcacttattcccaggcacaaggtacttaccgttgagactgaagcttgtgcagatgctgaacgagctttccacttgcagtcagatgttctatccaattccatcgttgctctttgactgcctagaattaagagaagtttctcagaaagaacaaacacaaagaacaaagatcaacttttcgtcgttgtagaaggtgccaaagaacctgctgaaatcaagggattttcaagaggagtgtattctttcagcgattctgcccagtggagttaccatgtttccttcccagaagtagccaccattcctcttgtcctcttgaagaggctacatgagcagacaacagttgaatcacttcgccatcctattaagtgtttgatagaccaggtgacggagaacaaggattttatagaaaggaaaagagaggttgtatccttttcaccaaatgataaggcgtcagttgatagcttccttcaggagaaggtcagcagaaccgcttcattcactcggttctatgcatccgtagctgaaaaccgtcaaccaaaatgtaatgtcataaatctctactactccttatgtctttagtgtaggcgtccacatctctttgttctaccatcgcgcgctccgcccgcgattcccctccccgcgcccgcagtccccgccgccatcctcgcggccgcagccgagcacagccgccacgcccgcagtccccgcgccagcaacgctcgcagtccccgccgccgtcctcgcggccgcagtccacgcggaatgccggacagggacgtcgtggcccccgcgggcggcggtgaccggaaggcggccaagctcgggagctggagcagcatgagcagcaactgcggcagcaagaagcggaagagcagcagcagcagcttcgggaggagatccacatccacctgcgaggaaaggcagggggtcttccgcatgctcatgagctggaaccaggagagccggttcagcaagaagatcaagacgacgacgagcaaagaaagatgaacgaaacgaagtgttcttagcttggtgtgactattcgggggttgcttgctggagggtttttgttcgtttagtgtctagccttagcttacttattacttttgttagtactctactagcagagtacatgcatagagtcagtggtgtggctgtggcgtggatcagatcattgatttgatcgagctgtacaaatagcgaggcgatacatgtcactgagttgatcagttgacaaggtggtttggaccatgttgaggcacggagaaacttcatccctaagttttagtttgtctggctttgctcgtcattttgtacttgttcttctcacatatttgttgcttagaatttacttcaaactcacgtccttttagcaatataacacacatttgtacatacattatctatactactatatgtttccgttgcaa

SEQ ID NO: 23729 - DNA, 1164 bp, Zea Mays
gcggaggacgaggatgcgccggcgacggcggcagcgcagacggtctggtacgaccccatgacttcgccgcaggcgccggcgccgcagcagcagccggcgatagaggctgcgatgcggggggcctcgccgtcgatttcccaacacctacttgctggtaggttgctgcagcgacgagatcacccacatgtacaaaggaaagaccgtcatgaccgaggacgagcgctacgaatcgcttcggcattgcaagtgggtcgacgaggtcataccggacgctccatgggtgatcaaccaggagttcatcgacaagcacgacatcgactacgtcgctcacgacgcgctcccatacgctgacacgagtggagctgccaatgatgtctatgaatttgtgaaagccatcgggaagttcaaggagacgaagcgcaccgagggcatctcgacgtcggacatcatcatgaggatcttgaaggactacaaccagtacatcatgcggaacctcacccgcgggtacagccgcaaagatctcggcgtcagctacgtcaaggagaagcagctgagagtcaacatggggatcagcaagctacgggagaaggtgaaggagcaccaggagaagttccacagcgcggcgaagatcgctgggaccaaccctgtggagtggatggagaacgcggaccgctggatcgttggcttccttgagaagttcgaggaaggctgccacatgatggaaactgccattaaaggtcggattcaggaggggttgaagcggcaaggcaggtcggagtcaaacctttctggagaggagtccgactcgtagttctgtgatctcccccaaatgaagctagacaaaaggagaactggagatcatttcccacagtctgtgtaacagtatgagattggttaattagcatgttattgtaggacgccatggatcattgtttagttgtacctggagattatgtagttttgaagaacaatcgtgtttctgtatgcgatcagttgctccttcattgagcatatctgcatctggcacctgctaggaagtaggaactgctattgttttcatagaactgaagatacgaagaatctgacccttttcttctgagtatgtgccgacctgtgtgttgcaccgccaaatgaactgaatattgctcatgcatctcttgttta

SEQ ID NO: 23730 - DNA, 3724 bp, Zea Mays
ccgtgctcgtctcgtcgagtcaacgaactccacgcgttacaaagcaaaactagaaaacccggctccgcagggttcagaccgtaaaaaaacacgcatcatcccctcctgtccgagatatttgtgcagcgccgcaaaagcgcatatccccccggccctctcgctccgccgctccgtgcgagctcccgctcccgacacgcttcccgcccgccagatcggtcccgcgcgcctcttctgcctgcatccgcgcccgcgaccaccgcttctaggtttagggttccggcagagtaggcggtgagatgggtgtgccggcgttctaccggtggctggcggagaagtacccgatggtggtggtggacgtggtggaggaggagcccgtcgagatcgagggcgtccgggtccccgtcgacacctccaagcccaaccccaacggcctcgagttcgacaacctctacctcgacatgaacggcatcatacacccctgcttccaccccgaggataggccctctccaacaacatttgctgaggttttccagtgcatgttcgattacatcgatagactcttcatcatggttcgccctaggaagcttatgtacatggccattgatggtgtggctccacgtgctaaaatgaaccaacagcgttctagacgattcagagctgcaaaagatgcagctgatgcggctgcagaggaagaacggttgcgtgaagagtttgagagggaaggaagaaggcttcctgcaaaacaacaatcacaaacttgtgattctaatgttattactccaggaaccgagtttatggctgttctttcagttgcgttacagtactacattcatcaaagactgaattatgatcctggatggaaaaaaatcaaagttattctatctgatgccaatgttcctggcgaaggggagcataaaataatgtcgtatattcgtggtcaacggaatctccctggatttaatccaaacacacgccattgcttatatggcctggatgcagacctcataatgttagctttagcaactcatgaagtacacttctctatattgagagaggtagtttttacacctgggcagcaggacaaatgcttcttatgtggtcaggtggggcatctagccgctaattgtgaaggaaaggcaaagagaaaagctggggaatacgatgagaaaggtgaagctattgttccaaagaaaccataccagttcttgaatatctggacccttcgggagtacttagaatatgagttcagaatgccaaatccgcctttccagattgattttgaacggattgttgatgatttcatcttcatgtgctttttcgttggcaacgattttcttccgcatatgccaacactagagatcagggagggagctatcaatctattaatggctgtgtacaagaaagaatttccttcaatgggtggctatttaacagattcttgcacgccggatctgaatagagtcgaacacttcattcaagcagttggctcttatgaggataaaatatttcagaaaagggcgcgtttgcatcagcgtcaagcagaaagaataaaacgggaaaaggcccaagcaaagcgcggggatgatctggatccccatgtcagagatgatcttattgtacctgtttcaaatttccgagggtcccgccttgcatctggagcagtaccttcaccatatgaacagaatggatctcagagagaaaggtacaaccaaactcggaaagctccaagagtatcatcatcaggttccagcattgctgctgctatcgttgaggctgaacaagatcttgaagcacaggagcgtgaaaataaagaagagttgaagtctatgcttaaggatgctcttcgtgagaaatcagatgtcttcaattctgaaaattcagaggaggacaaggtaaagcttggagaaccaggatggagggataggtactatgaagagaagtttggggcaaggacacctgaacggatggaagaaatacggagggatgttgctctcaaatatactgaaggattgtgttgggttatgcactactactatgaaggggtgtgctcatggcaatggttttatccttatcattatgctccttttgcttcggatttaacgagtctgagtcagctcaatataactttcgaacttgggtcaccattcaagccatttgatcagctaatgggggttttccctgctgcaagtgcccatgcacttcctttaaagtatcggcaactgatgactgatccaaattcaccaataattgatttttatccaactgattttgaagtagatatgaatgggaaaagattctcttggcaggggatagcaaaactgccctttatagaagaagatcggttgctggctgagattaaaaaagttgaggatactttgacgcctgaagaagcaaggagaaacagtaccatgtgcaatatgctttttgtgaatggcgcccattcactttctccctatatctactctctcaacagtaaattcgggcatctgccagacaaagaccgtggtgcaatcaaagaaaaacttgatccttcagctagtggaggaatgaatggttacattgcactctgtggtggggacccgtcccctcctgtcttcagatctcctgtagatgggcttgaggacatcatggataatcaagtgatatgctcaatctacaagcttccagatccacacaagcacatcgctcgtccaccagctggtgttatcatacccaagaagagtgtagaagccggtgatctgaaaccaccaccagtgctgtggcatgaagacagcggtaggaggcctcatgataacaaccaccggaggccttatgataacagcaacaggcaaaacccatcaggagctctatctggccgccaactcggggaagctgcccatcgacttgttgtaaacagcttgaatgttcggggtggtgggcaaaataattccccatctatgccatatcagacaatgatgagtggtatgaactatccaaatggaaggcatcatgtgggtaaccatggagtgcctccgagaatggaacagcctgctggtcgttctggctggcatgtttctgatgataacatgaccaatggtcaagcagcttatggtcagtatcagcctgaaaggttgggaccttcccggcatgaacgaggtaaccatggaaggcaacagtataacccatatgcaagagataaccaccatgattctagtggaagagttcagccacctggataccatcaaaaccgtggcaacccacagtctgctgctccatcagcaggtcctggactgtatgggccataccccccagcatatgctggtggttattctgggggataccagcctgtaccatatgggggtcaacaatggcagcagcgaccttatggaggcgggacaccccccacaagacctaactcacaccaatcacaaaaccgttatggtaccttagacagaagttctaacaagaggtcctcagatgtagaagaaaatgagcttttggaccttgatcttgacgaccttgaggatctcacagatgccctcggcgagtcattcctggatttcttccttctctatttcttgggcggctttggtatgtcgggtattgggttatttcttgaccgctacttttggggagatatgccaacaggtcatatatctggatgctcatcaaactctgcgagtcaacgtttggttccggaggcagttaggagtggaacgactccgtctcagagagccaattgatt

SEQ ID NO: 23731 - DNA, 1206 bp, Zea Mays
cctcaattttggtggaatggctccattcctcaaatttcaacaagaagataaaaaactatctaactccgaggcttttctgcgtagatcagagactcagcgaaaggctgagcaaaaggtccgcgaagaaagtgaaaggctgcgacagaaggaacgtgagcaaattgcagagaagcgtaagcgtgatatgacgcttcgcgctcgtgtagctgctaaggcggaagaaaagaggttggagctgttgtacattcagtggactgagcaccataaaaggctgtccaatttcttaaggttatttttatttctggtccaaaagtgtccatattgacaattaaattgagggaagatacattctaattatgcagacttgatgtttgataaccattagtgtatctatttacattgtatactgatgaacaatatttgttccatgtttgactctatcttattacccccttatgttggcaggacaaaagctgaaccacctatttactacatgccaactaaaccaattattgacgatccagccattgttgaacagaacaaggaaaaggtattcgaagaatggaaatctatgcgcagggatgagctgactcggttccaaaagcaagttgaggagcaatatctctcaaatgtggagaggcagctggagaggatccagaatgcccggaacgctcgaaaggcgaacgggcatgctaacatgcaagaaatggacaaggagctggacacacacagggcggagcatggtccgaagactcggcgagttcctgaggagggcggtaatgatgacgacgaagacgcagaggacatggctgcggaagacgaggtgatggatgaagttctgggcatcaacgatgggatcaacgaggacccatccaagccgtccgaagaagctactactgaaggtggtgagcctgcacccgaggaagcacaataggattctttgttcacacaagctaggcacatagccgtacgtaccattccgtatgcttagttgccgtattgttgggaactgtttgtgcgtgtatttctgttagacgttccccgctggtttaggctgtgttttatattgctgttttgtctttttgaatgttgagaccatacaactgtcgatcattatctcataattgttgtaaaaatactataattgataccttgatttggacgtcggtggcgttaaacgtttcgggttctgttcttcactacccg

SEQ ID NO: 23732 - DNA, 133 bp, Zea Mays
tttggtttagatatttatgaattcacatacaaaaatatataatatcaagtagtataaaagatctcaagtcgaacctaagattttttcatttctacggatgatttctatttgttttggtgtgtgtggttggagg

SEQ ID NO: 23733 - DNA, 490 bp, Zea Mays
gctttccggtgacactacttttttatgtactactttgctgggcctgaaaacgggaacaaaaaaacaaaaagtatgaaagatcagcgaaaggaaaatgctacttcaactgaggcccacacattgttctctactaacctgtgttgccttccttctttggtgtatctgttcttattgtgtttccccaactgtaggctctctgtcgtggatatcctaccaaaatttgcttcttacttccattaatgtcgctcactgcgtttcgaagatgcaccggactatcagtacctgaagagattgttcagagacctttttattcgggaaggtttttagtttgattatgtttttgactggaccattctaaagtaccaacaggcacagatgaccactgctccacctcgtgcaattgacatattgctaagaatctgccacattatgtttgcttgaggtattaatttatccaggtgtttaatgctggagtacagttagaagatcc

SEQ ID NO: 23734 - DNA, 1351 bp, Zea Mays
cagaaaggtccccgtagaaattcgaaaccacaccaccacctggaaacccagacaaagcacgagccacgcacggcccccgctgcctcccttccgccgccgccgccgccggcggcgcgccaccgtcgctgctctcccgccttcaccgcgcccaactccaatccttgcctcccccgcgcgcttcagcctcttcactccccatcgttttcgcctggccagacctcgcctgccttacgcctccggtcggattcttcgccgtccttgtccccactgggcaccgctggggtggagcggagatcggatccgccgggagctgattccttctctcgcagtctagtttgacgcggattcatttgctggtcggcatagcatgatcctgcggtgattgcggatagcttgtgcaagctggtggcttgggtgttgtctttttaatctggcctaaagatatcctgagacggtagcgtcacatggatgctagtacagaggttactgatgctattggtgcggtgggctttgacaatggggccgcggggaagttgccgcccagtgatagtgtagaggggcacgcagaagaacacgatgtgctggctgatggagcccattcgggcgagagcgaggtgatcaacccatctgaagaagtagaaatggaagccacctcgcagtcccaggacataaagcctcgagttcctgagggggttcaaggccattcaatgaaggttggtactaaatctcagcgacagagccctcgaggcggggataagagtcaaactaggaaaagctcttttagtccttcttatcctaaggcgcccattgcacgggtttctgatccagatctagttgattgctctttgagcaatggtgatgctggttccagtaagaaaaaggccgaaaagagcagtttccgcccagttgccaaggagaccccatcacttgaggactcaaatgagaagaaaaaaactcagaaggcatcaaaccaacattctgtcaaaaaggatattgaagaagaatcaaatgaaagtgtgaaacctcaaagggttggcagcactccttcatatggatttagttttaagtgtgatgagagagctgaaaaacgaagagagttctactcaaagctcgaggagaagattcatgcacaggaactagagaaaagcaacttgcaggcaaaatcaaaggaaactgaagaagctgaactcaaaatgctgagaaagagtttaaatttcaaggcaacaccaatgcccagcttttataaggaaccacctccccccaaggttgagttgaagaagtgcggtgctccagccgccaacctacagacgcatcgcgcccacacgccacagccgtggtgccgccagccgcc

SEQ ID NO: 23735 - DNA, 352 bp, Zea Mays
agtagaaactctttttgtgactttgatagctgcccctcaaccttttgagttattttttcagctacaagaatggactgccatcacaagaaaaaaattgatattaaccttaacaagacaaaaggtaaaaccaccacattaattattgaataactataaagtatctgcacctgcaagtgtctatctacaagttcatttgcctttgaaagtctaactttcaagtcaactgaatccagcattgaaagctgctcctcaaaacttatctcaaagctagcaacaaaaatatcagctagcctgtaaacaggaaccgtatcaaggagcacctttgtcctaccaactgtcttctgcttctgca

SEQ ID NO: 23736 - DNA, 2075 bp, Zea Mays
tacataccttgccttaaatatatagtttgctgacatgtactgacactcttctgggcggttactatgctggtttctcgaagtttggttttatttagttgagggaagtgccttgggcaccttgatgaatatcttgtaagctggtgactccagcagaactaaactttgttttctataagttgggatcaatggtctttggtctaaaaaaggtaaaagtaccttggcatgtacattaggccgggagctccacacaagagggaagcttgcatatgttcttgacggtgataacttaagacatggtctgaacaaggatcttggctttaaagctgaagatcgtgctgaaaatataaggagagttggtaagtgtctcaccaatatagataaaaaaggacagacctagtgctggtggggaaggaataagacaagccttaccctgcattgcatcgaacccgaacctttggctcagtggaaaggcttcccatcacttcgctaggcctgttcttctgtctcgccaatatagatgtctattatatttcaaggaactcccacgaaagtaaaagcatgataaacaagtcttgcttctgccattattttatctttccagcattctgcagttcacatttttccttgaatacacgggagagctgtgtatctttgtattaggagtgaaaaaagggggtccaatacagactacagaacttcgcctcctgttctggaccaagcagagaggactgccaaaacaaacacgactactgagactaactaatcagacaataactgtaggacctaagtacctaaccaacactgtgaaaactactaactagcccacccctcgaactggactcagttctttaagatgtttggccccggcaaaacaccaaagatggtgttctttagcaaaattgtgcagaggccttctgcatgttgggctgaacaacggcattcctatgctttcaaagagaccaagctcctagaatgatggccgagataactccttgctggaccagttttgagaggtgttcaatgctctccttcaatcagcaaaagaggattcagcttgacttggctcttgaggcaaagcccaagtttgaaagaattttaaaccagaattctctagtgaaaacacaagtggtaataatatgctggacattctcctcttcttggtcacaaacacacattattgagggcgggggaggcctttttttgctaaccggtgaagtagcaaagttattttcagacgctggccttgtatgtattgcaagtttgatatctccatataggagagaccgtgaatcttgccgtgcactgttgtcggatggtagctttattgaagttttcttgaatatgtccttggaattatgtgaagcaagggacccaaagggcctctataagcttgctcgtgctgggaaaataaagggttttacaggaatagatgacccttatgaagcaccactgaattgtgagattgagatcaaggaaatagatggtgtatgcccttcgccttctgacatggcggggcaagtggttacttaccttgaggagaaaggcttcctgcacgagtaggctgacgctgaatcgaagctacatccggggaaggtttcaatcagacaagcgcagaataagtcaaaagcgctgccagttaccgtatggttacatagattgatctggatgcctagtatttttctttccgcgcttgctctaccacaagttccattcagtttcattcagatgagcctagatggttcctaatttctttgacctctggaatagattacctgtaatgcaattctgataacagcttggggcagtatcgatttgtcacgggaaggtacgcctaatgttgagagaaactgtattcttgtgctccactttctgcagtgccgacgtgtaccctttccgttttactaaattataattagcttcccttcatttataagtttatttattttttatacactattcttgttacatatctaagtatgtctggatatatagcaaaaaaaaaaaaaactaaaacggattaaattttgaaacttcgaaccgagatagtacagtttagacacgctggaacatgcggg

SEQ ID NO: 23737 - DNA, 1934 bp, Zea Mays
ctgtcctccacaacgcggctcggttgcgaccacggcgaaagtcgcgtagccacttctccgaatcgagccaaattggctcatgcgccaccagctcctccctctccaccccgatcgcaatgccactacgtgatcaaccccaaaggtcgccgtgaccgtgccggagagatctcgcgctccgggcccgttaccgcgcagctgtgctgtcgcaggcccacccgttcacccactccgccacgctctcgataaggccgccgcacgcggccgcacgcaccgacaagctggagccgccgcagcaggaggcggtgaaaccatcgccgaccaacggtcgcatccgctaccgtacgccctcggcagccgatctgctccccgctgacgatgtcgcggcggatgccgcggcagccacagtggtggccgcgaggatgcgccgctactcgggcgccggagcacggcagcagcagcaaacggaggcggtggccgaccgcgtgcaccggtaccgtcgggtgctgatggtgttgctctcgccggtactcctcatctcgttcgtgctccttctcatgccgcgcgcgccggcctccgcctcagggggtgtgctcctcgccgttggtggtcggaggtggggaccccgggccgtcgaggacggactgaacaagtatgcggtcatatttgacgccggcagctctgggagccgcgtgcacgtgtattgcttcgacgaaaacctggatctagtgcccatagggaaggagattgagctgttcaaacagaaaaaaccaggcctgagtgctgcaaagggtccacaggaggctgctgaatcacttatttctcttttagaggaagctgagaaagtagttccagcagagttgcgtgaacaaacacctgtgagggttggggccactgcaggtctcagagcattagggactcaaaggtctgaagaaattttgcaagcggttagggaacttctccatgacagttctttcaaatctcagccaaattgggtcactgttctagatggatctcaggaaggcgcattccagtgggttaccatcaattatcttttgggaaaattgggaaagccatactcaaacacagttggagttgttgatttaggaggtggctcagtccaaatggcttatgctatctcagagaaggatgcagcaaaggcacctttagtagcagatggtgaagattcatatgtcaaggagctgctacttaagggaacaacatactatctttatgttcacagttatttgcattatggtttgctggcggctagaggggagatcttaaaagctggcgaaggcagtgattacagcgactgtatgttggaggggcatcttgggaaatacaattacggtggtaatacatttgaagcatcaggctcaccttctggtgctagttattccaagtgcagggctcttgcagttagagctcttaaagttgatgagccagcatgcacacacatgaaatgcacatttggtggtgtgtggaatggtggtggtggagatggacaaaagaatctttttgtggcatcctttttctttgatagggctgccgaggctggttttgtggacccaaaagcagcagttgctaaggttaaaccttcagactttgaagaaactgcacgccgggtttgtaaattgaacttgaaggatgcacatgcaacctaccctgatgtctcagaggagaacattccctacctttgcatagatcttgtctaccagtacacattacttgtcgatggatttggcgttgatccttatcaagacattaccttggtaaagaaagtgccttatggtgattcgtatgttgaagcagcatggccccttggtagtgccattgagatcgcatcttcatcatagaaacagcacggcagttctgtgtggcgcatattttccagcagcttcacgagtcatttgaagttgttttgagctgaacag

SEQ ID NO: 23738 - DNA, 372 bp, Zea Mays
ctagagcccgcgccgccgcatttcccagccacgcatgtcgccgggcgcacctgtcaatcgcacgagcgtcgcccactgttcatcttctcaaactgctccatccgccaaacatgcccccacgcccgcactattccaccttctcccccctctctcccttgtttctccctcgccggttccattgggggaccttgcgagcttggcgcagtggctggcggccagggcgcgacggccggcggtgtggcccagccagctgcccctgctccaccccaggcgtggccagccaacgcggcagcacgcccggcgtggccagccggcgcgagttgctcttctcggcacagccagtgcggtggccagccaacgcgacagcacgga

SEQ ID NO: 23739 - DNA, 417 bp, Zea Mays
gccgtcgtcgctgcgtcctcactcggtcactcctcagccgtcagccagtgctgaaggtctcccggtcagccgcccagttgcgcctgcaacagttgtccaatatgaagcgcgctgaagagtgaagacaagggaaaacactgaagatggttgatctattactcgccacattacctatgtaaacagtcttctgggggaaatgaaaatgtcagacttaacgtttgtatgtcgtgtgcctcctttgaacctgagctgtataatttgtaacgcttgaactggggactgatttgagaactgagacactgcagcaatatgttgatgggtcctaagtggcgaatctaatgcatgcgtgttatgccagcaagaaaaaaaagcaaaacgtcttataaatacgaaatagattgagtacacaaagaaaca

SEQ ID NO: 23740 - DNA, 4085 bp, Zea Mays
atggcgcccacactagcggctggaaggttagaagagggtgcaacaacgacagatgctctttacttagcagaaagaaaagggcatgatcaaacgaagaaatcactttctgaagctcaagaaacaaacaaggagttactaaaaaaaattgagaaagctgagaaaaacatagatcagcttctggagaatgtggaaagacttgaaaaagatgcaattacaagagagtctttactgcttacaacaaagcaaagctatggtgacaccgcaaaattgctgcttgaatctcaagagaaaaaccaagagttagtgcacaaagtagaggactcagatagcaaaattgttctgcttgaagattcagtaaaaagactcgaagaaagtactgcagataaagattctttattggctatagaaagacatgaaaacagtgaaaccaagaaagaattagttggttctcagaaaaagattgcggaattgctaactgaagtgcaagatactcgtgcaaatgttgcagaacttgaggacttgattaggagactcgaaggaaaattggcaataactgaagctttattgctaactgaaaaggaacagaatgcttccaccttaaaattacttgcagaagcacaattgagaatcgaagaattaataaaaaaacttgaaggttcagatagaaaatctgatagccttcaggatacaataacaagacttgaacaagatgtcactgccaaagaggccttattgcttacagaaaaggaggcacacgacgcaacaaggaagactctgactgaagctcaggaagagagtggagaacttctgaagaaaattcatgataatgataaacatattcttcagcttcagtttactatacaaaggcttgaggaaactacagttgcaaatgagaatttgctgttgagggagagggagcagaatgacataacaacaaaagcgcacaatgaaagtcaagaaaaatatgaagaattactaagcaaatttgttgatgttgacaggaaaatcgaccttcttcaaggtaccatagaaaggcttggagaaaatacaacaaaggattctctgttgctatcagagagacatgaaaaggatgctattaagaaagcacttactgaggctcaagagaaaaatgaagagttactgatgaaagttgaagatgctaatgaaaaaatagaacaacttcaaactacgatagatatgcttgaagataatgtagctgcaaaagatgtttctttagaagctgcaatgaaggaaaatgatgcaattaggagatctcttactgaagctcaagagagaaatgatgaattactcaagaaaattagtgacagtgaatacaggatccatttacttcaagacacgatacaaaagcttcaagtagatgcaatatcaagattgtcgtcttttgtaatggaaaaacaagaaagtgatgcttcaaagagagctgttactgaagctcatgaaagaaatgaagatttactgaagagaaatgaggacctcctcaagaggaatgatgatctgattaagaaaattgaagactctagtaaaattgtcactcaacttcaggaagctctacaaaggcttgaaggaaaagcatgcaacttagaggctgagaaccaagttcttcgtcaacaagcaacttcaactccaccaacttcagctaaatctccagcttcacgtgcaaagatctcaaggatccatagaagtccagagaatggccataatttgaatggtgacattaggcaaactgaaatgaagccctccactggcacatcagaagcaataacctcagcagctaatgttcctgacttgggcgaccaaaaagattttgaacatggagaaaaactgcaaagaataccaaaacagaaatatcagccttctcatcaccagcagccccaggacgatcagcagtggctactcgcttgtattccacaacatcttggattttctgggagcaaaccagttgcagctctccttatataccaatgccttctccattggaaatcatttgaagccatgaagacaggtgtcttcgacagcattttgcatgctataaactcagccacagaggctcaaaatgacatgagaacattggcatattggttgtccaacttatctacattaacagttctccttcaacgatcattcaaaactactaggacggcaatctcaactccacaaaggagaagattttcatcggagaggatctttcatggaaatcaaacttcaaatgctgggcttgcttatctcagtggtcaatcagttgttgggtctgctggactgccccaagttgaagcaaaatatcctgctttgctattcaaacagcagctcgtggatctaattgaaaaggtttatggcatgataagtgacagcgtgaagaaggagctaaaccctttgcttgaattgtgtatacaggatccacgaacttctcactcgagtatcgcaaaaggcaatcttaatggcatgggtcaacagaaccaactcacatattggctgggcatagtgaaaattctcactagctacttggatgtactgagggtaaatcacgttccatcaattctggtgcataaactcttcactcagatattctcattgattgatgttcaactatttaaccggttacttttgcggcgtgagtgctgttcttttagtaacggggaatatgtcagagctggactaactgaactaaaacattggtccgacaatgctacaagagagtttgcaggttcagcgtgggaggcattgaggcatattagacaagctgtcgatttcctggtgatttctcttaaaccaatgaggacattaagagagatacacactgatgtgtgccctgccctcagcatacaacagctagagcgaatagttagtatgtactgggatgatgtgaatggaacaaacactatttcagcagagtttacatcaagcttgaaatctgcggtgcgtgatgaatcgaatatggccacaagtttttctatattgctagatgatgattccagtatacctttttcacttgatgatattacaaagacactgccagtcattgaggtggctgatgacgactttgtgccttttgtccatgaaaacccaagctttgcgtttttattgcaaagaggggagtagtccatttttcctcaccatggtgacttcacccacctgtggataagtcaggattcctgcctaggatgtacagtacgcgtgattctttttgtaccaggtagcaaggcattaaagattagatgctaggtgagcttataggattctggttttattgatttgtgtgttgattgtccatttgtattcaggttttccttgccattttttttctgtttgtagttatttttttgggcttgtatactaggggctaagggcagaaggccctgtcctgtaagcaaagtagcacaaggttttgctgtaggtgggaaagctgtacatgtgttgtaggagggggagtagcggttatcctgctggtcagggctaagaacgacagttgttgagaaggcaacggttatgccgtttttcctggatgagcagaatatcttgtcctggactgctggacagcagagcagtgcccacggaggtctctgcgcgctcgatcgcgacgatgcggccactatggtagtagatgcactcattacctgttatactagtaatttgctcgcgcctcgcgcaagtcgttaaccgatgagtttatacaattaaaagagtgttgctttagccatataaatacagaagtagtaatatatgtggatacataaacatagaagtgacaaaattatataaacatacaattgtttgcgttggtagataagttcagtagcatcgtgagcagcctagatgtcaaaattttgaagacaacaaaatactggtcttgaaggccacaaaatgcagagcaacattacaatgcacggatccttttcatgatcgtgctcactttttatgaaattcattgcttgttgtattgaatgtatatgtatacattaaggtacaattattagaattgtctcaatatgtaacgaagtaacatgaatagatagctttgcttagcacagaatgtcatgtgaatgtagcaaaaaataagtcagttttat

SEQ ID NO: 23741 - DNA, 2696 bp, Zea Mays
acactttcttagcaggtaactgcagacggtcactgacgtgtgggcattatctaggcttggtccctaatgtcagtgacggagcaggttccaaatatgaagcttcagtagtgtatcgtgagaacacgtcggtgccaggctgccagcagcaacgaagccgcaccaggccccgcactgcccatggacgcacgcctcccggggctctcgtgtccctgtccgtctcccgtttgccgcctccaccgcaacgcggcgcgcggggtggcggtgctctcgcgatcctcgtgtcgattccagcggcgggggtgccattccctcccctggccgttgcccgcgcctcgcggtcgcgcaccggaaccggagccccgccgcgaatctagggttgcctccgcctcgccccctcctcccgagactcctagcggcaggaattaggacgagggtaacaggcgacagaggctgcgaaggacgccccctcgtcgaatgcgccggcgaccgatccgtggaggagcagccggagcacgcaggagttgaagggcaagctttgaaaatgtcatccactgtgccgaagtcatcaaatatcttctggcatgattgcctagttggcaagactgatcgccagaagctactcaaccagaaaggctgtgttgtctggatcacaggccttagtggctcaggtaaaagtaccttggcatgtacattaggccgggagctccacacaagagggaagcttgcatatgttcttgacggtgataacttaagacatggtctgaacaaggatcttggctttaaagctgaagatcgtgctgaaaatataaggagagttggtaagtgtctcaccaatatagataaaaaaggacagacctagtgctggtggggaaggaataagacaagccttaccctgcattgcatcgaacccgaacctttggctcagtggaaaggcttcccatcacttcgctaggcctgttcttctgtctcgccaatatagatgtctattatatttcaaggaactcccacgaaagtaaaagcatgataaacaagtcttgcttctgccattattttatctttccagcattctgcagttcacatttttccttgaatacacgggagagctgtgtatctttgtattaggagtgaaaaaagggggtccaatacagactacagaacttcgcctcctgttctggaccaagcagagaggactgccaaaacaaacacgactactgagactaactaatcagacaataactgtaggacctaagtacctaaccaacactgtgaaaactactaactagcccacccctcgaactggactcagttctttaagatgtttggccccggcaaaacaccaaagatggtgttctttagcaaaattgtgcagaggccttctgcatgttgggctgaacaacggcattcctatgctttcaaagagaccaagctcctagaatgatggccgagataactccttgctggaccagttttgagaggtgttcaatgctctccttcaatcagcaaaagaggattcagcttgacttggctcttgaggcaaagcccaagtttgaaagaattttaaaccagaattctctagtgaaaacacaagtggtaataatatgctggacattctcctcttcttggtcacaaacacacattattgagggcgggggaggcctttttttgctaaccggtcagccatccagcacctatttctaattgctagctaggatgatcttgcactttgctggagcacaggttttccaaatccgcctccatgcctcaaaggtcacagatccttggaagattttgcacttagcagttcacattttgtttcaactattttgaacaggtgaagtagcaaagttattttcagacgctggccttgtatgtattgcaagtttgatatctccatataggagagaccgtgaatcttgccgtgcactgttgtcggatggtagctttattgaagttttcttgaatatgtccttggaattatgtgaagcaagggacccaaagggcctctataagcttgctcgtgctgggaaaataaagggttttacaggaatagatgacccttatgaagcaccactgaattgtgagattgagatcaaggaaatagatggtgtatgcccttcgccttctgacatggcggggcaagtggttacttaccttgaggagaaaggcttcctgcacgagtaggctgacgctgaatcgaagctacatccggggaaggtttcaatcagacaagcgcagaataagtcaaaagcgctgccagttaccgtatggttacatagattgatctggatgcctagtatttttctttccgcgcttgctctaccacaagttccattcagtttcattcagatgagcctagatggttcctaatttctttgacctctggaatagattacctgtaatgcaattctgataacagcttggggcagtatcgatttgtcacgggaaggtacgcctaatgttgagagaaactgtattcttgtgctccactttctgcagtgccgacgtgtaccctttccgttttactaaattataattagcttcccttcatttataagtttatttattttttatacactattcttgttacatatctaagtatgtctggatatatagcaaaaaaaaaaaaaactaaaacggattaaattttgaaacttcgaaccgagatagtacagtttagacacgctggaacatgcggg

SEQ ID NO: 23742 - DNA, 203 bp, Zea Mays
gccttctccacgtgttttgtatctttttgcaaatcgggagcttattagagtttcttttttcataactagctggatgcccgtgcaattattcggctagtatatggttcaaccctaataaaagttaacacataccttggtggcagctcagtcttcttgcacttcgactaccgatttgcggggtaaagtttatgtttttagccaga

SEQ ID NO: 23743 - DNA, 303 bp, Zea Mays
gaggagctcggagccgatgccccgacggcgttgacgaccgtggaggcgcgagcaggggggcgcgccggccatggggacctcctgctcagcgcccgagcgaaggagaggctaagccgcaggggaagctgcaggggagggtgtgtggcgccatgggagagggaggagatcccctgcttgctgtcgtgtgggagaaggagaagttccacgggagagacggctgggagaaaaagaaagggtggcggctggttgatttaacaggacaccgctggcacccgattggccaccgtgggcggcaaaccatct

SEQ ID NO: 23744 - DNA, 1474 bp, Zea Mays
cacccatcaaacaatcctgagtatcgaagattcaacccgagttttggcgcaaaaatcctagaggctgatctagaaattgttatgggggcatgccacgatgaaacacctttcaaacaatcctgatgatttgaactcaatgtctttgaagcctgaactttttgaaggattgaggtttgacttcacaaaagggttgaatcaaaagttttctcttagccacagcgtttttatgggctccttagaagttccagcccaggggtctgaaactattaaagttccaactgctcattatgaatttggtgccaattttttagatccaaagttaatgctcattggaagggtgatgacagatggaaggcttaatgctcgcgtgaaatgtgatttgacagacaatctgatgctgaaagtaaatgcacagcttacccaagaggcacattactcacaaggaatgtttaactttgactacaagggaagtgactatcgagcacaattccaaatagggaacaatgcattctatggtgcaaattatattcagagtgttactccgaacctatcaatgggaactgaaatgttctggcttggtcaccaaaggaagtctggaattggttttgcctgtcgctataacacggacaaaatggtgggcactctacaggtcgcaagcactggaatagttgccttaagttatgtccagaagatttctgagaaggtttcccttgcgtctgatttcatgtataaccatatgtcaagagacgtaacttccagctttggttacgattacttgcttaggcagtgccgtctaagaggcaaaattgactcgaatggtgttgttgcggcatatctggaggagaggttgaacatgggtgtcaactttcttctatctgctgagattgaccattgtaagaagaactacaagtttggtttcggaatgaccgtaggagagtaattctgctaaaacaattgctgagaagagcacatgaggactttcgcagtctgctttgcattgtatgttaagatacttcaggtctcagttttgattgatcaggttctgccccgtcgaaaaaaatactagctgttgctgctttacagggttttgtctcagtgtattggtggttgtttattttcagctacttgagcatgggggccatgattctttgttcatcttggatgtaactagctgattggtgttccaatgatgttgtatttgcagaacgattttttccttttaaatcaccaacaaccaccacactaggctttttctgtaccatcatggacgggccacaagattttacagttcaaagctttggcacttgccatatttgatgtcgtcttgtgcttttgctcatccatgtaagtcagaaatctcagttcatatcagtgcttttgctcatccatgtaagtcagaaatctctgttcatatcagtttttttattaaaaaaagtttccgctgcataaaaagagaatgtggaatcattgtacc

SEQ ID NO: 23745 - DNA, 2604 bp, Zea Mays
tcgatttgaacctgccgctgcgagtccacagcgctgcgcaggcggcactgcggcaggctcttcctccctctcctctctctctgtctgagccgagggctttggcgctcccccccccccccccccccccctctctctctctctctctctcgcacgggcccgcctgcctatcccactgcccggtccaccgccgcaaactctgcccgcccgcgcgcgccccaccccgccgatcgcggtgagcccggactccgccgccgccgcttcgctctaccctgaccagccctagatctgtgcgggatccgccgccatgttctggcgcatgaccggcctctccgcggcctcgcccgtggatacaattctggacaaggagaactttacattggaagagcttcttgatgaggatgaaatcattcaggagtgcaaagcgctgaatacccgactcataaatttcttgcgagataaggcccaagtgtcgcaattacttcgttacattgtggaagaagttcctgaggattcagagaagaaacaatctttcaagtttccttttatcgcttgtgagatttttgcttgtgaaattgacattattttgagaaccttggtagaggatgttgagttaatggatttgcttttttcatttataaaacctgaccatccgcatagcacactgttagctggttacttcagtaaggtggttatatgtttgatgcttcgaaagactgctcctcttatgaattatgttcaggagcatccagatattgttgtccagcttgtcgacctcattggtatcacatcaataatggaggtgttggtgagattgattggtgctgatgaaaccatatacttgaatttcgcggatacattgcattggttagagaatacatatgtactggaaatgattgtggataaatttagctcatcagactctcctgaagtgcatgcaaatgctgctgaaattctttctgcggtaactcgatgcgcccctcctgctcttgctgcaaaaatatgcagtccaagttttgttggcaggttgtttcatcatgctcttgacgagtcaagaccaaaatctgttctggttcattcattgtcagtgtgtatatctttattggaccccaaaagactagcatcagtctcataccaagcatttagaagcaacttaactcacgggacgctggttacagccagtccagaaacagttgatggtatactggagagtctaggtgacttgctgaagttactggacattacttcttctcaaaatgtttttcctacaacttatggatgtttgtgtccgcctcttggaaaacaccgtttgaagccaacattaccatcagaagggaaagaacctccaagaattgggaatattgggcacataactcgaatagcgaataagctcattcaatttggaaatagtaacagcatgatccagagtcacttgcaggagaacagtgagtgggctgtatggcaaatagatgtcctgatcaaacgcaatgaggtggagaatgtttaccattgggcatgtggccgtccaacatctctacatgatcgtgggagggatagcgatgacgacgacttccgagacagagactacgatgtggcagcactcactaataatatgagccaggcatttcgatttgggatatacaggaatgatgacattgaagaggcacaaggatcccacgaacgagatgatgaggatgtctactttgatgacgagtcagctgaagtagtaatatcttcattgtgtttgggggatgatcaggacagcagttcactcttcacgaattcaaactggtttacgtttgatggtgatagaggaatcaatgaccgcctagctgcctctgttcctccatcatccccggattctgaagcgatttccttaaacactgagaatactgatgaagcgctaactggtgaaaccactggaggcactgagtcactgcgggaaagtgcatcccttgccaatgaactagcagaagtcgctaacgacaatgatgctgatgccacggacggtgagaaaattttgtgtacagaagaggacagtcaagcctccgaggggcctgtggatgctaaagaggacaagactggaggagcgtctaaagcagcgaatgaatctgtgcctgacaatgccttgcctgaatcccaccacactgattgtcggtgcgctgactcatctgaatcaggaacagaagaagatgtggagattgatgatgagaagaaatctgagactgctatgacaaatgaatgagcgttatgggcttggaatgataggatggcggatcagattcttttgctggtgagcaatgccactcaagcaggggcgccgtacaattttaacagcgctgctttgctattgaggagtctggttgttactgcatactcgggcacgcacgctcttttatcatctcacctcatcaccatcatcccacatggaccaatgtcgtctggcggctcctgattttggtctcttcgaactgtaatatctgcagtgagttttttccatcagtttttatttttttttccgggtttctgcatctgtaatagctatttcttcaagcgcaaaacatgtcttctctttgttgctataaaaagcatatagtttcaccaaaa

SEQ ID NO: 23746 - DNA, 1680 bp, Zea Mays
caattgacattttcttttcttctgtccgtggcggcgttaagatcagcatcgcttcatgtgactgattggttggttgcgccggcctgcgaggatctagcaccgagttcagggagcacttcgtgagacttgttcattcgtcttgaggtgctggagccgtcacgttgtggtagttgagaggaacctgtccaatttccatagttgcgaggaaagattcctgagatgtctactctctcagacccctcaaaagaagatacttcacctgagggttcaggtactacccagagaaatggagcctggagtaacacattgaacactcttctgcagcaagcctcagtatatggtgtggccgctgggtattgtttatcagcgtccctgctctcgatcatcaataaatgggcaatcatgaaatttccatatcctggagccctgacagctctgcagtacttcactagtgttgctggagttctcctatgtggacagctcaagctcattgagcacgatggacttaacttgaggacaatgtggaagttcttacctgctgctgtgatgttctacatctccatcttcacaaatagtgaactcctgcttcatgccaatgtggatactttcattgtgttccgctctgctgtgcctatatttgtcgcgatcggagagacgctgtatcttcatcagccatggccatcgctcaagacatggctttcactctccacaatacttggtggaagtgtgatctatgttttcacagacaaccaattcactgtgactgcttacacctgggcagtggcctacctagcaagcatgtccattgatttcgtgtacatcaagcacgtcgtaatgaccattgggctgaacacatggggccttgtgctatacaacaatctcgaggctttgatgttattcccccttgagctccttataatgggagaatttgatcagatgaaggtcgacagctccaagacgggctatttctgctaccgggttcacagtgcttggcatagtgaacaagctcctgactgttgttattaatttgcttatctgggacaagcatgcctcttttgtgggcaccattgggctcttgatatgcatgtcaggtggcgtgctctaccagcaatccaccatgaagccgaaggcgcccaaggttgagccgaaggaagagaacgacaacgacgaggagcagcagaaattgctgcagatgcagggtgttcaagagagcaatccaactcagaaataaagctcttcataaaccttacaacgaagtaatgctttgatggattaccttctttgcaacagcctcacctgaaacgtttttgtattggctaatacttggaaaaaagcatatggatgagtagtcatgaattaggagctacaaaatatcatgtttttgatattagaagtcgtgaggggacctaattatcactatgcaattctttattactgtattaccacttacatttgtaacgcaaaatcgttatgataggataccaggtactcggcaaatacctgcattgaatacttcctatacaaaagcatccgtctcatacagttcgggggtgacagtggtagtatgatctgtttttaggcatttctctgctggagttagcctatatgttctgtaacttattgttggtgatgaagacattggttcttgtgctaaatagagttttcttatcatcgttgttg

SEQ ID NO: 23747 - DNA, 4805 bp, Zea Mays
gacagcccagtccaagacgctgctctgactagtaaaccctttcccctctccggactcgaggattcggagtttcggacaaccgacaacatcgctcgccggcgacgagcgcggcgcggcggcggcgatggatgggggacacacgacgaggcatccgatgtctccagcgatctcggcttcgactgtgctaccgcagcagcggcagatgcagcctcaccaccacccggcgcggccggcaatcgccgatctcttcaccctatacctcggcatgaactcgaagcagcgagcggaagacccattgagagagagctcgaataagctgcagaagagagtgactgctctgaacagagacctgcctccccgtgatgagcagttcatttcagattatgagcagttgcgcatgcagtttcctgacgctgagcagttgcaggcaatcacagaatcagttctcatctcctttgtgctgcagtgcagtagccacgcaccacaatctgagttcttgctctttgctacacggtgcctatgtgctcgaggccatcttagatgggatagcctccttccatctctgcttaatactgtttcctccatagaggcacctatggtgcaaggagtttctgtgactggtggtggttctgtaaccccttcgtcagctattacaatgccaaatgctccaaactttcaccaatcaaacccagcctcacctttgtcagtaatgaacaccataggatctcctactcagtctggtattgaccaacctgtaggtgcaaatgtgtcgccaatcaaggcagctgaattctccagctctgcgcagcttggtactgcagcaagaggtgaccagtctcgcaggggagcagaagctagctatctgcatcatctatcctgcaggataattctagcagggctggagttcaatttgaagccagctacccatgctgtaattttccagcatatggtaaattggttagttaactgggaccagaggccccaaggcatggatgaaactgacacaatgcaaacatgcaggctagaaaaacctttgcatgaatggatgcatctatgcttggatgttatatggattctagttaatgaagataaatgtcgcattccattttatgagcttgttcgctgtaacttgcagtttcttgaaaacattcctgatgatgaagcactggttagtataatcatggagattcataggaggagagatatggtgtgtatgcacatgcaaatgttggatcaacatcttcattgtccgacatttggaactcatcgtttcttatcacaatcatacccaagcatagctggagaatctgttactaatctgcgttattctcccattacttaccctagtgtattgggagagccactacatggagaggaccttgcaaactccattcctaagggtggtttagactgggaacgtgctcttcgttgtttgaggcatgctctccgcacaaccccatcaccagactggtggagacgcgttcttcttgttgccccttgttacagatcacagtctcagcaatcatcaactcctggagctgttttctcacctgatatgattggtgaggcagttgcggacaggacaattgaactactgaagctcactaactcagagactcaatgctggcaagattggcttttgtttgctgacatctttttcttcctaatgaaaagtggatgcattgactttcttgattttgtggacaaacttgcttctcgagtcacaaatagtgatcaacagattctccggagtaaccatgtcacttggttgcttgcgcagattatccgcattgagattgttatgaacactctaagttcagatccaaggaaggttgataccacaagaaagataatttcattccacaaagaagacaaaagccttgacgccaataatattggccctcaaagtattcttcttgatttcatcagtagtagtcagactctgcgcatttggtctttcaacacttcgattagagaacatttgaacagtgatcagcttcaaaaaggaaaacagattgacgaatggtggaaacagatgatgaaagcttctggtgagaggatgatagactttacgaacttggacgaacgagcaacaggcatgttctgggttctctccttcaccatggcgcaaccagcttgtgaagcagtaatgaattggtttacgtcagctggaatggcagatttaattcaagggcctaatatgcagccaagtgaaagaataatgatgatgcgtgaaacttaccctctgtcaatgtcattgctttctggcttgtctatcaatctttgtctgaagcttgcttaccagcttgaagagaccatatttcttggccaggctgtccctagcattgctatggtggaaacctatgtgaggttactgcttatagcaccccattcattgtttcgtccccattttacggcattaacccaaagatctccatctattttgagcaaatctggtgtgtcattgctcctacttgagatactaaattacagattgctgcctttgtataggtatcatggtaaaagcaaggcgttgatgtatgatgtcacaaagataatatcaatgattaagggtaaacgtggagaacatcgtctttttcgattagcagaaaatttgtgcatgaatttgattctctcactgaaagacttcttttttgtgaaaaaggaattgaagggcccgactgagtttactgaaactctaaaccgcataacaataataagtcttgcaatcactatcaagacgcgtggaattgctgaagttgaacacatgatttatcttcaaccattgttagagcaaattatggcaaccagtcagcatacctggtcagaaaagacactgcgttattttcctcctctcattcgtgattttttaatggggagagtggataagaggggtctagctatccaagcatggcagcaggcagaaacgactgttattaaccaatgtaatcagctgctctcaccatctgctgagccaaactatgtcatgacttatttgagccacagtttccctcagcatcgtcaatatctttgtgctggtgcttggatgctgatgaatggacatcttgagatcaacagtgcaaatcttgctcgcgtcttaagagagttttcacctgaggaagttacagcaaatatctatacagtggttgatgtgcttctgcatcatatccaatgcgaggtgcaaagggggcatctagcacaggatttactatccaaagcaatcacaaatctttctttttttatatggacacatgaactccttccgctggatattctattgctagctcttattgacagggatgatgatccttatgctttacgccttgtgataagtctgcttgaaaaaccagaacttcagcaaagagtcaagaatttctgtaatactcgttctccagagcattggctgaaaaatcaacatccaaaaagagctgagctccagaaagctcttggcagccatctttcatggaaggaccgctatccacccttcttcgatgacattgctgcacgtctgcttcctgttattccactgattatttataggcttattgagaatgatgcaactgacattgcagacagagttcttgcattctattcttccttgcttgccttccacccgctaagatttacatttgtacgtgatattcttgcgtatttctatggtcatcttccaatcaaactaattggtaggatcctcaacctgctgggtgttagcactaaggtaacattgttgcccttctgcattccttttttagcaatcttccacaagagtggctggaatctactcatactgtcatcaaacaccttcggccagtcaattcagttgccatgttaagaatcgccttccgcatattgggtcccttgttacctcgtctagcctttgctcgacctttgttcatgaagaccttggctttactcttcaatgttttgggtgacgtgtttggtaagaaccctcaggtctcaaatccaaatcctgtggaggcgtcagaaattgcagacataattgacttcttgcatcatgcggtgatgtatgagggccaaggcggtcctgttcagagcacgagcaaacccaagctggagatactgacattatgcgggaaagtaatagagattttgaggccagacgtgcaacatcttctctcccacctcaagattgaccccacctcttcaatctatgctgcaacgcatccaaagctcgttcaaaacccatcctaataatgttatagcttacaagtgtattctaatgatgcaagatgcttcgaaccactgcagaagtctcaacatgtgatgctgttggatgagtagaattgcagtaactgtaacatgtgattcaggggcgtattctcaagtgattcgccgttgtcagttgtatcctttagttagaatgttgtaaatgctatctgcttagtgcatattaggacataactacatagtgtaagcagtaaccatggaggttatcttgccaggctaagaattttggctgccttgcctgtgagccatgcgacatatgtatcctgtcgcattaggatgagcgacaaccgacacggtcgcatgatgcaagatttgtgccggttggccgattgtcaccgtgcagatctcttcgtaacagtgctgcacgtggaaggtttgaccgagtgactgcatcaccagttaatagtgtgaactgtatcaaattcttgatcatcttgcttattatgaaatgcctacgttgtgtcaatcactcttgcattgtatagtcgctcatcaagtgttcaaacttaattgtgggtaaaattgtttggttcttcttgcatgacattcatccaatc

SEQ ID NO: 23748 - DNA, 1006 bp, Zea Mays
caagcttgatgttgatcttgcagagaagacagcagaaatgcctggtttctatgcagagggtgaatatgatctaagtggttttgctgtgggtgttgtgaagaaggataaagtcattgatggaaaaaacattgttaagggagatgtgcttataggtcttccttccagtggtgttcattctaacgggttctctcttgttagaagagtactggagaaaagtggactttctttggatgatcagctcccaagaaatgatggcataacaactacggttggtgaagctctaatggcaccaaccttcatctatgttaagcaggtgcttgagattattagcaaaggtggtgtgaaaggactagcccacatcactggtggtggctttactgacaatatcccaagagtattcccctccggatgcggggcaaaaatttttactgggtcatgggaaatacctccaatcttcagttgccttcaacaggctggaaacattgatgacgcagagatgcggcgaacattcaatatgggcattggaatggttcttgtggtaagtcgagagtcagcagacagaattattgaagacacccatggatccaatcctgcttatcgcattggagaggtgattgagggtgatggggttcagtatgtctgacctcgtatgccttttatagtggcttgagacttgttggtctgctctgcaaagcagcagagtttatgtaacaacataatcttgtggtgttaagttctgcaccactactcccgctagaaagtgaagggtaaccaaataattatttgattggatccacgggaacttctctaaaggcttaccagaggaggccattaggaggaaatacagttgatgagaatttttcatggagagcggtattgttttcgttgagtaaatttaaatagttaaatttattatttggtaaaaccgtaaaactacattttaatcaattacatcatacttggcttatagtaacacaactaaacttgcaaccccggtggtttcgat

SEQ ID NO: 23749 - DNA, 1071 bp, Zea Mays
tactgtgcttatcattattagtgttgtgtcatcatattgacatgcggctatccaatccttgaagaggaaaaaactttatgaacaacaaattgagcaactcggaaattttcagttgagaattcatgatcagatgatcatgttagaagcagctaaagctacaacagagactgttgatgcgttgagaactggagctgcagctatgaaagcaatgcaaaaagcaacaaacattgatgatgtcgacaagaccatggatgaaattaatgaacagactgaaaatatgaaacaaattcaagatgctttgtcaactcctcttggagcttctgctgattttgacgaggatgaactggaagcggaacttgaagaactggaaggagcagagttggaatctcagcttctggagcctgttgcagctcttcctgtgcatccagtgcatgtcccaggcaacaagcaaccagctcgccctgctccacagaaagctacagctgaagatgatgagcttgctgcactgcaagctgaaatggcactgtgatcaggtttccactgaagaggtgaaatgtgtatatgaattgcgttatgctgaaagctgagtcaggctttattgtatttgccatgtgtgtataatcttggtggatatttggcaaccgtcaaccgaagcagcgaaaggccgctacagccggtatttgtttcagtgattgggctctgttttctttccacagacaatttagttaatgtcgcccggttaggtctatgctaactattcaggtcaccaacgtgcattgtttgtcacagtatttttcagttacccatattgtttggagccatgtaagagtgttggaacgtttaaagcctcagggttcatatttgatgtgacggagggagtattacataaagtcagttgttcggatttgcagctgtaatctgtagagacaaaacactgtaagcagtagaagctgatatggattaaagtcaagcgaataggctctaatgcatagagacaaaacgacggttgaacacataggcagtaacgcatttgaaatataatggtgcgtttggttgtaatgacaaaacggg

SEQ ID NO: 23750 - DNA, 1343 bp, Zea Mays
aagcttctgcctcgcgaaaaccctaacaattccagcccctatataaccacacccacgccgcctccgcccgaaccctagaatccaccctgccgcctcaccgcctctctcaatctgataccgcagatccgtcgtccggtgagtggaagccgcacgaacccatggcctccggcgagcttgcctgcacctacgccgctctcatcctcagcgacgatggcatcgccatcaccgccgagaagatcgccacgatcgtgaaggcggccaacatcaaggtcgagtcctactggccggccctcttcgccaagctcctggagaagcgcaacgtcgaggacctcatcctctccgttggatctggtatgcatcccccctttgcccctcaagatattatgcccggggtttgcaatgtgtgggtagttcgtggtggcgacgttgtagatttagcttatttcgttatgttgcttgtcttttattgatcttaaacttgttcgagacgtattgaaacagtttttatcacccaaccatgtgacattgtcagttctagaaattcaacttgaatgattataagtcgtcatattcactgtaattgaacctttgattcgacagtaggctcaattggacgatagtgtgtatttatatacttacaataaactgagaagcaagtatctgtctctttacctgaattggaccttagggtttcaatgtttaatttgacactgtacatggcgcatatgtttgaatcttcattgcattactgaaatgcaagacaatgccctgggtattttcagaatgcaggagtatgggacctttaatttgtgccaaccttagctgcactgaagattgtaacagtgcatgtttatacttgaattggatggtggattgtgttgaatttgtcaccctttgctttgatataagaacctctagttatatgctagaaggactaatcgttttggtgtgttgaaatggttttgtaggtggcggagctgctccagttgctgctgccgcacctgctggtggtgctgcggctgctgctgccccggctgtcgaggagaagaaggaagaggccaaggaggagtctgatgacgacatgggcttcagcctgttcgactgaggagaccccctcacccagccattagcaaatttcacttgtgctgtcaaagactatcttgtcttatgttatgtctctaggcttttgttacaactacccaagttttgagtttttgagatgtggctatggcatgaactcaaaccatcttatgagggtgaaacctgtttctaatttctatattgttgctgttcattaaaaaaagaaaaaaggctaccaaaagaccgcaaaaaaaaaaaaaaaa

SEQ ID NO: 23751 - DNA, 3958 bp, Zea Mays
acccgttcgcctctcaccttttcgctgtactcactcgccacacacaccccctctccagctccgttggagctccggacagcagcaggcgcggggcggtcacgtagtaagcagctctcggctccctctccccttgctccatatgatcgtgcaacccatcgagctacgcgcgtggactgccttccctgggtcggcgcaggaggggatcggaaggatggcggcgtcggtttccagggccatctgcgttcagaagccgggctcaaaatgcaccagggacagggaagcgacctccttcgcccgccgatcggtcgcagcgccgaggcccccgcacgccaaagccgccggcgtcatccgctccgactccggcgcgggacggggccagcattgctcgccgctgagggccgtcgttgacgccgcgccgatacagacgaccaaaaagagggtgttccacttcggcaagggcaagagcgagggcaacaagaccatgaaggaactgggcgcgaacctggcggagatggcgagcatcgggctgtcggtgccgccggggttcacggtgtcgacggaggcgtgccagcagtaccaggacgccgggtgcgccctccccgcgggcctctgggccgagatcgtcgacggcctgcagtgggtggaggagtacatgggcgccaccctgggcgatccgcagcgcccgctcctgctctccgtccgctccggcgccgccgtgtccatgcccggcatgatggacacggtgctcaacctggggctcaacgacgaagtggccgccgggctggcggccaagagcggggagcgcttcgcctacgactccttccgccgcttcctcgacatgttcggcaacgtcgtcatggacatcccccgctcactgttcgaagagaagcttgagcacatgaaggaatccaaggggctgaagaacgacaccgacctcacggcctctgacctcaaagagctcgtgggtcagtacaaggaggtctacctctcagccaagggagagccattcccctcagaccccaagaagcagctggagctggcagtgctggctgtgttcaactcgtgggagagccccagggccaagaagtacaggagcatcaaccagatcactggcctcaggggcaccgccgtgaacgtgcagtgcatggtgttcggcaacatggggaacacttctggcaccggcgtgctcttcaccaggaaccccaacaccggagagaagaagctgtatggcgagttcctggtgaacgctcagggtgaggatgtggttgccggaataagaaccccagaggaccttgacgccatgaagaacctcatgccacaggcctacgacgagcttgttgagaactgcaacatcctggagagccactataaggaaatgcaggatatcgagttcactgtccaggaaaacaggctgtggatgttgcagtgcaggacagggaaacgtacgggcaaaagtgccgtgaagatcgccgtggacatggttaacgagggccttgttgagccccgctcagcgatcaagatggtagagccaggccacctggaccagcttctccatcctcagtttgagaacccgtcggcgtacaaggatcaagtcattgccactggtctgccagcctcacctggggctgctgtgggccaggttgtgttcactgctgaggatgctgaagcatggcattcccaagggaaagctgctattctggtaagggcggagaccagccctgaggacgttggtggcatgcacgctgctgtggggattcttacagagaggggtggcatgacttcccacgctgctgtggtcgcacgtgggtgggggaaatgctgcgtctcgggatgctcaggcattcgcgtaaacgatgcggagaagctcgtgacgatcggaggccatgtgctgcgcgaaggtgagtggctgtcgctgaatgggtcgactggtgaggtgatccttgggaagcagccgctttccccaccagcccttagtggtgatctgggaactttcatggcctgggtggatgatgttagaaagctcaaggtcctggctaacgccgatacccctgatgatgcattgactgcgcgaaacaatggggcacaaggaattggattatgccggacagagcacatgttctttgcttcagacgagaggattaaggctgtcaggcagatgattatggctcccacgcttgagctgaggcagcaggcgctcgaccgtctcttgccgtatcagaggtctgacttcgaaggcattttccgtgctatggatggactcccggtgaccatccgactcctggaccctcccctccacgagttccttccagaagggaacatcgaggacattgtaagtgaattatgtgctgagacgggagccaaccaggaggatgccctcgcgcgaattgaaaagctttcagaagtaaacccgatgcttggcttccgtgggtgcaggcttggtatatcgtaccctgaattgacagagatgcaagcccgggccatttttgaagctgctatagcaatgaccaaccagggtgttcaagtgttcccagagataatggttcctcttgttggaacaccacaggaactggggcatcaagtgactcttatccgccaagttgctgagaaagtgttcgccaatgtgggcaagactatcgggtacaaagttggaacaatgattgagatccccagggcagctctggtggctgatgagatagcggagcaggctgaattcttctccttcggaacgaacgacctgacgcagatgacctttgggtacagcagggatgatgtgggaaagttcattcccgtctatcttgctcagggcatcctccaacatgaccccttcgaggtcctggaccagaggggagtgggcgagctggtgaagtttgctacagagaggggccgcaaagctaggcctaacttgaaggtgggcatttgtggagaacacggtggagagccttcgtctgtggccttcttcgcgaaggctgggctggattacgtttcttgctcccctttcagggttccgattgctaggctagctgcagctcaggtgcttgtctgaggctgcctcctcgttggcaaccggattgcctgctgctggtggatgtggtgatcaacagtattattacagagccatgctatgtgaacattactagtagcagtgctcataaaagctacaatcccatctcccttttttttccagtcatgtaaaacttccaaactgctccatggttcaaaactctgttcttcaatacatcatcaattatcgattatatacgtggcaaggttttttctttgtttgcttttttcttttctttctggcatgtgtttttttggttttcttggtgtgtgtgtgaggtgtgcatgtcgctgttgaggcccttgctgcacagaccacctcaaactttaagcctcgaaaaagctggtactatttttttagaactctggagtctggtcaatatgcaattgactggtttgcttctgaggctcttcttgcattcatgcctttacggccactctttggcacctgtaacacaggtaaaaaaaatgttaaaagatggttcaggaacacagcagttttcaagccagggaaactgtactgtacagaaaccaagagatcgttcgacatacctgtgcccgcacatctacctaacattctcgaggaccattgccgatcaaaggcccacacatcgtcttcttgttccggcagttgataagaacctagtacataagagacagtacatcatcaaaataaggagcaggtgaaaagcaccatctgcagtatgcagtatgcaacctggcacatggcatactatgtgatactgtacatgagtacaggaaaggatagcttattacaatatcggtgagttacgacacacaaattatagacatttgtcaggataaagaagttatgccgttttgttgcgcagtgtcccacgccatgattaatccaaaccactgattgactcattttttt

SEQ ID NO: 23752 - DNA, 224 bp, Zea Mays
gtccggtgagccaacggtcggccgggccaacggtcggccgcacgatccgcgcgagacacgtggccgagccaacggtcggaagggggcaccggactgtccggtgtgcaccggactgtccggtgtgcaccggacagtgtctggtgcgccaacggctcccaggcccaacggtcggcttcgccaaggaaggaaagaaatccgcaccggacagtgtccggtggtgcacc

SEQ ID NO: 23753 - DNA, 4651 bp, Zea Mays
gcatgatatgctcatacttcatatgcagttagatttctactttcattactggttaattagtctgatggtatatcaaatatttatccactgcttctatgcaattgcatgtttcaagtttctaatgcttccttgtgataccattaccagaccattggtattataaaaaaactcagacttcaatcttgttactcgttttccgatgaacttggtgaaaatgtgatagttatgcccatattcttgcaactagatcagtcatttagtttaatctgagctacttagcagtgtgaaatgcctgcagcctccatgcgtgaaagtgacatttgtatcctcattgccaacattaggatatgcattgtatcattggcgtgaaattcaaagaatcagatagatgcaagttatctgttctgggctaagctcagattctaaccctgcatgtgcagataccagatatagatgaaattcatcccttaatgacatgcctgattttcttggtttgagtactttatattgttctcctgggatgtattttttagtttctgggtgatttctcttggaaatttcaagagtgtctcgatgtattacgaaactgtcttatgccagaaacttgcattgttttttttaaccagaattgagttagggttatcattaagacattaaccaaaatggagttagggtgcctatttttttttctagtgtagacctgatgtgtatattgaaatgtgcaattgtgcatgctcgcaacgtgtctaatatggattatggattgtatttgagtggttcctttgttaaagaacatgtgaaattagagttctagtcttctagaacacactctgttcctcatctttattttctatacacaattcttccatgtgtttatatgttgctgtggttccttggtttagctatccttgtaaatacctgctgttacataaaccaatttgttttccctgaagagattatgctacatactgatttgttaaggatctagtaaccatgatcctaaactgtttaaggaccattggcgttatttgcatgttgttgcacaagttattccttcgagtcacaggtatattacttatgcgaaagaagaggaggccatccggtgtattcaggctgtacacaattttgtcttggaagggaaagtgttaagggcatgtttcggtactacgaagtattgccatgcatggctgcgaaacatggcatgtgggaatccagattgtctctatttgcatgatgtaggcagtcaggaggatagttttactaaagatgagatcatctcagcatatacaaggactagagtcccccagatggcatctagtgtttcgcaaagacgtacaggcactgtgttacctcctccaggagatgatttctctcacagtgcggtggtttcagccaagcatacattcaagaatggaacacttaataccaccagtcagcccagactttcacctccaaacagtagttctgggaggtccacgcttccaccagctgcatcatgggggcagcgtgatttgaatgccaggataacagctactggagcgacatcatcacaatctcatacaaaaccaaaatcagaatcacagagtaatccattttcaagttcttcagcaatttccagtacaaaaacaccctcttcatggaatgatgatacaagtacagcagcaaaaatgcctgaaggacagcaagtgtcagaaaaagagtctaaaaccttgcagccgtataagcctggtatttcaaaggaaacacaagctctatcgtcactggagtcatcactggacatagacttctcaacaataccttcagcttggaatgatgatgacattgtagtatcagatgggatgccaaaaggaagcgatgaaaatcaagttccaaataaaaatgaatgccaatcttgtcatgctgctggggagaaaatgttggaggatattggatccaaggacatcgacatggagaagatatcttctcagatatcttcagtaacattaggtggcaacgataagattcagagtatggcaggaaatcagcaaccagatgtaatgccatgcacatctattgatgtgcccatggatcagaattttggcagagaccgatctcatctcaatcttaacgagcttttattgccttcagaaaataaggatagtagtctttcttgtcaatatagttctgataagcgtcttgcttggagtttgaagatgcaaaattgtagcgttactcctttaaatgatacaatagactctgcaatgctcactgacaaaccttatagtatactgctggaaggttcagagaaaccatcatatccaccatttgttgaatttcctagtacatgggatacctcattgtggaatgatacaaaaaataacgctgcatcgacgattgacactataacttcttcacagatgcagacagggttttcttcaatcgataacacttatgccttgctaaatggaggtcaagatgggctaggtactgtatatacacatgataatgtttctgtatatacacgtggacgtggtaatgtttctggacatcctggaatgggaagtcatcagcatagagcaatgggttcagtaagaactgatagtataggaagttttgacaagaccataagcgtaaataaggatgagagcagaataatttctgatacgttgtcagagtttaatccatgggatgattcatattcgactgctaacaattttgttaggatgcttagggaatctgaaaataatgatgttcagtgcactgcgccttcatggaaatcaggaaccgggagcaaacagtccagattttcatttgctagacaggataaccaaggaaacttgttggattcatctctcagaaactgtggtattggtactgagcagaatttcagtttgctaccccagaattctcgaagaaatatttaccagaatggtcttgcattccaatctctagagaatgaattttcaaatagtaactttcctggtctattagatatggcaactactggtacatcaatgtctaaaatatctgctcccccaggattttcagcaccaacaagagtaccccctcctggattttctactgcatttccatcccaggatagtttgaaccccactcctgggtttccttctgggattttgtctcatgatgggtctatccccctttctagattcccttcattttcttctggagtttcagctcaggaagtgtctaagctccctactagactgccttctccattttcttctagattttcatcacaggatggtcctgatcccccttctagattccctttttcttctgggttcacatcacaggatgggtctaatcagttgtatggctcaacaaacccagaaaatcttctcgggggtactgttctgggtgtcgacggtaatcattatcaatctcagtttggaaggcactcaagtgacatggagtttgatgatcctgctatattagctgtgggcaaagggctgatgcctggaattggcgattcagggctggagatgaaaaatactcgtgcttcacagttgcaaccagcaagtagtgatccaagatttcagctacatgtacagccaaatgtgcagtctcatcaaaacatgagattcacagaccctgtgcaagatggtttgaaccatatgaatgataattacctggcatccagatttttagctcagaaccatggtcctctatctccttatgtgcagattccgcaacaacccagaaactcgcaggttacaaatggtcactgggacgggtggagtgaatcgagacaagggaataacattcctatgtcagacatgtccaggatattatatccaagtgaagtgaacaagttgcacatgctgggttcaaacgatatccataacagagcctttggaatgtgattgtctcctgggataatgtgtgactttgagctgacatattcgcttggggcgttttgtggaagtaactggttgcacaaaacatagtatacctgaggtggttaatggtgttgtgcttatgagctggcacacaatatttattgctattggagttgaccaaaatgaaccttagttttggtccagccagttgaaattaccaggttcattctcgtctatgatttgtgacgcttgaatgaaaagaacgagaagaacaaggcagctgaagttgaaatagatatagagatatgtctatcatgggatttggggcgacctgtgagtgaaagaagcttaggtgtggcagtttgtttttcttgtgtctgtacatgatgatattggtcggtggttgtagtataatttggtgatcggcggtggctgtattaacttgtagtggttgctcttgctccctcttgcttgtttatgttaattaagggaattgaggtgaaggtctagtgttacccatagcataataatatacgatacataactggtttctttgctagcattacttcatttgtttcaacaacagcaaaaaagaaatcccttaacctttcttaaaaacggacactttgttaccgtgcattgagaatacccttggagaagcttctgaactacattacacataggtctatgtggtgcttgaggccagaggtttgagttgtattgtcaaaactccttcgggcctccgcactctgtgtactaggtcggcgtatcaggtctagtttgacctagccaaaagctgccctgggggt

SEQ ID NO: 23754 - DNA, 1169 bp, Zea Mays
ctctacaagcccttttttttttgttatccggtccgcccaggctcttcccattctccggcgcttccctctgtcccttggctcgctctggcgtggttctcccgtcccctggtgcgtgcgcgcttctcgctctctcgtggcggcgactgggcgactatcgcctccgccctacaacagttgctcaggtcttctttgggcccttcgccggggacaagcacccaccggagaaaatcaataaatacatcggcctgaaagaatgggttatggcatgagtaggctagacgatgaatactatgaggctgaagggcagaatactggtggatctggctcagttcaagtgaacgatgagtttgcaacactacataatgatatttttcatatgacccgaatgagatcaggacttactgaaagctacaagtccatgggtaccaacagaggcataatatcaactgccaagttattatctcgaagggaaattgattgttctggaaaggggatgttctcttctggtgaccgtgcatttgttctaggtcgtcatgttccgatgaacaatcctgaattattggataggatggattctcgtgcttacgtttcacagttttctgctgatggtactctttttgttgctggttttcaggtatgctatgctcaaccaacaatagtcgaggttttaaacaagttcaagtcagaatttcctgggaagtcacataagaatatacgatgttgatagaggctggagcatacacaaagacattcatgctaggtgtttaagatggacaatcagtgatgtatccttatcacctgatcagcggtatcttgcctactctagtctggcacctattatccatattgtcaatgttgggaatgcggcaagagaatcctatgctaacgtcactgacatccatgatggattggatttttcacagcatgaagatgttcaatattcatttggaatattttctgtaaaattttcctctgatggacgggaacttgttgctggcagcaatgatgactcaatatatgtctatgatcttcatgcaaacaaattgacattacgtttatctgctcatacatctgatgtcaatacagtagcatttgctgatgaaaccggccatctcatatattctggaagtgacgacactttatgcaaggtagtgttatgctatgttatg

SEQ ID NO: 23755 - DNA, 844 bp, Zea Mays
ggtctataggaagggataaaccgagccaagcccaagccttccctcggggacggacgacgacgtggtggactggtcgcacgggaaggagctgtggaggctggcgagggagcctcacgacccgctctggatcaagggcggcgggcactgcaacctggagctgtacccggacttcatccgccacctgtcgcggttcgtccgcgagatggagaccgtgacgacgaaggcccggctgaggaagatccggccggccctccaccagctccgcaagaaggcggcgcaccgggcaagcacggcggcgacgacgaccaccaccaccaccttcaccgccaactgctgctgccgcgtccgcgtccgcaagccgacctgccccagctgcggctccttcggctgtggctgctgcgggccgcttaggagctgcctcgcgctccggtttcccaggtgctgccggcctcctgctgcctgcttcacctgcggcggctgctgttggtcatgcaggtgcaggagctgcttcaagtgctgctgctgctgatgatgatgttgagacgtgcgtcaatgagtgccgcccgccgatcgatccctgcgcgcgcgcgcgcgcgtatggtatagtgaagaggaatgacagtggtcatgggatccctgctaacaaaccctttaaacgccgtagactataaaaaaaacctagatttgagctggtggctgctgaacgttgtattaacagatcccaggactccccgccgtttgtggttcctctcgttgtagttgcttgtcagattggtgattcgtctcattattaatccgtctgatgtttgtggagtctagagcaatgctaatgcctggactcgct

SEQ ID NO: 23756 - DNA, 553 bp, Zea Mays
taccattttttatttttgtttggatacctcttctaacagagatcttggtaatttgaacttatctggtcatctggtgcctgagcttggaaaattggagcatctttagtatttgttatgatcaccataagcaggttttctccacacagatgggtttgagcgaccaggacattgttgcactttttggtggtcacaccctaggaagatgccacaaggacaggtctgggtttgagggagcttggacgtccaaccctttgatctttgacaactcttcaagtatgtgatttgttttcccttgatactgtgctttgttggttaaaccgagtaagttgagtacacactaactgataaggagcttctgagtggagagaaggaaggccttttgcagctaccaagtgacaaagccctcctctcttatccatccttctgcccacttattaacaaatatgtagcggtatatatatctttgatccttgtcatttgttcggggtcggtttatattaacctaggtggctgtaataaatatttgtcggccttgtgttttgttaaaaaaaca

SEQ ID NO: 23757 - DNA, 2218 bp, Zea Mays
aaaacatcggtcttattaccatgcgccgccccctgtttttttccatcctttttccgcctctgtctatctaatttctcgtggcggcaagcagatacacatacacaggagagagaacccacgcaagagagagagaaagagggggacacacaagcgctctcctcgcgattggacagggcgcgagcagcccgaggccgcgagcagcctgagggacgggggtgacagcctcgccgtcaccggggtccggggagtccgtttcgagctctgtcccgcctcggatttggtgggatccggcaaagaaataccgcggttggtgaggaggagaggaggggaggaaaggaggtgttgcggatgggcgtcagtgcggagcccaaggagcaggcggcgtccgccgcagctctggcggtggaggacgaggcgggcgggaaggaggacaaggcggccgcggtgtcctgttcgatctgcctcgacgcggtgctcgccgcgttcggggagcggtccaccgccaggctgcactgtggccacgagttccatctagattgcattggatcagcatttaatgccaaagggggtatgcaatgccccaactgccgcaaaattgagaaagggaattggctttatgcaaatggtttccgacctgcacatgatgttagcatggatgagtgggcccatgatgaagacctttatgatgttagctactcagaaatgccatttcgcttccattggtgtccatttggtcgcttagctcaacttccatctttatttgagtatgttcttcttcagatgattattttttactattgtttagcattctgttcaaatattctaaacacacagttctatctaattgattatttttggccagtaggtttaacatacaagccacattatctacatatgtagctttaccttgtaatagattcataatgactcatatcttttgttcaacttaaatcacccatttgggatttgctattggagatcagtcttaacaaatggtatagttgaacctagtcccatgggaccgaccaggcgattaatcacgatagttgcctaccagtccgattagtcgagcctatcatagttgttcatatagtcatcctgtatatcaggacatatacccactatatatacacatactatatagtagacttgtgagagctttctgcactgtccagaactccatattcctgtcccaaacttcattttttttgctgacttgctgctggaataccaaagaagaccataattagcaacacatgtagtcttggtcttgattaacttataattataattagagcaactcaacatcagcactgctgcattagcaaataactagcatttatcagaccatagcagctacacacccagcatattgcataaccaaacgagttcagtacttcagaacatattacataggctgaaaagcagcctgctagccacctagataagttaagtgttcaacacaaacattgacattcaatagttcaacacaagtaggcaactagccatctaattaagcaaatcatcattcaaacggaagcctccatgtccatctccagttgcagttggtgcagatctgtcacacccagatttaaggggtaaacccatgtgcgtctcatatgtacgccaaagaagaacaacacatatagagtgtgtttggtttaaggaatgaagtgatccatcttcttctcacccctcacttttttatttggtttgtggaatagaatgggttgatccatcaccaccccattcctcataagctaataattactatatacattgaggagtgggttgattccaccaaaattgatggaatgaacatatgatgcatcacctcatgaagcatagagtgactccacaaaccaaacacaccaataatgaccaagtgtatagagataaatgtcacaaacattattacataacgagaatgtcttacaaaataactgataataaataaagcgaactaatattatttccttgacgccattaagtcgactgaaagacgactcctagacctcatcaaactcctcgtagtagtcctcctgggctacttgctcttcacttgtgggggggggggggttatatatcgcaagggtgagctcacaaaagttcatcgctcaacaatgtgcatgagcttatcaatagtaggggctcatgtgaagtgtaaggctgatcaacaaataatggttaaagttgagcattgcttttaataagttgg

SEQ ID NO: 23758 - DNA, 709 bp, Zea Mays
ataaaaagctgttcttctcccctcatcgcatacggcataccacactagagccgccgccgccgccgtttcgcgcaccgtaccctagccctcgtcagcggcggcttcgagctcatccagccatgacgttcaagcggaggaatggcggacgcaacaagcacgggcgcggccacgtcaagtacatccgctgctccaactgcgccaagtgctgccccaaggctatcaagcggttcttggtgaggaacattgttgagcaggctgccgtgagagatgtgcaggaggcctgtgtacatgatggatatgttctacccaaattgtatgcaaaggttcatcactgtgtctcatgtgcaatccatgcgcacattgtccgggtccgctctcgtgagaacaggaggaaccgtgagcccccgcagcgcttcagacgccgggatgatggcccaaggcctggtcagggcccgccgcgcccaggcggtgcagctcctgcagctgcagctgctgctgctcctcgtacctaagttctggaattagtttcggggcttagttttgtgaaacattacctgttttgagaaaccattgttactgtatccccttgatgtcaaactttttagcacaatttgtggttctgaaaaggttggttgaatgttgcagctaatggttgaatgtactagagctaatggtgccgctaaaattagctaaggacatctaaacagta

SEQ ID NO: 23759 - DNA, 1123 bp, Zea Mays
actgactccctcttcttcgtcttcgcgagcagcgaggcatcacacgcgcctgcacgatctcctcctgcgagcgagatctcaccaccgcagcggcgccgtggccatggcgggaaggtactaccagggccagggcggtggcgggggcacgtccatggaggtagtcagcacgccgaaccaggagctggccctcaccaactgtgcatacgtctgccccgcggacctccgtcgcttccccaacgcgctcgccgtcgtcgccgactcctgggtcttcaccctacgtgaacacaatgctgtcgcaagcgggcgcattgccttgaatgctattcaacgtcgtcaggcaaaggtttcagctggggattctgttactgttagcagttttgtcccccctgatgatttcaagttggctttgctcactttggagctagagtatgccaaggcaagagccaaccgaaatgacgagctggatgctgttgtgcttgcccaacaactccgtaagaggtttctggatcaggtcatgaccttggggcaaagggtgccatttgaatttcatggaacaaactatgtattcaccgtcaatcaagctttgctagagggtcaagagagttctacaccattggatagaggattcttgtcaagtgatacatacatcatatttgaggctgctcctaattcaggaattaaggtgatcaaccaaaaggaagctgctagcagcaaacttttcaaacataaagagtttaacctggaaaaattggggataggtgggttaagtgctgaattcactgacatatttcgtagggcattcgcttcaagagtctttcctcctcaagttgtcagtaagttgggcatcaaacatgtaaaaggtatactgctatatggacctcctggtactggcaagactcttatggcacgacaaattggaaaattattgaacggaaaagatcccaagattgtgaatggacctgaagttctgagcaagtttgttggagaaaccgagaagaatgtgagagatttgtttgctgatgctgaaaatgagcagaggacacgaggtgatcagagtgacctccatgtaattatatttgatgaaattgatgccatctgcaagggtgccagactctcaaatacg

SEQ ID NO: 23760 - DNA, 1376 bp, Zea Mays
ttttgaccaagggtgcacccacacttgatctagagttttgcggttcccgtgccctcacagtcacaggggacgcggctcgcctttccttccccgccaatccatccgctcttctcagcggcgagaagaagagatggggagcaacgccgccggcaagcctcctcctcctcctgctgctgctgtgtcgtgggagttccacgcgacggggcctcgcaacttgaccagccccggctggagggacctcatccgctccagctggagagatccaagctacagaaggatcgcagtgtcgtgcttcgtgcaggccgcgtatctgctggagctggacaggcaggagggcagagccggtgaagccgcgctcgctcccaactggtggaagcccttcaagtacaagctggtgcgcccgctcatcgactccagagacgggtccatctacggggcgcttctagaatgggaccagctcgccgccctcgctgacctgatagtggccaagcctcagggcgctcccaaggtggtcctcgcgctcaggggcaccatgctgaggcagctgaccgtggtgagggacctggaagacgaccttcggctgtttgccctggagagcctgagggggtccgtcaggttcacaggcgcgctggaggtgctcaagtcggcgatccacaggcacggcagcgccaacgtgtgcgttgccggccactccctgggcgccggctttgcgctgcaggtcggcagggccttggccaaggatggaaccttcgtggagtgccatctgttcaacccaccgtcggtgtcactcggcacgggcctcaggaaaatccaggagaaggccagcagtgtcctcaagcggtatatcagtagaagcggcggcggtggcagcagctcctcgtcaaatgtttccccaggaccaggagaggagctacaagccgccgccgctcgagatggagttggagaagaagtgatgagcagggaggtcaaaagatgggtgccaaacctgtacgtgaacagctgcgactacatctgctgcttctacgctgaccgtagcggcgtcgctaccgtcaccgaggagaagcgttccggaatgcattccaagctgtacgtgatcgccaaaggaccgagcaagttcctggaggctcacgggctgcagcagtggtggtccgatgattctgagctccacttggccgtgcacgacagcaaactcatgtataggcaccttaagtccctctatgtcgaacagtagtagagaaggcattagtacttgtttctcagaatgcctagttcttcttctctagtacagccagacaagaaaacatgtaaaccgtcagctgattaagagctccaactcttgcaactcgtctaagcatatcttcttctcttctcgcgta

SEQ ID NO: 23761 - DNA, 4291 bp, Zea Mays
cccccttttccaccgtttctctctcttctcacctcacctgtttggccgcttttctccactcccctcttccaatcagaccaatctccccgtctccctaaacacgaataccatccctctgctccggtgttccggctctcccacgcaccccaccccaccccactagtttttgcttcctgttcacttgtgcctgctctcgctcgctgttggcctgttgctgttgctattcccgtcccgtgcttcccttcctctcactggtcgtctagtatcctctctcccacctgccgctgccgccgccgccgccgccgccgccctgctcccacctgccgtcctctggtcaaagccagcggctcccgagatttgccgctgcttccttgcttgaggaatcaagcctgagcggtgagagatcaagagggagggacggagcgagagacgcaagaggaaagggagccagcccctcgcgcccggcattcaattggagccaacagtaggcgggtggggcggctgctacagcacgtcggactccataaattagctccccgctttccggcccccttttcgccccgtgtctcccccgatcggcccgtcgacgacgcggacgcccgccggagcatgcgcgccgcgggcctcggccgccgcagcgccgccgccggcgtccggaagatgtagctccgcgacccgcgaggagagggcgagggggatgaccgttacggcgcgcgggaggagcggcggggccgggatggaggagaagggcgacgcgcccgggctcggcttcctgggcctcgaccggatgcgcgtcctcctgccgccgctccgcctgccggagaagctgtcggccagggcgctgcggacgcacctcttcaccaactaccggatgcgcaaggtgcgggacagctccagctggctcatcccgctctgggtcctcttctgggtgctcctcgcctccgtcatctgcctctggatgagcaaccaggccgtcgccaagcgccgggagtcgctcgccagcatgtgcgacgagcgcgcgcgcatgctccaggaccagttcaacgtcagcgtgaaccacctccaggcgctcgctatcctcgtctccaccttccaccactccaagacaccctccgccatcgaccagaccacgttcgcaaggtacgcggagaggacggcgttcgagcggccgctcacgagcggggtcgcgtacggggtgcgggtcacgcacgccgagcgggagcagttcgagcgccagcagggatggagcatcaagaagatgtactcctccaagaccaagaagcagtcgcagggaccagggaacgctgaggacgccgaggtgcgggagccggcggaggagtatgctcccgtaatcttcgcgcaggacgcatacaagcatgtcatctccttcgacttgctatccggcgccgatgaccgcgacaacgtactccgagctagagaatctgggaagggtgttcttactgctccttttaagctgctcaataatcgccttggagtgatctccacctacgctgtgtacaagtatgagcttcccccaaatgccaggccacaggagcgcattcaggctgctataggctacttaggtggcatatttgacattgaagcgcttgttgacaagttgcttcaccagctcgcgggcaagcaatccatcatggtgaacgtttacgatactactaatgatagacggatcagtatgtatggttcgaatgatacaggcagtggcatgtgccaagtcagcacactgaactttggtgacccgtcaaggaagcatgaaatgcactgcaggttcattcagagtccaccttggccttggatggcaataacgacatcaattggaactcttgtgattgctttactgattggatacataatttatgctactgcaaaacggattgccagagttgaagatgactttcaggagatgagtgtgctcaaaaagcgtgcagaggatgcagatattgccaagtcacagttcttggctactgtttctcatgagatcagaactccaatgaatggtgttctagggatgctccaaatgctcatggatactgatttggacacaacacaacaagactatgttagaaccgcacaagccagtggcaaagctttggtatctctcatcaatgaagtacttgatcaggccaagatcgagtctggtaaacttgagcttgaagcggtgccctttgaccttagaacagtttgtgatgacattttgtctctcttctgtgggaaagctcaggagaaaggactggagctggcagtgtttgtttctgaccaagttccacaagcactaattggcgatcctggcagaataaggcaaatcattacaaatcttgtcgggaactctataaaattcacagagaagggtcatatctacttgacagttcatgttgttgaagagattatgaattgtcttgaggttgagacgggaactcagtccgccaataccttaagtggctacccagtggcgaacagaaagcgcagttgggaaaactttcgagtctttagcagggaactgaactcatctgagatgccttttgcacccatcgcatcagactcaataagcttgataatatcagttgaagatacgggtgttggaatcccgttcgatgctcagtcccgtgtcttcacccctttcatgcaagtaggtccatccattgctcgcatccatgggggcactggcattggattaagcatcagcaaatgcttggttggactcatgaggggagagattggatttgcaagtaaaccccaagttggttctactttcaccttcactgcggttcttacgagggcccattccagcagaaatgagaataaatcgtcagaatttaaagggatcaatgcattggtggtagatcataggccggtccgtgccaaggttactaggtaccatttacagagactgggagttcagaccgaattgacaactgacctagatcaatatatttctaaaattaattgcggatcacaaattgcaaagcttgtgctcattgacaaagaaacctggctgaaggaatcccactctatgcctcttttggttactaaattgaggaacaaagatcagccagactctacaaagttatttcttttggagaaccctaaaagtactgccaaaagcaattcacatatattcagggaatttaacttgaatgtaattatgaagccacttcgagcaagcatgcttcaggtttcgctacacagagcattgggtgggatagataaactgcactgcaggaatggagtacttggcaattcaacactgggcagccttcttcacaagaaacgaatcttagtggttgacgacaatattgtaaatctcaaggttgctgcaggcgctctgaagaaatatggcgcagaagtaacttgtgctgatagcgggaagaaagcaatcacgcaactgaaacctcctcacagttttgatgcttgtttcatggacatacagatgcctgaaatggatggatttgaagccacaaaaaggattagagtgatggaaagagatctaaatgagcaaatagaacgtggagaagccccaccggaatgcgcagggctccggcagtggcgaactccaatattagccatgacagcagatgttatccaggcgacgcacgaacagtgcttaaaatctgaaatggacggttatgtatccaagccattcgagggcgagcaattgtacagagaagtagctcgctttttccaaaatcaagaccaagttcagtaggtaggcttatatggaggagtgtaaagtagtggaggatatcgccaacggttcacccgtcgaggccgaaagaattttgtcaaagatctcatcttcttgaaagtggaaacgatttaggctggagatggaaccacccatgttcggatgcttggtacatctgaccaatctgcaaagctaaatgcgcaatgtcttgaaatcaacatgcacgtgcagctattcattcgacgatttgctgaggtcaaggcgtgtgaaaaaaaatcagctgcattcactaactgcaggtgccctctgccactatataatatataagactagggggagaagttttccttcccccggaaggcacggctgtacatattatattagggattggttggttgtttgtgcaggcatttttgtatgcatcatattcggcctgtatgggtcgaagctgtaaagtgtaaatgacacattcaaagatggaagttttgtttgacaaaaaaaaaaaacatcagtcgccatcagcttgtcgtcctgagttcctctcctgctattggctctctcgaccagccaattggcatactgagaactccc

SEQ ID NO: 23762 - DNA, 3640 bp, Zea Mays
ggaatctactactactctataagggtgtaaggagggcgtccaccatgcccccgcccgacgcccccttgcccccgtccatctcgccgcaaggcacgcggcgcgcctcgcgatgccccctcgcccccgtttgtctcgccgtgatgcgtgcggcgcgcctcgcgatgccctctcgcccatgcccctgctcgcctcttctccgccccatccccctgtgtctagcgcgctacccgcccctcccaacgtcgtcctctccgtcccatcctcccatcgtgcgacaaccgatccacgcctcgaggcccaggccgtgccacgccggtggggaagcgaaactcacttacaggacgcggatctccttccaaactcgaaggcgacgatccggcacaggggcaaccttccatgctgcttgtggggtggggacaatgaggcagcaagactcaaggtccaggatgatgaacaacaacagcggcgtcgacgcaggaggccctggttcagattaagacaaaaggggtcacaatgacagcgctgttggctaaggcgacagcaacggctctgcttcagcatcctatggtgaacttgcagctgcagggatggaaagagcttcacatacaaaaatagtatcaacattgctatagcagtggccatagatggtgggttgattacatcggttcttcaagatgctggtaaggtcaaacactttaccgtgcacaatgaatgttgattttttatgatttatttaaatgagtggttacttgttggtttatgcgtcttgacatttattcattgtcaaggaaacagaaggagttagttgataaggcgctagcaaagcagttgcagccccatgagtacaactctgatatttttttgcctcatacacaaatatgaatatgtagcacattgttgtatatcttttctaatgctctgaataagatgtggtggtacagtgcagaataatatgttctgttttttattcaactattcaaatcttatttttattcggctattcaaatcatattttttttattagctgattgccggagagattgaaatcaaaggggttgagctgcaggagagttgtagtttgtcgttcttttccatggtaggcattttcattgggatcatacaattattctctgtcgatgtttacaagaaaatagtatctaaaaacaagatgcttctgttccatgagggtgtgattgagactgaaacggtgggtaccagagtgaaggagtcggaggcagttttagtagagaaagaggtcgaactgatcgatgagcctcagattcaagagagccctccagttcctgcattgttggatgatgaggtggattttgcttaatcgtcacttgctattagagaatccgacattcccgtgaaaaaggtgctgataatcgtgacaatcacttctgttcggccacagcaaccatattacttgaatcagctagcccatgttttgaaagttgtattggtacctcttctatggttagtggtggaatggcctgaacagtcctatgaaacagcaaaaactctgttacagtccactcaggtggaagaggttgtttgtagatgttttttgttttcatatctgaactgtaatagtaaggttacaataatttttcacatagctgatggaacttctgtttgtgtgaagccaacagatggtccctcctgctaattagaaaccaatttttttagactttttcagcctcctctactgctcatgttgctggcttgtaataggtgggctaggggttatctagagatgacaaggccctcaagttggctttccagcactggatcgaagcgatgagtacaaacgggcagtggggattggtgggttttactgcccattcttgctcttttcatggtacaattatcctgtttttttcctacagtgatgttttattttgtggcaccatctttcgaccataaacaaatacactcactttgatgaatgttgatatactttcagcattcaattgtagatagaattcttgctttcgtgtagatctaggtcatcgtgtcgccgtctttgtttggctggttgtagagcccccgctctaggtttgtttagctcctcggttcttctagctccggtatggtttcctttttgcgcatagtggcggcatctgatgcatagttcgacggtccctcgcgttgctccggtatgtcgtgttcctctcatatttcttcgtctattttttggcctattgtagaattgttttgtttgtttcccgttttctttatagagcacgtgggagagcgccgcagctgctgcggctgtggcggatgtggcggccatggcgtggcgacctgtggcaaatggcggcatgaagaagaagctgatttgaggagtcgtcgctggactgggagaagtacatgaaggacaataacaaaattctcggagaatttgagtgccttgacaaatcaccatttagatactttcttggggaactatatggtggcaattcactgggaagcacaattgcagtgggcaatgagaagaagcggcagcgggtgtacaacactatgtttcatgtcccatggagatgtgaacggggaaattcagagtcgtgttcgcctcaattcctgcacccatctttgcagctctatattgttcaacaaaagatttgggaactgggatagctgaagatgcctctactgaagatgatgatttcagtggcgacctaccaccagagtttgaaaatatcatgatattcaatggtgttgaaaccgagagtgacattgctcctccagtgctcgaggaaaacaaggatgctgttgtatctgcaacaaaaactgcaaagtccctggatgggtttgccttaaaaacagggcaggaggaggagggtccggaagaggttgatgctactgaaaaagcaatggaagtggttgataatgttgtgaagtccctggatgaagaggtagaatcaaaggagatgcagaagcagcaaccgcatgattataatagcatgagcctaggggtggtaacgggtcatttaatttagcctagcaaatttacggatcgaatcaagttagggccggatcataaaataatacaattttgaactaataaaattaagggctttgttggttcgtgaagcaagtattagggccatgatccattaccactcctacatgagcctcaggaatcttaaagccacacacaagaaatatctcattgctgcaaaggaagaggaggtcaccgaagggaagaggcttcctctcgaggaggtggaagagaacgcatgcatcagccactgaacagaacaagcaggcgatttttttgtgtggatggcgtctgccacaaaaggattgaatcgaggagtgtgctctggttgtgaagtgataactaggctaccacatgttcattttcaaaagttttcgtgtgtgatcgtgatcaggggtgaaactgtggtttcagccaacaaacttgcagttcctattgcttctccccacttttttcctttatatatattttgtatcggttacagaacatggtttatccagtggtatgctgatgaaagatgctaagtttcgcttaatataatgtatatgaaggtcctgggtacctcaaattttgtccacattgaaccagtacgaatgacatcttccttgaaagttatagaaatgcttcaaagtt

SEQ ID NO: 23763 - DNA, 2611 bp, Zea Mays
ccttttgaccttttgtttaacaaagtcggtgcccctttggacaagccaggttgagctggtgcattgtcgcctcagcataggcaggaagcgtatttggcatgtgccatcatctctgatagccacgcttgaacacaccagagtacctgcaagcactgtaaagtatagactgctacatcagttaccagttacatcacacccaatgatgtggactttggtacccgcagtaggttgtacctgtctctacgacaagacatatctaccactgcagcaaggcatactcaaaattgcggtacaaccatagcatgccactgtgtacgactccatgatcatgacaagttaggagttattgaacctctgctggcttgttgctctctccttttttttggcctataaaagggagaagtagagcaacatagaacggaaagagatctttggtggattcaatccaactgactccacccgagagatccaattcagaggactcactcaaagatactaaaagggcaggtgtagaggtgaacgggagaccagtagtctagaattctcaccaggtcctgccttgatgaaaataaggcttttctatcgaccgcagattctgctgtgcaattactcacagaagccaccaaaccagtttcaggatggaaggggattgagtatcgagcagcatttcctctacataagcctcccggtgctaacttctatcctcctgacatggacaaagcggagtttgaactttggaagagtaaactgacagataaagaacaaaatgatgccactgggtttttcaccgtcataaaacgacatgactctctgtcttcatcgtcattaacacaatcagatggatcggatcagaccaagactaaagatgatctttttattgttccatactccaaggagtatagaccattcctagagaaagcagctgagcttcttgagaaagcatcagcgtgctctgattctccaagcctcaagaatttgctgagaaccaaggcgaatgctttcctttcaaatgattactatgaatccgatatagcttggatggaattggactccaacttagatctcacaattggcccatatgaaacatatgaagatagcctttttagttataaggcaacttttgaagcatttgtcggaatacgtgatgacacagcaacttctcaagttaaactctttggtgatcagctccaggatttggagaaaaaccttccaatggacaatattttcaaatcagatagtatatctgctgctcctattcgtgtgatcaatcttctctacaatgctggggatgtgaagggtccacaaaccattgctttcaatttgcccaatgatgaaaggattgtgaatgaacgaggaacttccatggttatgctcaaaaacatttcagaagccaagttcaagcatatcttaaagcctatagctgatgcctgcatcagagaggaacaaaaggaatatgttgatttcgagccatattatacacatatagtctgtcatgaatgctgccatggaattggacctcattctatcacccttccaagtggtaaaaaaacaacagttagaagggaacttcaagaattccattcagcattggaggaggcaaaagctgatatagttggtctctgggcactgaatttccttattaagaagggattgcttcctaagagcctgtcacaatctatgtatgtctctttcctggctggctgcttccggtcaatccgctttgggctggaagaagctcacggaaaaggacaagctctgcagtttaactggttgtatgagaaaggggcttttgtgttgcagtctgacggaaaattctcagttgattttacaatggttgaggatgctgtagaaagcctgagcagggagatactgacaatacaggcaaagggcgataagccttctgcccaatctcttctccagtcccgtgcaacattgacacaaccattgagaatggcattggagaggatagagcacatgcaggtacctgttgacatagccccggtattcagcacggcaaacaagctatttgcagacatttaactatttgggctcagaatcgttgtgctttagtaccgcccacaatacctggacgaaaccaggaattgctcaagaataaggcggcactaggaattgctcaagaataaggaagcgccccatgttaagcaaagctgataaaaccatggcgatatgtgagtgacctttttatcggaaggaaaattgtttgcatgcttatgtattgacctcaatttttacgtattggagtgatttgatgtgaaatttaaccaaattccacgtccagtacatggccatccaaacatggcctaaagtggtgtttgatcagtgagaattggaataaacccagctttgcctgaacagttgcgaagtactgagttacatcaatgcatattttgtaacaccaaaaaaagatgtattatcctaatggatgattgaacgaaggcattgtatatcgatccccaatggcccaatctttatgcacattctggcttgatcagatctagtttattagttaggcatatgacatctttaactcttaattttctaatgaacttgtcgaagttccatactagttttacattgactaacagataaa

SEQ ID NO: 23764 - DNA, 378 bp, Zea Mays
atcgaacatttggatgagccagcacaattgcttccttgcttgtggcagctagccagcttccctgccctaatcaactaatcgagatttcctcttagcggcgtgagggattgacagactgctgactacgggagccgggagggggcatcgtgcgccgtgcgcggtggcgaaggaagagcgaagcggcggaggccgagctgctacggcgctgactggccgggtcgcacggctacgccgctactcgacgcttgctgcggcttgtgggaagctggagaagaaagtttgtcgcctgtacagctgtcggagaagaaagctcgtgcttggcggcttgctatgggccgcgattgagaggagacaatccgtcttttttattgcttatgg

SEQ ID NO: 23765 - DNA, 675 bp, Zea Mays
ctccgcaggttccatctaagagagaaggcaaacaactgtggaaaattgaccgcaaagcacaaaaggaggatggataggaaggaaatggcatggttcaaagtattctgccaaggaagaggcatacctgtgctgacctccgagctgttcacacggactccaaaagccgatcaatctctgcgatccatggtcaccaatggaatatagaaggaaggggaatgcttgcattgatgtgccccactttctatggcctgcctccttcacctcgagagtctaggcggtcgctgtgttcaaatagtctggctgaaaagacttcgagaatgtttggcccttgtgcttccttttttttttgtattcggtgggcggtctataaatagtgagcagagacttccctccattgatgattcatggtgtgtggagggcactccgctattcttggggatccgccgttttgtgtctttcaagcctattaacggcaggcagccgggcacggttacttgcgtgcctgcgtatgaactgccagctttgctgcacatgttgcatgtttgacaagagattgttgtatacggtgtaacttgaatagcattaactgagttttcttagctggctttgaatagcatttaagtcatacatttgatttgtatactgctgtcacatgacatgagttttgtgcacctg

SEQ ID NO: 23766 - DNA, 1845 bp, Zea Mays
caaaagtgtagatttttttttcgcttgttgcacctccagcgtttcgcttcacccgaaaaaattccccaaggatgaagtgacggacaggggaagtagagctcaaatctcaggcaaacgacagggtcactcacaagtcacaactcacaaatactcttctcatttcctctcggttctgctcggtggcaacccagcgcgtagatcttgttcttggacgagaattctcctcaagttctcggatttctgtttttgtgccgcttagcaattcaaccccgaaattgttttgcggcgcagtcttcacccgaatcttgggtcgtagccaagaagatgaacaaggataaggctccgatgccgggagacggcgaccccagcgacggcttgccgccgcagtccacgcgccgtgccggggcgccgccctcgtcgtctaccccgccgcgggagtacgacatcagccgcatgccggactttcctacccggagcaccggccaccggcgtgcgcactccgagatcctgggcctccccgacgacctcgacctcagcgcccctggaggcggcgacggaccgtcgctgtcggacgagaacgacgaggagctcttctctatgttccttgatgtggacaagctgaactcatcgtgcggggcgtcgtcggaggccgaggctgagtcctcgtccgttgcggatggcgtcggtgagggggctgagctgggccacgcgcccaggccaaggcatcagcatagccagtccatggatgagtccatgtcgatcaaggcggaacaactggtgggggcgccggggatggaggggatgtcgtctgcagaggccaagaaagcagtctctgcggcgaaactggctgagcttgctcttgttgacccaaagagggctaaaaggatatgggctaatagacaatctgctgcaagatcaaaggaaaggaagatgcgatatatttctgaacttgagcgcaaggtgcaaaccctgcaaacagaagccacaacattgtcagctcagctaacattgctgcagagagacaccactgggctaacgaccgagaacagtgagctgaagattcgcctgcagaccatggaacagcaagtccacttacaagatgctttgaacgacacactgaaagctgaggtccagcggctgaaggtggcaacagggcaggggccggccaatggtggtggaggcatgatgatgaactttggcgccgtgccacgcgcgtttggaggaggcaaccagcagacgttccacagcagccagagccaagcgatgcaatccatgctggcgacgcaccagctgcagcagctccagctccactcccagcctcagcagcagctgcaggcgcagcatctccagcaggtggcgagagacctcaaaatgaaagggcatctgggcgcccaaggccagtggggcggtgggaagtctgggagcagcggcagctgaggctactactggcactggagttttggtgtatgtggttactggttagctaggagtggagatccccttgttctaggggggggggggggggggggtgctgccgtgcatgtgtagttaccgttagctcgggctatctatctacaggctcagttcagcttcagttttactgttaactcggtggctcagctctcctgcagcgtactgtgtccagaaactcggatggtaacaggtgttttatctgtcggaatctgtctgtatctcttcgctagtttaaagggtaaaaatggttgggatttcagggcttcaaatgaaatctcccgtattgagcaagagtgtgtagttggatgtacaaaaagggatggaaaaaggcaacgtttgatgagagtcacggagtaattttttatggcggcg

SEQ ID NO: 23767 - DNA, 2639 bp, Zea Mays
atgtggtctcctcaagcaagctttgaggaggtggatgtggcatggcggcactatgagcaggccggtactggattagctgctatattcataaacctggctgttgagaacttctctggatggaaatatactgcgacatttgctataataaagcactcgtattttgtgggattctttgtgtacacagttttcaatttagccctggtcttctcttctgtatatatagtcacaaactttgctccagcagctgctggatctggtattccagagatcaaaggttacttaaatggagtggatacacatggaatcctccttttcaggacattagttgggaagatctttgggagcattggatcagttggaggtggattggctctagggaaagaagggcctcttgttcatactggggcctgcattgcttcgcttcttggacaaggtggatctgcaaagtaccacttgagttctaggtgggtacggatttttgaaagcgatcgtgataggcgagaccttgtgacatgtggatgtgcagctggagttgctgctgccttcagagctcctgttggtggggtactatttgccttggaggaagttacttcctggtggagaagtcatcttatgtggagagtattcttcacatctgccgtggtggccgttgtggtgcgttcagccatgaattggtgcaacagtggaaaatgcggtcattttggagctggaggttttataatatgggacatatctggaggtcaagaagattactcataccaggaattgtttcctatggcaattattggtgttatcggtggacttcttggggcattatttaatcaactcaccctctatataactaaatggcggcgaacgtgtcttcataagaaagggaaacgagtccaaatctttgaagcctgtcttatatctttggtaacatccacgatttcctttgtgttgccactactgaggaaatgcagcccatgccctaagttagaaactaattctggcatagaatgccctcatccacctggcacagatgggaattttgttaacttctattgttcacaagatagagagtacaatgatttagcaaccattttcttcaatactcaggatgatgcaatacgtaatcttttcagtgcaaaaacatttcatgaatacagtgcacaaagcctgatcactttcctggtcatgttttatttcttggctgttgtgacatttggaactgcagttccggctggccagttcgttcccggaataatgattggatctacatatggaaggcttgttggaatgtttgttgtcaagttctataagaaactaaacattgaggagggcacgtatgcactccttggtgctgcatcgtttcttggaggttcaatgagaatgactgtatctttatgtgttatcatggttgagattacaaacaacttgaaactcttgccattgatcatgcttgttcttctggtttctaaggcggttggtgacttttttaatgaagggttatatgaagagcaagcccgattaaggggcatccctttactggattccaggcctaagcaagtcatgagaaatatgaatgcaagggatgcgtgcaagaatcaaaaggttgtctgcctaccacgtgtttcaagggttgttgatatcatttctgttttgcgaactaacaagcataatggtttccctgttgttgaccgtgggcagaatggcgagtcacttgtcataggtctcatacttcgtagccacttattggtacttctacaagctaaagtagatttccagaacagtgctttcccctgtgggccaggcgtactgaacaggcacaattttagtgactttgttaaaccagcatcaagtaaaggaaagtcaattgatgatattcatttgacagaggatgaactggggttgtatttggatcttgccccatttttaaatccttcaccatacatagtgccagaggacatgtcgttggcgaaggtgtacaatctcttccgtcaacttggattgagacatatatttgttgttcctaggccttctcgtgttgtaggattgataaccagaaaagatttattacttgaggaggataacaacaatgtgatgccggagctccaatcgacgagtgggcttgctgaacggcaaaatgctcgggggtaatatacatctggaacgtcctcttcttgacaacctagttattgaatagacacgtagcagcatgtatgtcaaaataattttgatagctagcagttaaccttgcactgcatgttgggacatggcccatgggtattatacttcacatgaatgatgaagcagcagtgagcggataatgcagcatggttttggattctgccgactgttgcgcatggatgttggcgttgcgcatcattttttgctccgtcagcagtggctagggaggcgattccccggtgccgtgtgtttagattaggtgattgtaacttacaaaggcgtccatacatacacaccatccatgtatcccacggtaaatttcgaagactgtatgtataagtacatatttgttatacgatggtaaagacaaaagctatgtaggatttgcgtgctctcatgaaactatgatacgtggctataattacttccggttcccgctgaaatcgctagaattttccattgactacatt

SEQ ID NO: 23768 - DNA, 2661 bp, Zea Mays
ttttgtagttcatttcaatcaaactgtgaacttgtgaagcataagctaaagcatacattctcatctttggcattgaaagaactgaaccatagaaaaattaaagacaggagcacttctccagattcaatgccaatgaaagaacttatagctgttgcacaagctagaaggaaggcccacacaggcagttgtcaccctcaaatcggataatcaggtctacttctggaaatgataatgttaattctaggagtccgtttgataatattcagcagaagaaattagcagcacatggagccaatgcagcgcgaaggtctttcaaagatttcctcagtacattgacaagaaccaaagaaagtatatcgcgcgcgacacgtcttgctatggaatgtgctaaatttggcattgctggtgaggcaattgacattatcgttgaacatctggaaaaggaatcaaatttgtataagagggtggatctcttctttcttgtagattcaataacacaatgctcccgcaatcagaaaggcggagctggagatgtatatccctctctcattcaggcagttctacctcgaatactctatgctgctgcacctcctggaaactcagcttgggagaatcgaaagcaatgtctcaaggttttgaaactttggcttgaaaggaaaacactttcagaatatatcatccgtcaccatattagagaaattgagactatcaacgaggcatcatttggaagttctcgccgtccttcaagaacagagagagctctaaatgaccctttgcgtgacaatgaaggaatgcttgttgatgagtatgggagtaatgctggttttcagctacccaacttaatttgcacaaaagtacttgaagaagaggaagaaaactcttctgaaggcaggagcttgagctttgaagctgttacacctgaacaggatgccccatataatgatgacaatgaagaatctcaaatgcctgttgagaagcatcaccatattctggaagaggttgatggtgagcttgagatggaggatgtagctccaccatctgatattggggcaaccaccaagtgccaaccagagcaaagtgacaccaatcgtgcaccatctgaccaacgcccttcagatgctggccctccacttcctgtggaccggcctccatctcctccgccattgccatcatctcctccacctgtccccgttcctcagagtgcacagatgcagcctaaattacaaatggcatctgatcccatggcgccacatcctcaaagagctacatatagtgttcaaagtcaacaacagcattctattgcagagcacccaggtaacatgaattcttctgttgcaccattgccacccccaccgtttaacagttcaggatatggagggcaacaaaatcagataccacctcccccaccaatggcaccactcaatcctcctggtccccatggcagtttccctgctcccccagcaccttaccatgggaacaactatcatcggcctccaaccacatccatgcctaacgagggatatcatcagcaaccaccaccccctccaccgcctccaaatcaattcccttctgtgccaccagaacaccaacataggccacatcactggggtaataactgtccaccgtatcccgagagatatcggtacaatggacatgatcgaggtaatcacagacatgatagaaggcatcatggacatgacagacaacaccattatgatgatagaggataccactacgatgatagaggatatcactatgatgatagaggccattactttgatgatagaagacatcattttgacgatagaggacatcactttgatgagagagctattagggggccaatgcacaatgatgccgctgaccagggaagatattcttttcctccaggtcctcctcggattcctgaccattttgaagctccaccagccccaatgcactatgggcgaccatcagatcctccgccaaggccttgtgcaggctggtctaggccgcctaggatatctgataactattctccctcgagacattctgtggagcctccagtttcacatacagctggaggtcatggtggatggagacctagataacctttttcggtatcgaagcggtgctctgatgctttccttggtctgtgggggcttaacctgtgggagagtctgtctggtgtctctgcttcaggttgaaggcacccacggaggtggagcactccaggaaagtgggagctggtacctgcctccttgtacagatgtatctcatggattctacggcggtcgggctgcctgaactgctgtttgtaccctagtaggggtttagactgcgcgaccacacgcagagctgagttgtaggggtgtagggtgtcttctatcaaccgatcgtagtcttacattgtactgtttgttagtgcaacagtcctcgattccattgctgaattcctcctggcctcatcagacgacagccagctgctctgatgtcttgccgaaactgtttgagcacagcgtacatatatgcctaaaaaagagaaatataaatcattttgcccgttgcacctgcttatatataagagcatggtcgaactaaggggtgtttggtttctaggttcgctcaattttattttatttaatatggaaattttagttaacctagaaattagtctctaga

SEQ ID NO: 23769 - DNA, 441 bp, Zea Mays
ttgagggcctttttctttccacttaatgatgtgtttttggcttaccaggatcatgtgggaccagctccgatgaagcttttccatttttcttaggcatgcaactccgatgaagctgctggccatgtcgtcctccgccggcctatttccatggccacgacaaaattgaggatcggttaccacctacctgcgtccatcggatgaacctatgtcgctgctgcttaactgcacattgagattgagattgtgtggttgtcgctgctgcttaactgcacattgagattgagattgtgtggtgttttgtttcaggttcagcctcaccgcctactgtggggaggacaacattgtagttttagactgctgctctacaagtacctactgccctacttcattttcagggtgcccttatttctaagcctgtatgattcggctagcagatgttag

SEQ ID NO: 23770 - DNA, 3444 bp, Zea Mays
gagacggggaggcaaaggcaccacgagccactctagagacgcctcctccgtttgttcgagctgcctgggcgggaaagagaaagcgagaccgagaccgcagggattgaaaaaagagggtgcaaaagcaaggctcggattcttgcggggcgagcgactcgtttctcgtctctgcgctgcgagcgaggctcctgctcctcgcggtctcgcttccctccaagttccaatccagcaccgggcgccaccgctaatcagtgctgatatatgaaccccgcatttggacatttggtggtggcaaggcaacgccaaccttccctgttgctgctttgaatgttctggtggttgtcggatggatcgccgcagttggctctggaagcgcaagtcattggataagagccctggggagagcgatagctctggctctgcttcatcacactctgagccttccttcgatgatcaggaacctaaacctgtgtctagtaattcttctccaaatcatagtcattcgcctgatgtttcttctagaataatttataatgagaatcaagaagctgaaagagcagaatcattgaatgagaagctggtgttagcaactagctcgaatgattcttctccacaacatgatcaatcgatgaagccagatatataccaatcacctctgctattcccaaatatcaggaatgatgatgttccagattctgtaaagaatttgaatgagaaggtgtccccaaagtttaaggtcgatgatgtccaggattctgtaaagagtttgaatgagaaactttctgctgcccttttgactatcaatgataaagatgacttggtaaagcagcacactagagttgcagaagaggctgttgcaggttgggaacaagctgaagctgaagttgcttctctgaagcaactacttgaaactgcatcaaagaagaatacctctctggaggatcaggtcagccacctagatgacgcccttaaagaatgtgtaaggcagcttcgccaagcacgtgaagaacaagagaataaaatccatgagacagttgctaagaagtctaaagaattggagtctgagaagtttgagctccagcaccatattgctgaactcagtaagcagttgcaagccacgaaactagaagctactacggtgcgtgtccagcgtgatctgcaggaaaagcttcagatagtggagaaagaaaacaaagacctcaaggtagaattactcgcactgtccaaggacctgaagatacttgcacgggaaagagacctgagcaaccaagcagcagaaacagcaagcaaacttcacctggaaagtgtgaaaaagataacaagagttgaggcagaatgccttaagttgcgtcatttaacgcggcgtacgtccttgaccaatgattcaaggctgataactaacagtgcttgcatggaatctcagactgacagtcagtctgacagtggggagcacatgctagttgatgagatgaaaaattctgattcatgggcaacagctctgatagctgaacttgatcagttcaagaatgccaacaacgacacaagaaatcttgtgaataattcggttgaaattgacctgatggatgatttcctcgagatggaaaagctggctgcactgcctgaagtagactgtgtaagctctagctttggagctgaaactgattctgaccaaggtgtgagtagagataaatcatcaaaagttaaaactgaaccattgcagtgtcaggtgacagatttgcacgcaaagatcgagaagattgaaggtgagaaaagggagcttgaaatggcccttgcagatgccagagttcagcttggcacatcatgtgatgctctaatggtggccaacaacaggttgattgatttgcagatgcagttggacttggcaaatgagtccaaacatgctgctttcggagaagctgagcgactgaatggtgagaggaaagatttggcattgcaactggagtccaggtcttcacaagttgatgagcttcagctgatggtggcatcgctggaaaagaatgtagacaggaaggtgttggaattgcagttagagttagtttctgtggaggctgcagatctgcgcaagacagtggcttccctggaagagaagattgatgcagagataactctctctatgcagcacaaaacaaatgcagacctggcagaggcgtccaaagaatcattagaggcgcagctgcagtctgcaaacacagagatagggaaactgaacgggattgtgcaaactttagagaatgaggtgaggaaagagacagattctcgtgaagaactactgaaacagatagaggctatgaaaattgagtcagagagatcactatctgtggtgtctaccaaagagtcattagaggtgcagctccaggtggcgaattcagaagttgcaaagttgcgtgggatggtgaatgctctggagtgtgatgcggcgaacgagaaggcatattcttcagatctccagatgcaacttgaggcagtggaaggtatcaggaaggtgttggaatctgagcttgagtcttcacaccaggaggtgatgaggctgaaggagaaagtttcgtccttggaagcaaggatcaaggaccagacctcgttgcttgtagaatatacagctaaatcagaggatgcagtgtcccggaaaaaggcaatggagggtcaactagaagcagcaaatctggaagttacaaaactgagaaacaaggtgagcctgatacaaggcaaggtggagcaggagaagcttctgtcagaagagtacgaagcaaaatgccgcaagctggaggcgcaggtgttgagggacagccgagaggcgaaactttggcgcctcacgaactcaaacggagacctgaaggagaaagaactagtcagtgctgccgggaagcttgcggagtgccagaagactattgctaaccttggccgccagctgaaatcgctaacagatcttgatggcgtggtggccgatcctgaaaagctggaatcgagggacacgcacctggacttcagagatggcggagacgtggctgatggactgtatgaactgggtcttcctaagaggaacggtagctgcctctcaccccttcggtcggatccgtcgccgaggggtttgccgtcccttagtagctacctgagcaaaacaaaaaggtgaaaagtctgatgggatcattcaccattgtgcttgtgcataaattatttgacagtctatggatgatgccagttgtgacctggtggtagatcggtgtacatttacagaacttgatggttgctcacatgtgtactttctccttttgttttgctctcattttgcgagactgcagggtttgtgacaaatttactagatcttgtgagactgtagtgcgttattctcgcgttggaattcaactcgtctacaacaaaaatagaagaaaaaaaacaaattcaaccggtcggcaaagtagaagtagg

SEQ ID NO: 23771 - DNA, 1804 bp, Zea Mays
gcctcgtgttccccctctcgttccttctgcctgcctgccatagcacggcggctccacaacccctggcggcctggccttgtgcttcgtgcgtgcctacccccctataagtacgcggcaccgtctcgcagacaccttgcagaaccatcactagtgagtagtagtgagtgacctgcaaagacacgcgaggcacgcagagctggagcagctgatctgagaaccaggaattaggatggcgatggagaaaggctggaaggcgagagacgctgctggtgctttcatgatggacttggagctggtggccgaggaaaccgacgacgcggtgccgtcgataccgccaccgcagacgccgctggagcccatggagtacctctcccggtcgtggagcgtgtcggcgtcggagatttccaagattctcctcggtggaggcaagaagagcagcgttgcggcggcgagccggcttccggaggtgaccataccggagcagtctgcgctcgccaccacgtcctccgtcgttcctctaccgtgtcatcagcagaacagagccgcaagaaggtcttccacgagcagcggccaccaccaccagtcgatcggcaagtggttccaggtccaccacagggaaacacgccgggcgaagcagagcagcaaggagaagcagcgcgccgagaaggcccacgtgcacgccatggtgtccgtggcccgggtcgctgccgccgtcgccgccgtcgcgtcggccacgagctccaacgcccaggctaccactaccaagatggcgacagccatggcgtcggccaccgagctgctggcctcccactgcgtcgaggcagctcagcacgcgggggcgcgccacgaccaggtggccgccgccgtgcaggccgcggttggcgtcagaagccccggcgatctgatgacgctcacggcggccgcagcgaccgctctgcgaggagcggcgacactgaggcagagggcgcagcgagagacgaggagcaacgcgagcatcctgctcccgtacgagaaagccgcgaattcgtggagcccggacatctggtgcaaggagggggcgctgctgaaacgcgcaaggaaagggggtttgcacaagataagagtatgtatctacatcaacaagaggtcagaggtgatactgaagctgaaaagcaaacacatcggaggcgcgctgacaaagaagaacaagagcgtggtttacggcgtatacagcgagcttccgacgtgggctgagccagggaaggactgcatagaggagacatgctgctgctttggcctcagcacggcgcagggcctagtggagttcgagtgcgagggcaacgcgagcaagcaggagtggatcgacgacgtgcagaacctgcttcgtcaggcggctctgcatgaccgagtaggggataaactgggattagtaaaactcagctagtgcagtctcagtatataaccctctttcatggtagcagcagattgctgtgtcctgctgctcctgcatcagcgatgcgaggggtacattaacatatattggtcgtactcttgtcactgacatgctatacaacatctatagtgatagacatacggaatatattagtatatgttttgtaaagggccggagcagacaatcaaaatcgttgggaggacgctgatcccagtttattttttagaaaaaaaaaaacagctagcccgagttttaattaagttcggttaggcctagaggggtggacgttcggtcttcaacccatcagctgttcggactaattattcacgatcggaatttcgtagcattgtatctaacactgtcatatcataa

SEQ ID NO: 23772 - DNA, 4020 bp, Zea Mays
ttaccgaatgtgattgtgactacaccgccactgctctgctcaacacggttcaccggtaatgatccccggttcctccgactgcaaccgggcgccacgtccgcacctccatctcgctttcagccgttcgtacctaggctacactacatgaaaggtcgctcttcagctgaaactgaagtctgaaaccaccgcccagcgctcgcctgtttctgcggccgtcgatggagctccacctcgccaccatcgcccaccgcccgcctttgccggtaccggcgcggggccaccacctccgccgccgcctccaccacctcccggctcctctctccttccaaaacacctactccccctccctttcctccccgcatcatcatcgcctttctcccacccttcgccgccacctccgcctgcctcttctcgcctcccaagcgcccaattctaacccggagcctgaacctgagcccgagcccactggtgcgaagctactgccgctcgtcatctccatcgccatcggcctcgccgtgcggttcctcgcgccgcggcccgtcgaggttagcccgcaggcgtggcagctcctctccatcttcctctccacaatcgcggggctggtgcttggccctctccctgtcggcgcatgggccttcctcgggctcacagccgccgtcgccactcgcacgctccccttcaccgccgccttctccgccttcaccaacgaggtcatctggctcatcgtcatttccttcttcttcgcgcgcgggttcgtcaagacaggcctcggcgaccgaatcgccacctacttcgtcaagtggctcgggagcagcacgctgggcctttcctacgggcttaccctcagcgaggcctgcatcgcgccagccatgcccagcaccacggcgagggccggaggcgtgttcctacctatcatcaagtcgctctcgctgtcggctgagagcaagcccaaccatccatcgtcgcggaagcttgggtcctatcttgtgatgacgcaattccaggcatctggtaactcgagtgctttattcctcactgctgcagcacaaaacctgttgtgcttgaagctagcagaggagcttggtgtaatcattgcaaatccatgggtatcatggttcaaagctgctagtttgccagctcttgtttctctgctagcaacaccatatttgctgtacaaaatcttcccacctgaaacaaaggacacccctgatgccccagcactggctgaaaagaaactgaagctcatgggccctgtgactaaaaacgaatcggttatgattggcacaatgattcttgcagtctccttatgggtttttggggatgctattggtgtgtctagtgttgtggctgcaatgcttgggctctccattcttctcgttctcggtgtgctagactgggacgattgcttgaatgagaaatcagcatgggatacattggcttggtttgcagttctggttggaatggcaggacaactcactaacctgggaattgtttcttggatgtcaaactgtgttgccaagctgcttcagtcgttctcattgagttggccagtggcattttgtgttctggaggcctcctactttctgatccactacctatttgcaagccagactggacatgttggagccttatactctgcatttctggctatgcatatagcggccggtgttcctagtgtgctgtcagcacttgctttggcattcaacacaaatctgttcggtgcaatcactcattatagtagtgggcaggctgcagtatacttcggagccgggtatatggagcttccagatgttttcaggctgggttttataacagccttggctaacacgttaatctggggagttgttggaaccatctggtggaaatttttgggtctgtactgacagtggcagacatgtggttgaccaaaattttcatttggcactggtcgaattgctcttgctcattgttaggaagggcagaatatctagttaactaccgttgctccctccggtcagctatcgctgaggtgatcagcagggagagtgggagacggtcggagacagaggcctcactcctccacactctcagtcgtcttccagtcccagcgctttcttggatcgcgaggaaaccactcggggagtttgcagttgcagagaactgtatcggccgaagtggttgcacggtgtgttggccttggccatgcgccacggcagggaacagagacgagcagcagggaggcagcaatggaggcgctcattgaccctgctctcgctgtaaagatagtcccgcggtgccctccgaattccacttgatccaactctcgacatgaagcggccacgcggcgctactccctccctgtctgcgatgcccaatcatcaggaagatgacggctacggcgtgctcgggatggaggcggacgtggacgtggacgtggacgaggagatgatggcgttcggcggcggcggcggcggggagaagaagcggcgcctgagcgccgagcaggtgcgcgcgctggagcggagcttcgaggtggagaacaagctggagccggagcgcaaggcgcggctggcgcgcgacctcggcctgcagccccgccaggtcgccgtctggttccagaaccgccgcgcccgctggaagaccaagcagctggagcgcgactacgccgcgctgcgccgctcctacgacgcgcttcggctcgaccacgacgcgctccgccgcgacaaggacgccctcctcgccgaggtagtattgtcgataactccatactatatatgccgtcgtatcgtataggctgctgggcgagtacggttaaggcgttctatcgtttcttcgcgtgcgcaacggctgatcctagttccgttggctgtgtgaatcgtcgcagatcagggagctcaaggcgaagctgggggacgacgaggacgcagcggcgagcttcacgtcggtcaaggcggagccggcggcctcggacgggccggcccccgcgggggtggggtcgtccgagatcagtgactccagcgcggtgctgaacgacgcggacccgcccgtggcggaggcgccggcgccggcgcccgaggtgcagggcacccttcttgtcgcgccggctggccccgttgccggcgcagcggcggcgaaccatggcggggtgttcttccacgggagtttcctgaaggtggaggaggacgagacgggccttttagacgacgacgggccgtgcggcgggttcttcgccgtggagcagccgccggcgatggcgtggtggaacgagcccgcggaacactggaactgaaccgaggtggacgcggcagtgcagcgtagtagaatcgggatctcggacgagcggtggaggaataaccgaatagaggaattcggagcgataaagaaggggcttttctgcaaattttgtaaaacggggttttacctagccctactttttgtcaattctcgagcgtattagcagtagacagtagtagtagtctgggtcggaacccagtcaagctcagcgcctgggttgcgtttggactccagtgcagaattgcgtagaggatttagaggaagagcggagctgagctgagcgaggcaggagtaaaggacaacctgtatgtcactgttagtgggcccagtgccacgtgaaagtcaggcactgttggtgcccattgacggccggacttgccagcgacgcggatgggcgacgtgaacgtgtctgggccgagcagtgcgctcgctccctccccccaatgggccatggcctcttccgcgaaagcgtgctcccctgtaagtatctgatttggatgctagccaaggctgctggatgattacttcgattatctaaaaaatctgatttggatgctcgccgctagatcgttggctcgctgcggagggaatcggcagcggtgccgtcagattgtggaatgtgttcaacggttatctgttggattaatgtgggcttggcccaaattaatattcaataatagtcaatgctaatggcccactttaatgctatggtgtactaattatttagtaccatattggaagttcaaa

SEQ ID NO: 23773 - DNA, 1026 bp, Zea Mays
ccgacatcttcaccaagggggcctgagaaggagctacttcagcttgcagcgtttggggaactacgtgcattgtttccaagtgtccagattcacattgagcttgtcggaccagaagttccaaagtccagggatggagaggttgtgaacatttccagatatgcatgttgttctgataagagttgctgttgtaaatcttctattggttccaaagacttgagttgcactgcagtgacactcaaactgtggaaaggtttctatcatgagagatgcagtgatatattgaaggattccgttccacaacttatttttgccccaaatgcgggtgtggctgcatatcctagttggatgccaactattgaaatgataaggcagactgggattcctgcaatctttacggacttctgtgaagaagctgcacatctagcatcctgctgcataagctccataactggtcaaccccttaaaattccaatccaggtaaatcctttcaggcagccagttgcagcggaaaacaatgcattatacgtaccatgttattcaaattgctttgtttttgggatgtaaaattgccctgtcaccaggaagtatatttagagattgatttgtcaagaaatggaatgtgaattttcaaagaagacaagggtgccattcctagaacatctgagatgggaggtttttatttctgagagatgatggaattaggatttaatgttggtacacttagaatttgagaagacaagttgcacaaatcaagaggaacactggaagggctaggaatagcatgtgtacaagccgactaggagaaaatgtattttatttgaacctctgaaaatatttagatactgcaattgtaagattttcgcatcaaccgattcttgaaatacactttttcataattgggagatgtatatgttttcttatggtggagctacatattatctaattttgttgttcacagcaatctggaggaccgagattgtaagaactgattttgattcataaaaacatagaccagtgttccatgtc

SEQ ID NO: 23774 - DNA, 1259 bp, Zea Mays
ggcaaagacaggtaaccaaaatagatgatattggttgatctggtttagaccgttagattgcaatctgatggttcacttcatccactgccatctgtcaattgaagaagtaaagaaatccaaccccgtaataataaacagataacggccccgttcgcgcaatcgcgctcccgcatttcgtcgagcaggtgtgaatttgtgatgccgccgtctcctatcgtcctccctgccaccgcgctgccggcggcccgcctcgccagagtggtggccgcctccgaaagcggaggcgcgactcctccgagggcgtcccctcggcgggggcggcgcggcaagcccgggttctctcggcgttcggcaatcaagaagagcttccaccaggagcaggtcgtgttctccactcccgtctccaccgaccccaccgttgccgtcatcggaggcggcgcttccggcctctcctgcgcaacttccctcgccgcccgcggcgtccgctccgtcgtcttcgatacggggatgcatggcctagggggaaggatggcgactaggttcgtcgacggaggcaagcagctggtgttcgaccacgcggcacagttcttcaccgcgagcgacgagaggttccagaggctagtcaacgagtggctcgacagagggctggtccgtgagtggagcggtttgatcggcgagctcgaagccggcggctgtttcaggcccataccttcgttgacaccgaggtacatcggtgtgaatgggatgcgcccacttgcagatgcaatgctgcctgagactgatatgattaaagttttgaggccttgttggataagcaaacttgagccgttcaatggtttgtggcgcttgtttgagaatgaaaagcctcgcggtgaatacgatgcagttgtgatagctcataatgggaaatgtgccaaccgtctgctctctacatcaggattgccattactaacaaaacaaatgaagagactagagctcagttctgtctgggctctccttgcagcatttgaagatcctcttccgattccacttcttgattccaatgcagcatttgaaggagcatttgtgagagatgtggattctctctcttggatgggcaacaatacccgcaaactttttccaatgcagacaggcgcacccgagtgctggacatttttcagtactgctgcttatggaaaaagaaacaaagttccacaggaaaatatcccaaaactcactgcagaaaaggtgaaggaagacatgcttggaggagtagacga

SEQ ID NO: 23775 - DNA, 1791 bp, Zea Mays
ctggaatctggatcatgatgtatagataaatcaagatcacagggtggaccagactctaagaaggatctaattatccataaggatgggaatagtcaaaatattgcagcacagactttcacttttcgtgagctcgctgcagccactaagaacttcaggcaagattgccttttaggagagggaggttttggtcgtgtatataaaggacgcttggagaatgggcagatctgccaccagataaagagcctcttgattggaacacacggatgaagatagctgcaggtgcagctaagggcttagaacaccttcatgacaaggcgagtcctcctgtgatttaccgggattttaagtcatcaaacattcttcttggagaaggatttcatccgaagctatcggactttggccttgcaaaacttggtccggttggtgacaagacccatgtttcaacacgtgtgatgggtacatatggctactgtgccccagaatatgcaatgactgggcagctgacggttaaatccgatgtgtatagctttggtgttgtgttccttgaacttatcacggggcgtaaagcaattgacaatactaagacccaaggggagcaaaatttagtggcatgggctcgtccactgttcaaggaccgaaggaaattccctaaaatggctgatccaatgcttcagggccgcttccctatgaggggtctataccaggccttagccgttgctgccatgtgcttgcaagagcaagctgctacacgtcctcacatcggggatgtcgtcactgctctctcatatcttgcttctcaggcatatgacccaaatgcccctgttcaacacgtccggagcaattcatccacccccagggccagaaaccctgctgggtggaacggcgaccagcgcagcgtgcgctcgcctaaccatcattctccagacccgcggcgcagagacgctgcgggggcatccaagtatggagcagaggttagcaggactagctctaccagcgactctggccggcgatcaggcctggatgacatggacctgaccgggtcgcaagtgggaagcccagcgcagaccggaagaagaagagaagctccaaggggcaccgacagacagcgtgctgtcgcagaggccaggacatggggggagaattcaagggagcgaacaaatggccatggcagcttcgacagcacccatgagtgaagccgtcaggttctgttccagtcatcattccagaacccccaccatgggttgagtccactcattcatcagcaccagtcagatccgatcttgggacatggcgtcggtccaagtgtctgtgaataaggcttttcttgccctcctgtggcgaatgcaattctcctggcgcccattccttgccaatgcgacctgtgtgtgtcatgcctctggcgactgggagcctcaggaggagcctgtaggattcagtcagaggtagacaggtcagtgaagaaagaggaggggcgcggagtcacattggcgagtgttttgttttttttggcggctaaatgctgagtatgttcagctgcatgtgtcctttttgtgtatgtgtacgtgtaagacgtgtaatagcaaccgtgtcaggtttggctacctgagaggcctttgaagcttctgctgctgcttccttccccttgggaattgggagttcagagttgaaatgtaggataggcgatgttgttgagtacatcaactgtttttacccttccatgttgtacggcgacgcttccctgaacaatatgaccatgatgtgcccccctgtccgccaatggccaatccgtgt

SEQ ID NO: 23776 - DNA, 1779 bp, Zea Mays
tgggctcggttgccccatgccccggtcagtttcacacggctgaagccagccggaacgtgttgaggaggggtgggggatagggttttttcgcaagccagcgaggcagcgaccgttttgtcaccgcaacacccccgccgactccctcgccgccgccaggaatggagtccagcgctaagaagcttagcagcctccgtatcacctcactggatggcgatgatgacgaaaccgaggacccgcatcagccccctccagcaggaccctccgccgctgcagcagattctgatgacgacgatgaagaggaagaagcggaagtgactcttggtgtccttagcaaaccgaaacacccaggcctccttctccgccacttgttccccagcaaggccggcggcatcccggcgtggctagaccccgtgaacttgccgtcggggaagtccagctgctgcggtttttgtggcgagcctttgcagtttgttcttcagatttatgcagcagttgaagacaatgtagcagccttccatcgaactctgttcatgttcatgtgcccatccatggcgtgcttgcttcgagatcaacatgaacaatggaagcacaagcatgggaatccatgtagaagcgtgaaggttttccggtgtcaattgccacggactaatgccttctactcagctcaacctccaaagcatgaccggtctgacaaaccactgtgtccaggagcccatgtatgccactggtgtggtacctggaaaggtgataaaatatgtagtagctgtaagaaagcaagatactgttctgagaaacatcaggcactgcattggcgtactggtcataaaaatgattgcctccagataataagttcttctgctgcttcaaattcagttttgccaactgttggaaaagttcctgctaacactttttggccagaatttgagataaaaatagactatgaaggtagatttgattccgatagtggtgatgagaataactcgaagttgttggtgatgcaaagacatgggaaacctgatgctatgatgcagtcatggatggatcaatttgaggctgattctgacaacaaatgctgggcatcttttcaagagcgggtctcaagagcaccaaatcaagtgttgaggtattgtcgagaaccaaatgctaaacctctctgggcgttatcttctgggtgtccatcaaatgctgatatcccatcatgtagctactgtaaaggtccattatgttatgaatttcaggtaatgccacaattgctatatttctttgttgtgggaaatcaaccagactcccttgactgggcaacaattgctgtctacacgtgtcaaggggcatgtgaccaaagtgttagctacaaagaggagtttgcttgggttcaattgtaccctacaacaactacgaggcaataataatgtttgcctattccttgctgtccaatgctgcaggtgtcaaaaagtttgcagaaagtcagaaacaattcagtaaatacccccgccagaagaattggaggttgggatgctcgaggcaggagttgacaggaaccgtctgcaagtacgtacctccttttggtactagagtttctgagatagggaggagtggcttcaatgtttccaggtctattggtcgtgaggagaccgtgggtcccagacacatggtcgttacatcgcctttggtccattttaggcactaccatagggcccatgtagatgtgatggctatagggggtgtttggtttctaaggactaatatttagtcccttcattttattccttttaagtttta

SEQ ID NO: 23777 - DNA, 3398 bp, Zea Mays
atcacacggccgtgaggagcaactctgttcctcatctcccgttcaccccgcgggcgcagggcgcgctctctcctcgtggcgatcgccgaccgtagcggccgctgcccgggttttcgtcggccgcttcgccatgtcttcgctggacccttcgccagcgacgagcacccaacagcagaagcaattggagagtttggtaaatctactgacgcagggaagcaggtgtaactactgagcaggatccggattcatcgactaatattcctgagtatatgctttttgggtggcatctcttcttaatgctccatttgagatcaccagaattgttcaaggacctggtgtcctgcatccatggattagttgctgtgttggccatacttttgattcacgtgccagctaaatttaggagcttcacgattgaaggctcttctcacttaatcaaacaaactgagaaaggcgtggatcttattgcttcattatgtcataactatcatacctctgaagaacgtttgaaagaaatgttgcacaagtctcacaatgcaatagaagacattttccatatgaaagcactaagtgcttcagagtgcaaaccagaaaatttggataagatagacacagatgacctgatgtatttcaaaggtctgattgatatggaatgtttccagtcaaatttggaaaaaatggagaaactatgtaattctaatagctgtaaaggggagcttgattttaaatcaattttgatcaataatgattatattccctatgatgagaactcgacgggggattccaccaatttaggacattcaaagtgtgcctttgaaacattggcatctcccacaaagacaataaagaacatgctgactgttcctagttctcctttgtcaccagccaccggtggttcagtcaagattgtgcaaatgacaccagtaacttctgccatgacgacagctaagtggcttcgtgaggtgatatcttcattgccagataagccttcatctaagcttcagcagtttctgtcatcatgcgatagggatttgacaaatgctgtcacagaaagggtcagcatagttttggaagcaatttttccaaccaaatcttctgccaatcggggtgtatcgttaggtctcaattgtgcaaatgcctttgacattccgtgggcagaagccagaaaagtggaggcttccaagttgtactatagggtattagaggcaatctgcagagcggagttacaaaacagcaatgtaaataatctaactccattgctgtcaaatgagcgtttccaccgatgtttgattgcatgttcagcggacttagtattggcgacacataagacagtcatcatgatgtttcctgctgttcttgagagtaccggtctaactgcatttgatttgagcaaaataattgagaactttgtgagacatgaagagaccctcccaagagaattgaaaaggcacctaaattccttagaagaacagcttttggaaagcatggcatgggagaaaggttcatcattgtataactcactgattgttgccaggccatctgttgcttcagaaataaaccgccttggtcttttggctgaaccaatgccatctcttgatgacttagtgtcaaggcagaatgttcgtatcgagggcttgcctgctacaccatctaaaaaacgtgctgctggtccagatgacaacgctgatcctcgatcaccaaagagatcgtgcaatgaatctaggaacacagtagtagagcgcaatttgcagacacctccacccaagcaaagccacatggtgtcaactagtttgaaagcaaaatgccatccactccagtccacatttgcaagtccaactgtctgtaatcctgttggtgggaatgaaaaatgtgctgacgtgacaattcatatattcttttccaagattctgaagttggctgctattagaataagaaacttgtgcgaaagggttcaatgtgtggaacagacagagcgtgtctataatgtcttcaagcagattcttgagcaacagacaacattattttttaatagacacatcgatcaacttatcctttgctgtctttatggtgttgcaaaggtttgtcaattagaactcacattcagggagatactcaacaattacaaaagagaagcacaatgcaagccagaagttttttcaagtatctatattgggagtacgaaccgtaatggggtattagtatcgcgccatgttggtatcattactttttacaatgaggtatttgttccagcagcgaagcctttcctggtgtcactaatatcatctggtactcatccagaagacaagaagaatgctagtggccaaattcctggatcacccaagccatctcctttcccaaatttaccagatatgtccccgaagaaagtttcagcatctcataatgtatatgtgtctcctttgcggcaaaccaagttggatctactgctgtcaccaagttccaggagtttttatgcatgcattggtgaaggcacccatgcttatcagagcccatctaaggatttggctgctataaatagccgcctaaattagtatgaatctcaaaatgacaatttcttttgtccaacatgatttcatgtctacaacactaatttatatcactccatttcgtgttaaatttgcagtaatggcaggaaagtaaacagtcgattaaatttcgacatggtgagtgactcagtggtagccggcagtctgggccagataaatggtggttctacctcggatcctgcagctgcatttagccccctttcaaagaagagagagacagatacttgatcaattataaatggtggcctctctcgtatatagctcacagatccgtgctccgtagcagtctattcttctgaataagtggattaactggagcgatttaactgtacatgtatgtgttagtgagaagcagcagtttttaggcagcaaactgtttcaagttagcttttgagctatcaccatttctctgctgattgaacatatccgctgtgtagagtgctaatgaatctttagttttcattgggctgacataacaaatctttatcctagttggctggttgttgggaggcattcatcagggttatatttggttgtcaaaaagtactgtacttaattcacatctttcacatttttcactagcaatagcagccccaaattgctttcctgactaggaacatattctttacagcttctccatcagactgatgatcccatattcagtgtgctgcaagtgatttgacatatgtggcttatccttcagacgaagctttctccatgatttattacactcaacgctctcttctgtgtttttgggatgctgcattttgtatgtcaaatattcagggaaaaattacttttgcgacgagcaaatgtaatggtactgtgattcca

SEQ ID NO: 23778 - DNA, 827 bp, Zea Mays
aattgcaatgcgtgataagcttgagccgccatgattttagaaacgaggttcacgtcaaaatgtccaccgaaagaaatcattcgcaagattgaggaagctgcaaaacctctaggatttggtgtccagaagaaaaactacaagttgaggctagagaaagtaaaagcagggaggaagggaaacctgaatgttgctacggagatactacaggttgcgccctcccttcatatggtacaagtccggaaagcaaaaggcgacactctggagttccaaaagttctacaagaacctttccaagaccttaaaggacgttgtctggaaatctgaagacctgcaaatgcgagctgcttcttagcatccactagatggcgagatgttcgtacgtgtcagattccattcccgtagcatgatgtgtcgtcagccgtttctgttcactgcactctgcatggtccggtgggcgcgtggcttggcattttcagagaccgcgttgctcgttgcagcccgggatgaaggcgatgcagtaggttttgtggatgtggtgagctctgtatatgcctattgatgagtcatgttgcaagctgtaacgacactatgatccgtgaagtgtagaagcagccaagtatgttctttctatgctgccccatttcccggcagtttccatgcattttgaagaaaaaaatagtggctaactcattgatatttgtatttggtcatcattaataaatcgcctctccatctgtgcatgacccctctatcgttgtaagatttttttacaatcctcatctttctaaggttctgtttttttaccagattatataattcagctcaaat

SEQ ID NO: 23779 - DNA, 180 bp, Zea Mays
aaggcgagctatcaagggctgagtagtcttttcccttttaggtcggtttcatcttccaccttcatcatcatactaagccgaagctccttcagccacagcttcgacgctcgttcatcctatcttcgggttgtatctccatatcacgtataccttcgtcttaaagccaaagcttcctgtaac

SEQ ID NO: 23780 - DNA, 312 bp, Zea Mays
cccacctcaagccgagagcgcggccgcccggcacgccggagacggtcacggcatgcgcgcgcggtcgcttgctactgggaagagctagcaaggaggagcagtgcgcgatggtcggcgaggcatgtggtgtgccgggtgcggaggtggtgtgtgtgcgtgagtggcagtggtggccgcgggctcgctcgctttcagcagctgtcgttgcttgtgtgtgccgcagccgcacccaacaagcatatggagggcgtgactgccgtttctctccagctccgtcttcctcacttcagttttagtacgcttacgcctgag

SEQ ID NO: 23781 - DNA, 232 bp, Zea Mays
agtggtgtcattggatttttgctatgtgcaaaagaaggtcatgcagtgaacttcttaactcctgtgaatccaattgagaaaatagaaggagcaacaaaagctggaagggaactcagattttacaattccgagatccatagggctgattttgttcgccaacatttgtaagaagagaactggaagcatataccactcctagtacttctgctgaaaacgagaaaccaaaagaatc

SEQ ID NO: 23782 - DNA, 2021 bp, Zea Mays
cacgatgacaacgaaaataaacacgctctttggttgatgcttgcttgttcgtcctctaaaccacaccgcccggtgaaggcactaggcgcccaattctctcccgctctcccctctgctgcaagtctgcaaccgcagcagcacgtccatttcacgtgccctttcctccctccctttcccctgcccccacgccacctccgttcgccgccgcccgccgcgccggcgatggcgatgaccgaagggcttgtgcctattacgcggacctacctcgcgcgctactacgacaagtacccgctgcccccgctgcccgacgccactacggacctcgccgcccggctccgtgctctctccgccgacctcgctgccgttgctcccatcgccccagatgaggagctcttggaacaagaagcagctggcatacctgcccacaaaattgatgagaatttgtggaagaaccgagaacaaatggaagaaattcttttcttgattaacacatcccatcgtcctgtggctcttcaacagaagtccaccccagaagatgctgagatagtttgtacacttgatgatatagaagctaaattgaaggatatgttgaagaacttagaacaatttcagttgaaaaatgctgacaatgttttcaatacagttatgacatacatgccccaagattttcggggtactctaatcaggcaacagcgagaacgctcagagagaaataagcaagcagaggtagatgctctggttagtgctggtggaagcattcatgatcgatatgcattgttatggaaacagcaaatggaaaggagggtgcaattagcacagcttggttctgcaacaggtgtatataagactcttgttaggtatttggtcggtgttccacaggttttattggattttattcgacaaataaatgacgataatgggcctatggaagaacaaagagaacgttatggtccagccctttacacccttacaaaactggtgcttgcaattcggttgtatttgcatgtctctttggcacgatatggacaaaggaaaatagagaaggatgacgctgctgtgttgcagcaagctgtggttatctacaccaaggagtttttgaagttcactgaattcattggtgaggtctttgtgaatgcaccattctttatatctgctgaggatgcaggtgccgtggatgcaaggaaaagtgatgagtacaaagaaactattattccagctggaaagacacatgaggtcattttgagtgttgaagctgtaaactcatacatcgcatgggacttttccttgcaacaaggggccctcaacatggacattggctttcatgtggagtacattagcccttcaggggagaaaactttaattcttccataccgacgatatgaagctgaccaaggtaatttttgcactgtttcatcgggatcatacaaacttgtgtgggacaattcatattcttcattcttcaaaaaggtccttcggtacaaggtggatgctgtgccaccggttgttgagccggccttgtcagccacggaactctgaagaggtctgtcttaatataatgatgtaacgagggccgatgcatgcccgagtatagctgtacaaatgtttctgaaggccccacacggtgctgttactgattattccatcgaatgctttgcggtgttctgatcgcagcattccctgatagctcgctgtcagagcgcatggatatgtactttgtgtgcacatggctgcggccacttgtcaccgacgaatgcctgaatataacagaaatgtattatatcgaccaataagagcatgtctgattggaagctgtcgtggtttgtttttattttttttctcgaatacggagagctgtgtgtcattgcaccaggaagaggaagagctgtggacgtgctccctggaaagagcatcccctttggctaccaattgttgaatttgccagtccatattttagcgcttcggatctgctcagatcccgattctgtttggatgaattgagctttgctttccccaacgaaaat

SEQ ID NO: 23783 - DNA, 640 bp, Zea Mays
tgaagcctactcgtagtatggttactgttgcgcgtgtgacaccagctgactccgtacgtctccgtctgaacgttgatgggcagagcaagaaggcaacaagcaggcacggaatataatcagtgcaaaatgctctggatgctgttgctgtagacattcactaccacctcgcctggacctgcatgcatggaatggaattggagaatccgaggccgatcggatccgagagggagccggctactggtgcatgcggtgtgtgcacatgtccggtcgtccacctcatcaggcgtttgctgtctgtccaaatgtccatctatccatcacgcatgcatgatgcatccatcaccttgaatgacacaacacacttgcacgcacacactgcgtggtgcgtgcacgcctgcatatatgatcttaaactcgctcgcacacgtaaaccttacagtacatatatgatccgtcggtccgatagcttgctgttggcagcttgcacagctgcacggacaccgcgaccgacgagaccgtgcctcgggcgtcccgcgtgcgtgtgtgtgcgtgtcacactctgtctaccgcgtgccgccgccgtccagccgcgacgtcgctggggtgtgcttcttcttcgccgcattcgccgtcgacatcg

SEQ ID NO: 23784 - DNA, 2153 bp, Zea Mays
ccttttcctccccgtcgcggcgtcgccggctcccacggtccaccgacgactcttcttcctcacctcctcccgctccagctccagctcgtctctctcctcgcctcgcgtagggtttcgcttcccgtctcgccgccgtcagcatgggggacaactacgatgacgaaggcgagccgatcgtgaacctcgacgaacgggaaccctcccctgagcatcagccgtacgaagacctcgatgacgacctcgacggcggcggcgattggacccgcgaccgctctccgacccccgtccacggcgacgacggcggggcagggtcctcctccaagccccgaaagcgccttctcaagaagggcggcggtggaggcatgcccggcgatgacgggctggatgactttgggttggaggacgaggacgcggacccttcggctgaggcgaggaagaggaagggctcgtcgtcggggagggacactgggatggtgagggataggcggggatcaggaggaagggactcaggcggtagggatgaccaggatgatggggagagggagatccaggagctctgggataccattgctggtggtgagtcagaggatgaccaagaaggtgttagaaccgtagatgatgataatttcattgatgacactggagttgatccagctgatcgttatggcagcgataatgagcgacattcacctggacgttatgcacaggctgaggagggtgaggaggacgatgaaatcgaacgactcttcaagggtggtaagaagaagaagaagaagaatgatcgccctcgtgcagatattggccttatagtggaacaattcattgctgagtttgaagtagcagccgaagaagatgcaaacttgaataggcaatcaaaaccagccattaacaaacttatgaagcttcctctgctcatagatgttctctccaagaagaatcttcagcaggaatttcttgaccacggagttctcactcttctaaaaaattggcttgagccattacctgatggaagcatgccaaacatgaatattcgatctgctgtactgaaattattaactgattttccaattgacttggaacagtatgaccgaagagagcagcttaagaaaagtggtctgggaaaggtcattatgtttttgtccaaatctgacgaggagactactgcaaataggaaattggctaaggagctggttgataaatggagtcgaccaatattcaacaagagcacgagatttgaggacatgaagagatatgatgatgaaagagcaccttacaggcggccacaaatgaagaaaccttcatcgagtagctctggaatggaatccagagatgatgatcttgatgctgacttttcacaacgcaagtctgggcaaagtagttcaaggcagcacgcttctaggccggaagcctcgcctttggactttgtcattcgtccacagtccaaaattgaccctgagcagatacgggctcgtgctaagcaggctgtccaagaccagcgtcggctgaagatgaacaagaaattgcagcagctgaaagcgcccaagaagaaaaaccttcaggcgtcgaagctcagcgtggaaggccgtggcatgatcaagtacctgtagatcacccgctatggcatccgcagtcagcagtgcccagcacattatacaggacctgcatgggcccagggattgctggattactaagaagcatcctatcaccattccatggcaaacagcccggcatcaataattccttggatcttttttccaaatatttttcttgcctggtagggtgcagcatctgcgcttcagaaaccggttgatttgagcactatctatgagcatgtataaatatggtgcttttcaagcagagtggtgcctttatattgtataaaatatttgtcatgcttatgagttacagttaactctgtctatgttgtctcgatgtactaggtctcaagccctcttaatggagggttgtgatagggtaagcaagtcaacgttaaatctccataaaatgataggttaagcgagtcaacattaaatgtctccaatttaatggagatgaaatccgaaagaaaggattctgttgaggcgtaattcttggatccctttgttggtagtcaacacattcttgagtaagagacttcatttagtgacctatag

SEQ ID NO: 23785 - DNA, 774 bp, Zea Mays
agcactctagccacaaaactagcaatatagttcacaagcatatttccttgatctggatgtgaaacctctggataagatggagcattattttaaactggatcagaggatagtcaatttctacacaagaaatgggggaggtcttgccatctccaaagggcagtaataccaaagacacttcgaggatttatacatctggagaagggtgcatcagggagtgttggttgttgttcctgctgcttggtgctgctgttgtaacttcatgagtacagtcccaaggttgggaggctcgacccttaacgcctggaaagggcacagggagctgtgttgtccgtcagtcgctgttgtaactcaaactagtgcatacaccgtggcttgtcacggtaatttccgaagatgtccaacgttagttgagacaaccgaactgcttaccgtggcaatcactcattgtaacatcaagttgaaaatgagggctgaagtttccctcacaggctaccatatgtcagatatgtcctttgtaccactaataagtgcccctggggtcatgtatgaatgtatctcaatttgctattgcagaaatgtttggtgaaactttcatcctcccatgctttgagcaaagctaacctaacttctttgaatctgttgggcttattccagcaaatcctggctgacggatggacctgcgatgctgtctgctttggctgtgatggctacagcctacgggcacaagcgcctgtcggctgtcgccctccagccgctgttcttgtctcatgaaga

SEQ ID NO: 23786 - DNA, 1955 bp, Zea Mays
ggccgcaagcaccatagcacaagcagcagccgacctcctcgaacgagccgagccctcgcccagtcgccgccgcccgcgcccctcccactccccaccgcgcttcagcttcagactgcacacacgagtatagggcaaaagagccgagtcgaggcgccaccgaaggtgcgagaatcaacgagccgccggcgagcgagaatcaacgagccgccgggccgaaggtgcgcctcgcctcgcccgtccgcctgcccgccccagtgcgctcctgggccgccgcggggcggagatcaacagcgtacctcccacggcttccgtcggttcctgatttaggatgtgtacagaggggctgtattcttgtgtataggttctctttctatcggtcaactgttgctgattcggacggaatgttggaggatcaatcttgcctgatatcaaggtcgctgccgggttcctgtgagcaggaatccagactagcttacatgacttaccacctacttgagatcacgaggagtaagcgcccgcctgggaccctgtcgattgagcacgacgtcgtggcagcattgactaaaaggacaaagtcctctgagcaccaaaacagcgaggcgctggattgtcaaggaagtaatggtcagggcgactcagattcaagcaccctgataagttccattggccgggacaactcgatcaactgtcttgctcgttgttctcgttctgactatggttctatcgcatcactgaaccggagcttccgatcgcttgtgcgcagtggcgaactgtacaaggagcgtcggcagcaggggatttcagaacactgggtctacttctcttgcaacgtgcaggagtgggaggcgtatgacccctaccgttcacggtggatgacgctcccaaggatgccccgcaacgaatgtttcatgcactctgacaaggagtcgcttgccgtgggcaccgagcttctggtgtttggaaaggagatcctctcgcatattatcctgagctatagcatcctgacacattcatggtcgcggggcgttgaaatgaacgcccctagatgtttgtttggatcagctagttttggagagaaagcaattatagccggaggcatggatgctgatggaagggtgcttcgctccgtcgagctgtataactcggaaaccaagaggtggacaacacttccaagcatgaataaggctaggcggaagtgctctggtgtcttcatggatggcaagttctatgtgatcggtggaatggccagtaacacagaagtgcttacttgtggagaagagtacgacctagatagaggtacctggcgggtgatagagaacatgtccgaggggctcaatggtgcaagcggcgctcctccactcgtcgccgttgtcgaaaacgagctatatgcagcgcagtacgccggaaagctagtgaggaagtacaataaaagggacaactcgtggacgacgctgggggagttaccggagcggccagaagccgtggatggctggggcattgcgttccggggctgcggagagcggctgttggtcatcggtggaccgagagtgctgggcggcgggatgatcgagctccattcctggattccaagcgaggggccactgcagtggaacatgatcggaagcaagccctcggattttactcaaggttcgtccaatagagctagtcggttccgtgtactcgttaatagctagctacccattggttcctgtgctcagcacattctatttgcagtccatctgtacctttggtccatatgatatactctgttgaaatgagtttttttctgagatggacgcgtacaggtgataaattgtaattggggggtgggtaaccgtgcatctatatgatttgtttgtatcatgttctgaaccgtgtctcaacgctgtaattctattgtgcaaatgtctcttttccaagaactgcatgaaaaaaaaaagaaaagaaagtgccca

SEQ ID NO: 23787 - DNA, 2790 bp, Zea Mays
ccttccggtcccccaccacgcgccggacatgaaatatcccactcaaaccaacctaccgcccacagacccaaatcggcaccccggaagcctcaaatccgctctattcctctctccccctctctcccccatcgcaccagcaggcgagcgcgaggcggaggagtagagatggagtcggaccagggcaagcttttcatcggcggcatctcctgggaaacgacggaggagaagctgagcgagcacttctccgcctacggcgaggtaacgcaggccgccgtcatgcgcgacaagatcaccggccgcccccgcggcttcgggttcgtcgtcttcgcggatcccgccgccgtcgacagagcgctgcaggacccccacaccctcgacggccgcacggtcgatgtgaagcgggcactctcgcgggaggagcagcaggcctccaaggccgcgaaccctagcggtggaaggaactccggtggcggaggaggcggcggtggcggcagcgatgcaagtggtgctcggacgaagaagatctttgtgggcgggctgccctctactctgactgaggatgggttccggcagtacttcgagacctttggcatagttactgacgtagttgtcatgtatgaccagaacacacagcgcccacgtggtttcgggttcatcacctttgattcggaggacgcggttgaccgcgtgctgcagaagaccttccatgatcttggtgggaagctggttgaggtgaagcgcgcattgccccgtgaggcgaatcctggcggctctggtggtggtcgttctgggggaggtgggggttatcagagcaacaatggccataacaccagctctggtagctatgatggtagaagtgatggtggcaggtacgggcagacacaacagggtagtggtggtggtggctatcctggctacggtgcaggaggctatggtgctggggcagctggatatggatatggtgctaaccctgcagttggatatggaaattatggggctggagggtatgggggtgttcctgctgcttatggtggacattatggaaacccaggtgcagctggttctggttaccaaggtggacatccaggctcaaatagaggaccttggggcagtcaagctccatctgcatatggaactggagggtatggtggcagtgctgggtatagtgcttggaacaactcttctggtggcggcaatgctctgaatagtcaagcccctggtggacctgcaggctatggaagccagggctatgggtatggtggatatggaggggatccatcatacgctagtcacggaggatatggggcttatggagcacgtattgatagtgctggcaatcctgctactggtggatcatctggatacaatgcaggctatggaagtggtggtgccaactctggctattcaagtgcttggagtgatccttcgcaaggtggtggatttggcggttcggtcaatggaggtgctgaaggacagtcaacttatggcactggctatggcagtgtgcagcccagggttgctcagtaaagagaggcattttgagtgtgcgaaatgaaccagtgcatctgggcagtctatgtattgatttgtcattccagtctctctggttgctctcagcattttgaagattgcccatttgctgcttaaatcagtatttatccgggttggaatgcttgatcctttagcggcttactactagaacgtctagtcaataagtagctaaaatgtggagtagcagtatcttgcggaatgcttttattaatttttacatttagctttatccatctgtgtggtttgccatgagtggagtttcaggttgcttcatctctagttataagctagagtagcttgactacttatgggcaaaattatctagttgtacctctattctacagatcatatatttgtgtttgacattagtatttatgctggatcttgctctacctatattctggaatgttctctatttggtggctgtattgacatgtggtattatcaacattgatgggtttgaaacagatgcaaaccctgaaatatgcaatcatagttacttgatgctgtagctgcttctaacagtattttcaactgtagtgcaagtgtttttatgtagctggaatggtacacccttcaagtatatcaccaagctatgaattccatccatttggtcctagatttcaatattttcaaagcagcagtaagcttattagcagcaagattgtagcgccaagtttctgaggttgaatgggatggcattctttttttagatatgcccaagcaaggtctatgaaatcaggcatttgaaaaaggcattttgcacagtgatttacatgaactggcgagaagttccaatatcggggttctgacagaatgcaagataccagcttaagtgcttcattttctgaagggtcttgtgctgtgctacaagatagtggacgaagtgcaacatgttggctggatccactttggctgggtctgagggagcatgggccaagatcttgggggctcggctgtgtggtgcaacgggcagcttgcttgcatactggtgatcgtggatgcttgtgatatagcattgccccccaatgtataagtgaacttttagtgctagaggcttccttttgttggcatgatgtctatggtttataggtgcagtagttgcataacacatagtatactcagtatactttgtgtggaagctattgatgcttttctttttgtttagcatgaatgccatataattgtacattgaattgacatattaagttattgctaaaacacacttcagtgaatttt

SEQ ID NO: 23788 - DNA, 647 bp, Zea Mays
ccgggctcctcgaaatttgacgacaaggtaagatatatattttttggtgtcagcagtcagcaagtgtggcacatccggggccatgttcgtttaggctgttcccggccgggaacagcgaccaaacctcgtggatcccttcccatggaaataaacccggcccacagaaaaacaagcgttcggttaagtccgatgtgggctgtatccagatcgttcctcgtcgttccagcccgggaaacacgcccggtcgaccgggggtggaaaatatcccagcctggactgcacgcgaacgcgaagggcacgcgacttctcgtcggtgtcgatctgctccggcgaccgcttgtcatcgattatccctacatcggtttgacttggagaagacgagcttccaccatcttgggaccctataccctctcctttagagagctgcacctgaagaaaccaatgaacattaggtgtgcgacttgcttttgtttatgtggatctattaattatgttcaaacagttgcttcataattggcattggcattggctgctcaattgtgtgcccctcgaacctcccctgcaccatctagagatattttgtgatgccattctagtattgcttttagcatttttatccataggcttaaccgaacaggattttggca

SEQ ID NO: 23789 - DNA, 1538 bp, Zea Mays
gggagggttgcttcgtttcgagaactctgtttttttctccgtgctatgccaacctaatcgatccgttttggggattgaggaaagaataatcctcacgtgccaagccaatcagcgttctccagtctgagtgtttgattattctgtttcttagtgctctgcaatctgcataggcagatcaaaaacagggaagactgtggaatggacgtctaaagacctacttaatggattggaagaatttgtaccaatatatgagacgcgccccattaagaataacgtatatggaatgggctttgaccacagttttgggctttggtttatggctcgctggattaaaccggatttgatgattgagagtggtgctttcaaggggcactctacttgggttttgcggaaggccatgccaaatactaggattatatcactctctcctaggcaccctgagaaatatcttaagaaaggacctgcatatgttgatggaaactgcacttacctcgctgggaaggattttgttgattttggaagcattgattggggaaagctattgagaaatcatggcatttctgatcctgataaggtgcttgttttctttgatgaccaccaaagcgagttgaaaaggttaaagcaagcactaaaggctggattcaggcatctcatatttgaggacaactatgatactggtacaggtgaccattattccttgaggcagatctgtgatcaatcatacatcagaggtggtggacatagctgcttttgggagagtgatgaggcaagactaagattcgaacggaagaagttctgggagaaggctgtggggatagctgatctatgcggaaaggatgatgcatggtggggtgttaaaggttacatgagggacaatttcaaccatagcaatatggccatctcgtacaaagagcattttcagaacagcaggctcgtggaatctgtgttggatatgtattgggagcttcctcctgttgccggcccatccttaacacaccaaacaaggtatgacccagcacgtacagttgacccaatcatcgaagatggtcgctacggcttgttccgaaagaccggtctagcgaggttggatgcctcggtgttcaatggttacactcagatggcatatgtgcagatatcaggttcaatgttgagcacggacgatgtttaaagattttttgtgggtgagcttgtttcgtttttggccaactgttgataggctttttgtacaacactgatgcgcttctatgcttacttagtttcttttaaccttccagaaattaatatttaccagaccaccttccaaatatttatgagggttgtgtttcttgggtaaggtcacttttctgtgaaatttggttctgaataatcacatgtacttctagggcctgcgctacatgcctacattacattagccaaccaatggcttgtgtgctcttgtacggatgtgtgtattatattcagaagtcactagtaccaaccttgtacaatatctacataaccactttgcttttgataatagcaatctaaaaaataaagag

SEQ ID NO: 23790 - DNA, 2128 bp, Zea Mays
ttgttcagcaaatacatgctatattggattaaataagcatcataggttcgtgtggaggcagctttaacattgcgtgctttagcagaggttgatcctacttgtgtaggtggtttagtttcatatggtcttacaacattgcaagctctacgagagactgtatcatttgataagggcaaaagtttgaaccttgagctcgactcactacatggacaggccactgtgttagctgctcttgttgcaatatcaccaaagttgcttcttggttatcctgcgaggctgcccaagtctgtacttgaattatccaaaaaaatgctgaatggtttcagtcgaaatccagtggctgctattgcagagcgtgaagctggttggttgctattagcttctcttctagcatccatgccaaaagaggagctggaagaccaggtgtttgatgttcttttgctatgggcgggtccttttactggaaatcctgaatcttaccttcgtcatatacaggattgggcatcagaattgcgggttctgtcagttgcagttgaggcgcttactgccttcataagaagttttgtttatccatctatcacaactactgattgtggaatcttgcttaatcctgtacttgcctaccttggcggagctctatccctcatatcttcgttgagatctaaacaagtgcccaatgtaaggtctgcgctggacctactcacaactagaacattgatggcttattggtccctttcgaatccagtggtatataaaactgagcaccagcagatacttcagctatgctcaagtccgttcagtgatccttctggatgggaagaaagctcatgcttgaagtttttgttggataagagagatgcttcactgggcccatggatacctggaagggattcatttgaggatgaattacgtgcttttgatggtggtgctgatgggtttctaccgtgtgtgtgggatgatgaaatcagcaacttccctcagagtcaattcggaaaatgctcgtcaaccagatgcttctctgttatggttccatatttgcatgtcaggaaaacactgtcaagataagcctcttgaacaatcttgaccagtgcctgaagtctgggaagaagtacctgtggtttaagtttctcattacaaatgcatgtgttgctctattgtcagggttaaaggaattcctcgctttacgtggtgctcaatcattgccaattgatatattaagtatgattcagtccattttcaaggccattttagtagagcctgaaatttctacagcacagcggcgagcagcgtgcgagggtctcggtttattagcacgagctgggaatgatatctttacagcaaggatggctcgctctcttctcggagagctggtaacaacaacagatctgagctatacaacttctgttgcattttcattgggttgcatccatcgaagtgctggaggaatggcattatctactctggttaccccaactgtgagctcactatctcatttgagtaaaagctctaatttcaatctgcagttgtggtcactgcatgctcttcttttaacaattgaagctgctggcttgtcttatgtctcgcaagttcaggggacacttttccttgctatggagattctcctcttggaagaaaatggatatgttgatcttcgacaaggaattggtcatcttattaatgcaatagttgctgttattggtccagagcttgctcctgatagcacattcttttcacgatgcaagtctgttattgcagagataagttcatcaaatgaaatggctacacttttagaatcggttagattctcccagcagcttgtgctttttgctcctcaagctgttcctgtgcacttgcacgttcaaggtcttatcccaatgctttactcaagacagccaagtcttagatatttagcagtgtcgacactgcaccatctgattgaaagggacccggctgcaatgattgacgagaatattgaagagaatctgttcagtatgcttgatgaggagaccgattcagaaacagcgatgttggttcgtgcaactattattcgcttattgtatacatcatgtccagtatgtccatcacggtggctggcagttttacgaaatattaaagagacataaccgaa

SEQ ID NO: 23791 - DNA, 3143 bp, Zea Mays
gtagaaatctacttaccattcaattaattttgaatacccatcctttaaatatggaccgccacttattcttttcccgtgttccgacaaaacacgcggcctcgctcatagcacagtgtgtggcagcggacggaatcgcctggaaccccccaacaccaacagtgaatcatcccagcggccatcagccttcttcacgttcgtctcctcctcgccatgaatcccaccgtccacttgcgtgcggaattaaacgcgaagtcgacgtttaacggcgatgtctcgctgccgtgccgtggagggagatgagcaggccacttcgctttgccgtggagggagatgagccgtttgtggaatcagcgagaaagtgacgggagagggcaatgcagagaggccaggccaagaaccccgaataaaggaaggtgcgacaggtggctggcactgtggcgcaagcggatgttgcgtcgtctctccgttgctctcgctcaaggaggccgcgggggcgggccaactagttttcggattccagcgtcgtttggagttgtcctgtcgtgtcttccggtaaacaacaagctagcgagctgaaaaggtgagcagagacgctcccacccccaattttgtcttgctcgttttcttcgtcgtcttcatcctgcctgtctcccttgaccttcttttgttggctgtgagctcaattcggagcacgtcggcctaattttagctcacccggagatcacccccggaacaaatttcttgaggggcagaatcggttgcttgctaggctgggttctcccgcccagtctgttcggttccacgccatggcggtatagccggccacttgcaggtaccggagctcgcgttccctgacgcgctttctggttttctgcaaaaaatttatccctccaagaacagattcttcgccactaccttgtggtctcgttagagtcccaaattatttgaatttggcacggctccgggctcctctcgtggcgcaaatggacgcctttttgtgaccgacgacaagcggcgttggtgggccgagcgccggggacgccaaggacttgccccaacttttcctcagagtgggcgcggccgtcacgctctccgtagccggtctgctcttctcgcggcgccagcggccgccccggcagctcctgccgccgccgccgcgtcctccctcggagtcggatgatgcttgcagcatgaaggccagaacagggctcaaggagcttaggatcctaaaaaatgaggataccaaggcaaaaattatcagtgggaactctgtgcacacgaccactaccactacgacaattaccaccaccgcattagtaccattggcccctaaatgcagaagccttgctgatgatgaaggctatctccttccggagttcaatgacatggttctcagagaatttggccaagatatagatagcattccatccacacctgcagcgagagtaagggaagatgtatcgaatgaccatgaagtccacaaacttagagatttggtgagatcactgcaagaaagggagaagactctggagctacagcttctggagtgttacggtttgcaggagcaagatgctgcggtgagggagcttgagaatcagctgaagattaacaacgttgaatcaaagttgtacttgctgaagattgaatctttacagactgaaaaccagaggctgcaaacacagctctcagagaactcaaaaatattctctgagcttgaggcgacaagaacaaaatgcaagtttctgaagaagaagtttatatcggatgcagaacaggcaaaggagcaaatcatttctcttcagaaaatggtcgactcattgcagaacaaacagactgatgaggagaaaaaatttattgagtttgaaaataaactgaagagactagaggagctggaaaaagaggcaacagagctaagagcggcaaattcaaggctgcagcaggagaatgcacatcttattaggcgactggaggttacacgcctaccccctgtacccaagcccaaaactagtatggaggtaaaagcattggaggaggctgatcggttgaagcaagaaactgataggttggctaaagaggttgaacaacttcagagtggcaggtttgcagatgtcgaagaattggtatatctgaaatggataaatgcctgcctacggtatgagctgagaaacaaggatgccccatcagggaagactgttgcacgagatcttagcaagaccctgagccccaagtctgaattgaaggccaaacagctgataatggaatatgccaatgtgggtgcggaggacagtcacttggggcatgtcgaattcggttcagagtgctcttcctcacgggcttcgtcaggtgaaccggatgatgtgtcaattgatattgcttccatgacaaagcatactaataaaaaccccaaaaagaagaagttcttctctaagcttcggaaactggtgctgggaaaagggaaagagaaccgtgaaatttctactctggagaggagagtgtctatttcaagttgttccttcgatgacttcactggaagggattcacatgatagctattcttcgttcatggcagaaccaaacatgcctgatagtcgacggcatggtgatcatggctttggtacacattcttctttggacagcgcaaaatctagtcctcttggcacagaaattgtaggtgaaagaagtgaccattctgtggtgaagagtgtatcttctagagaggaaaaggtaaatgcattcggtcccagcattggccttgatagtagcaaggccatacctgaggatgttgagatccataaatttgctgatgcgctgatcacatcaaggtcaggttccatgtcatcaagaagatcggcatccttccgacactgatataggagtcatctgctactgacccctctgcctggatgtatatttctgccagttcttgatggggggagttataggagatgttactggaatataagttgtcaatactttatttttttgtaccattgcgtatagggtgtagtttacttacctttaataccaactcctactacctgggctcgtcatgtgtaccataaaatggcacatttcaatggcaaacacaagacaattgtaacaccctaaatccatcaattaaggtaacctagattatattattaa

SEQ ID NO: 23792 - DNA, 1395 bp, Zea Mays
ttccctgcttccatgggcgctgcgcacttgcccctgctcggctccctttcctgcgcgtgcccagccgtggtctccagctcaccggacgcgggcctctgtctgtgccgtgctccctgcgcgcttggtcctgccatctccatggcactcggccgcgcagcgtcttcctcagccatggcgagttcctcgctgccacggttgtctagtggttggcccgcgccatctctgctcctctcggcctgctactgcgtgtgcttgtgtctgagctcatctggccacgacctcgtcgaactgcgaaactccctcgccgtgcgctctggcatcggctgccaccgattccgccattgagttcatgagcactccttgctctgttcgtttcgccgtgggcgatttctccactcttcaaatccgtgctgttcgccctgcgtgcactcgctccctatccatcgggtttcggcgtgttcatgtttgtcgttgagtcgccgaacccgtcatcccctgctcgactcccaagcaaaccccctgatccgtgtcctgctcgccatcgactctcggcaccataagctcattttcccttgcgcacatctccacagaccctgcctcatcacgcgtgtgcattatcgatctcgtcgttgttccgtgcagcatcaagaaatacaaagcatggggtgaagacgaagctagcagcgtaatagccaccaagtgctcgacaaaaagctcgaacaaatcgtcgatcgtcatcctcgtctacgccaaagatccgagaagattaggcacagaagaaaataaatcagtacgcagtcggagaattctcgatgtggatgaagatgaagcgcgattcgacacagcagtcaccctattttcggtgaaatgctgagctgaaaggcgtcgtcgatttcgtgatttcaagtcggatttaattgacggtacgtgaattaaccacgtgatgcggaagacgagccaagtcgaccccaagcgcgggctactccgcatggtgatgctgatggacgaacctgcctgatcatgtgctaggacaaggatgatcgtctaacaacactaacctagtgttacccaggcaagccccggtgcgtttgtcatctccttgctgttttaaaatctttatcaccttgtttgatgcattaggtgataggagttgtgtgctaaacaactgatgcatttccttccttgaaaaattaattacccttccttgataccatttttgaaaagaattttatgatgcttagccttgctttagcaaacaaaatgttttgttttaaaacaaaagtgatgctttgaactaggatagaaagaactctagatgcaggtagctttacttaaccagacaagtaaaaatggattcttaaggatccactcatagtaagattttctgcaaacaga

SEQ ID NO: 23793 - DNA, 204 bp, Zea Mays
gaaggggatggcataggtcatcctatttggccagacgtgcagaacaagtggtgtattaggcatatatgggtgtaaacttccatgaacatttcaagaatagagacttaatgcaattgttcaagaggttgtgcacttagaaccagcaaataaagttcaatgttctctggcaagagcttgaatcgtgggtttaaaaagtcgttaggg

SEQ ID NO: 23794 - DNA, 4440 bp, Zea Mays
cgactggactcgagcgtctctcactctagtcgccaccctcacaagtgccagcgccagcgcgtggttcctgggcgggcgggccccgtctccctctccggcttcctttctccgtttctcgctcgcctcttctctctcccggcgtccgcgcccgccgaaacactctcgaaaggaaaccgatctgtcacccaaaccgcgcctccccgcggtgatctcgactcgagcgcgtttaaagcaccgcatcaaaaggaaaagagaagcgcgcgagcgagcgaggatccgggagcgtgaagcgcgaaaaaaaagcaggggagggagcgagcgaggaagcaacgcggaaacgggaaagcgagcgagacaagcgcccgatttggtcccccgcccgcttcgtttcctccgccgcacgtcttctcccccactaccactaggccactaccccacctcccctccagtcccctcgccttcccgccacgccacccgccgcgtcgccggagccctgtagctttcaccgcgcgcgcgtccgtccgtccgtcggcccgcccgcccgccccgagatcggggaggggcgcggtgtcatctctcctgagcaagcggcgcggcgatggcaggggggcaggcgcccgaggcgtcgcccgggcggtaccagcggcggcgcgacgagatcgacgacgacgactgcgccgacgtgctgggcatcgacgtgcgtgggcccgacgctgacccattcgacatccccgccaagcgcgcccccgtcgagcggctgcggcgctggaggcaagctgcacttgtcctgaatgcttctcgacgattcagatacacccttgacctaaaaaaggaggaggagaaggaacaaataagaaggaagataagggcccatgcccaagtcatacgggccgctttacttttcaaagaggctggggaaaagcagactcatgaaacagagttaccagaaattctcccacgagattttggaattggagaggagcagctgacagtgatgactagggatcataattattctgctctgcaagaatatggaggggtcatagggctcgcaaatttactgaaaaccaacctagagaagggaattcatggcgatgaggcagatttgtcatgcagggcaaatgcttttgggcctaacagatatcctcgcaagaaaggaaggagcttttgggtttttctttgggaggcctgccaggatatgacgctagttatccttatcatagctgcagtaatttctttagtactgggcattgcaactgagggcacaaaagaaggctggtatgatggcactagtattgcatttgcagtctttcttgtgatagtcgttactgctgttagtgactacaagcagtcgctgcagttccaacacctcaatgaggagaagcaaaacatacaagtggaggttattaggggtggtagaaggatacaagtatcaatatttgatattgtagtcggtgatatcgtggctttaaaaattggtgatcaggtctcagctgatggtgttgtaatcagtggtcattctcttgccattgatgagtctagtatgactggggaaagcaagattgttatgaaagatcagaagtcaccctttttaatggctggatcaaaagttgctgatggttatggcaccatgttggtaacggctgttggccttaacaccgaatggggtttattaatggccagcatttcagaagacaacaatgaagaaactcctctgcaggtgcggttgaatggagtagcaacattcataggtattgcaggcctttctgttgctgctatggtcctcgtagtcctctttgcaagaaattttttctttgcttccagatattttacaggacatactacagattcagatggctctgttcaatttgttaagaggcacactagtgtgaaatctgcaatatttggttcaataaagatactaactgttgcggtaactattgttgtcgtcgctgtacctgagggcttaccactggctgtcacactaactctggcttattccatgcgaaaaatgatggccgacaaagcactggttcggaggctttctgcctgtgaaacaatgggttcagcgacaactatttgtagtgacaagactggtacattaacattaaaccagatgactgttatgcaatcgattgtcggtgaagtaaagctgcaacctcctgctaatgttgataaactgtcatctactgtagcctcacttctacttgaaggaattgcacagaatacttcaggcagtgtgtttgaggcacaggatggtagcgtcgaggtaactggttcaccaacagaaaaggctatcctatcttggggtcttgatcttcgtatgaaatttgctgaggagagatcacgatcttctataattcatgtctctcctttcaactccgaaaaaaagcgcgctggggttgcagtggttgcgagagattcaaatgttcatgtacactggaaaggagctgctgaaattgttcttgccttgtgcacaagttggctcaatgtggatggctcaacacatgaaatgacacctgataaggctaatcaactcaagaaacttatagaagatatggctgagcaaagtcttcgatgtattgcttttgcttatcgaaatcttgatatgaaggatgttccaagtgaggagcaaagaatcaactggcaattgccagataatgaattgactcttattggaatcatagggatgaaggatccttgtcgccctgaagtaagagacgctgtcgaactgtgcaaaaaggctggtgttaaggtacgaatggtaactggagataatctgaagacagctaaagcaatagctcttgagtgtggaatactcgatgactcagaggcatctgcacaagctataatagagggaagagttttccgtgcttacgatgatactgaaagggagaatgttgctgacaagatttctgtgatggcacgatcctctcctaatgacaaacttctcctagtaaaagctcttaagaaaataggccatgttgtagctgttactggtgatggaacgaatgatgctcctgcattgcatgaggcagatattggtctttctatgggcatccaaggaacagaagtagccaaagagagctcagacataataattctggatgacaatttttcttctgttgtgaaggtggttcgctggggtcgctctgtttatgcaaatatccaaaagtttattcagttccagcttaccgtaaatgttgcagctcttgtcatcaatgttgttgctgctgtttcctcaggaaatgttcctctaaatgctgttcagcttctctgggttaatctcatcatggacacactcggtgctcttgctttggctactgaaccaccaacagatcaacttatgaggcggccaccagttggacggagagaacctcttgtgactaatatcatgtggagaaacttgtttattcaggctgtctttcaagttgctgttcttctgactctcaactttaggggtcgggatcttttgcatttgactcatgacacactaggacactctagtaaagtgaaaaatacacttatattcaacacatttgtattgtgccaggtgtttaatgaggtcaattctcgtaaaccagaagaactgaacatcttttccggagtttcaagaaatcatcttttcttggcagtagtgagcataactgttgtgatgcaggtgataattattgagttcctcgggaaatttacatcaacagtgagactcaactggaagctttggcttgtttctgtagttattgcttttctaagttggcccttggcttttgttggaaaattcattccagttccgaggactgaattgaaggatctcattgtaaggtgttggcctaaacgtggcgagagtgcagcacaacagactcaggatgacagaatggaagtaccagtgtgaagctgttcttgagcaacttctcgaaattatcaggtgttagtgttggtgcacatagatggtgttggctaattttgggtgctgatttttctaaccatcctaccttgttgcctggctatgaattctatggctgtagtcagcaatcggggaggtaaacctctgctgactcgtgatctagaatttgaacactgtaaacaaaatatgtttattgtagcctaacgaaggtcaggacctccagtggtttattgcacaagttgtgcagtcggtcccagaatcatttggggaaggcgctataaacagtttttcttggcaggagtggagtgtagctccttttcgctaatatcatttttacttttagatgcaatcaagaacattttgtcaaacactctaatagtaattggctgattttgttagagttgcctttgctatgccataattgtatttcagaaattgactggtggtatgtattgcgagtgtaaatccactattattggcggtatgtgataacaaaaatatttatggtgccctaagataagcaaattctgatggtg

SEQ ID NO: 23795 - DNA, 4018 bp, Zea Mays
tttgctctccgccgcctggtgcttcgcccccctcgctctccgacgactggtgggccgccggcgccggtgccgccctacggcagttgggccttcgttggcctcttcgccggccttttcgccggtgacgagcagccactaggaaagcttctgttgctctgcatgcaacgatgaactgatgattattgttgataacagcttctcttcttgtttacatggagtgcaacagagatgaggctgctagagcgaaagttcttgcggaaagaaaaatgctggacaaggattttgttggtgcaaaaaagttgattatcaaggtgcagcaactcctcaaagaagtggaagatattgacattccaaaaatgttaactgtttgtgatgttcattgtgctgctggagctaaggtaaatactgagattgattggtacggaatactgcaagtacctgtaaatgctgacgacgcactgataaagaagcagtatcgtaagcttgcccttttgctacaccctgacaagaacaaatttggaggtgcggaggcagcattcaaattagttggagaagcaaacataactctcacagacccatcaaaacgttatgtgcatgacatgaaaagaaacaccttcagaagcgttacggcaagacccaatcgtcagccaccaaaaagacctgcacctgctagatctagttctactcctgtgaatctctacaatatgcatcagcaacatcagcgtcaagcctcaaatcctacagggacgcaaacaacattttggactatttgtccagcttgtggcatgagatatcagtattacctctcgatcttgaagaaagctttgcgctgtcagaattgtttgaagccatttattgcacatgatttgaaggaccaagctattccttccggggcaaatcagcgatctgctggggtttggaaaaatgcaggcacaccacagaactctgcaggacctcaatcaaatgtcactggtcagaaaggctggtctgccacttcaggagttcatgttaataccggttctcatcatgctaatgtgaatacaaagaggaaaactgatggtaacgcaggtggactgaaaaacaaaatgaaatctgcccaggccaccaggaaaccttcaaaagcttcatcaactgctggattgaaaaggggcaggagggcggtgtttgaatctagtgaatctagcatatcagaaactgacagcgacggtgaggtagagattccaaaacatggtcctgctgaaaatagtgcagggccaggtcaacaaactcgcagatctagcaggcagaagcaagaagttaagtataatgaggatagtgatgatgataatgatgatgtggaagatgatgataacacggttgaggatgattttgttgattctcctgcgttgaaaaggctgagaaaaggtggcatgttccatggtgatcacagtactaaaacagcaaagctgaatgaagacaccgctggccataatagtgtgaatagctggggtaacataaaagataaaaagaacggtggtatgccatgtgaagagaaaacttccaatggggttgagcagatgaagagagaaacaatgcatgttggagaaaatagtgatggcaaagaagagctatttcattctgtcagcaacaatggccttggtctaaacgatgatgatgcttcagatgataacaaattcactttcccagatcctgaattttttgattttgacaaacttcgagatgcaagtcaatttagagccaaccaggtctgggctgtctatgatgatcaaggttgtatgcctagattttatgctcgaatcacaagggtaaaaatggttccaaagtttatgctacaatttgtttggttggagttcaatcctgcaaataaagcggaggaggcatggtcttacaggggtctgcctgttgcatgtggacactttacgcatggactgtcagagacaactagtgaaactggtatgttctcccggattatatcattagagagaagcaagacaaagaacttctatgaaatatatccaaggaaaggtgaagtttgggccctttttaagggatgggatattggttggagctcagatgctggcattcacaaaaaaatgaaccatcgctatgaagttgttcaagttctttctgatctcaccacgagcactagcattattgtcatgccacttgtgaagttaaaaggctatgttagcttatttgtgcagtctggagaggcagctccatatgtgatacctcaggttgacacactaaggttttctcattgtgtcccacattatttgacgagcggaactgaaaaagaaggcattccagaaggatctcttgaacttgatcctgcagcgcttccctccaacttggaagaggcttttccttctgctaacccagaatgcagttcagcaagaagccaggagtctgactccaaaaatgctggtttgtccagtggaaatcgcaaaggatccatgaatgtggggcaggggcaacataaaatagccgcgaatggaagggtttgtacaaagacaacaaaggtagagaatatcaagcataacattgatctgtctgaagttacagatgtcgttgacgatagcatttgccaaacagagtatgtatgcgccgattcagaattctacgatttttcagtaagaagatcgctccaaaggttttcacctgggcagatctgggctctctacagtgatatagataaattccccaattactatgcatttatacagaaagtagatctcaagaatgataaagtacaagttagatggcttgatgtctgtcctcaaggagaagtggagaaaagattgtcccaagatcggaccattggcattggaacctttagggttggctacatccacgacatgatgacttacactggtacagatgccttttctcatcttgttgaggccagacctactggcagaaaaggtgaatatgaaatacttcctcgtctcggtgagatatgggcagtttacaaaaattggagcgctggatggactgcgcaggattttgaaaaatgtgaatacgaactggtggagatatttggctatactgattcctccatacaagttcagcttgtgaggaaggtggatggttataagatggtatttatgtcatatagagcagggggtgtgaagacaatacggagggatgagtacccgaagttctctcaccagattccatgctttcacttgacacatgaaaaaggtggcaagcttcgaggctatttggagctcgatcccctatcactaccagaggaatttctctgctgattcgatctgagataaaccttatctacatcaaatctggagcctccggtaatgaagtttctggaacatccacaatttcgtagcactgacgttgttacggtggactcaatctgcacaactaaggcattggcttttggacttttttgctggatggctgtcctgcagctgcaattcacatgtctagtattttttttgcagtaactatttgttgttagcattagctgtatctacggtttgagttctagtgtaaaaattgctacttttaacatcttgcagtgtactctaaattgcagtactgtgtttgaactgtgagatgctagcctgattaatttcctggaactgaaaaatgaaatcgagctggagcaaggttaggctgatcaatcaatgtgtcatgcttgtgttgctgtgcggggacatagatggcatccttcagcgtattatcagaatttatttctattcgcatctctctgtgtataaatgttacacgtcctaattttgatatgaccatgccttttcttgaactctttttatttgctgacaagtattaaagccttgtttgttcctatttgttttatgattaaagtttagttctaggactttagtctctacctgtttgtttgatctcagggactaaacaggttcagagcacattaaatacactatagaaagactaaaatacctcttatatgcttaagttgtctaagagagagaatgttaaaaacacattaatgcactatagaaaactgaaatac

SEQ ID NO: 23796 - DNA, 143 bp, Zea Mays
ggtccaagaggagccctacaacgaggaatatgagcttatctaggtggcgtctcccagtcagcttgatagcgccaaggaataatatttagtttgctttattgttatcatttatttttgtaagacttccgctatgtaataatgat

SEQ ID NO: 23797 - DNA, 1848 bp, Zea Mays
acaccgggccgccacacaaaatccccacacctgcctgcgtatcgcgctgcccacccaccgcacatccccgcctcccgccggccggccgcccgcctaacgactcgcggtcaccgcctgcgggccaccgtccgcccccagctcgcttacgatattgtacgttcgtggcgcggagcaccgtggtgttggcctagtacgtcgatttcacggtgacttcaccaccattgccgcccagtggctgcagaagctccccgccagcaacaagttcacctacaactgcgacggccacaccttcagttacctcatagagaaaggatttagtgtgggattaatctggacttggataaatgaagtataatgcaagaaatgtgggcaaataataccttggctgtgtggtggagaacaaggtgttttgcaactaacggctcttacgtttacaagtttgtgttttctttaacccttgaacattgaagtgaattgtgttgccacattgtttatgcattataggtatgaaagtatatttatcctggcaaaagattatgttagtttttgtgcctaaagaccatttatttcttttagttctttaaatgaatagctctagctttgcatgtactgaaattcattatgctcttgctgtacttgtagctgcttgctaatgtcaactaaaactacctgttgccaacttgatgagttgtgtgttaagcttgtttctctgaacatgtttttttgcctaattgtcatggcaaaagaaagaaaagaaaaagaaaaccgagagataaaaaaagagaagtctgacccaattgccctggaagcattgcaatctcctgccgtcctgtgttcacacactgtttgccatattctctcgttcaccttgcctggccctgctcgattcggccactttcatggagccaggtgtctgcatcactggggcggggcctagtgtcagcgcaaccaaacacgccggtgactgtcgccacccttctcccagctgtcaggtcttcgttgggccctttgcccacgacgagcacctgccacaccaagtaggcatgccccctctttcctttcttctgtgtaaaactgtgcacccgaaccctaattaaacctatttggctatctgtatttggatcggatgtattatgcctactagcttggtggtgctggtgcacatgttgtattggctccacccctggctgatgttgttagattagatcaactccgtgatgccaaaaccatgcatatatgggtttaaatatgatatctgatgcttttagatttatactaacaaagaagcaaatgcttcaatcatgcctagttccatctatacttgccactattcagatattttgccagaagagacctgggtttcagattcaaattttcatgtcatctgttcagaacttgcaattctgtgattcctcagattagtgacctgtagtctggagccactatactcatttatactgctatgtgcaaataaataaatgcttgctttcatctcctattttttttttttttttggaaaaccagcgggtgtgttgatatttccttgggacatgaaaatgcaagttttttttgtttgtaaaaggtacaagggttatagtagcactgtgttaattggactcatattttgattcccttgtaaaaacattattttttggtttaatatataaacgatacacttatctgacaggaatcccattaagtttactgctgctaccatttaaagggcagaactgccggtcttcaagctctttgttactcctgatcatctgtggcacaattgtcatcgggcaaaatgccatcagtttatctctacatccctaacattatcgctgcttctatggatgaaaa

SEQ ID NO: 23798 - DNA, 3631 bp, Zea Mays
ggcgacggcgcatggcatttgctgccggacgcctagatgcctagttggcgcctgggcgtcgccatgataactatgtgctgcacttggtggcgcagatcaagaggaccaaatctgcttcctttctcctgagacagtttgtaaaattctcggatccattttaaagaatttggcattggtactcaaaacatcaacttttgaatgggcaaggttagcacattctttgttgcctgctgaacctgagcacttgatggttccagaagaaaattcctcaataattaacttcgagatggctcggattgcctttaaagttcttcagggtagcttgttttcactttggagacttgaggaaaattctgtatttccttctattctggctgctctttttgtcattgaatgggaatgtagcatgtctttagctcttgatgaagagaagtgtttggaaagtaatatagaagatacggaagttggtgtttctatgtgcagcagttcaaaaggttgtttggaggaggaaatgcatttgaaggttaaccttgcagaaagcatacatgttttttgccaaagcttaagtccatccttttgggataatcttcactcatgcacattgaatagattggcaactattctacctcagtgtgtcagaaacttggaaagtttttttgatgttttattatctgagggggaacattggccgctctggttgatgccatctttacaaaatggacatttatctgtgaaggtccagctggatccagatattacagatgaaattgaactcaaacacgagcgatttgttgcctttgttgataggcttattctcaaacttggctttagtgaagtggttttaggtattccaggaaatatacagtctgccacatcacaatcaattgatatcacttcacctgtctcttccttgtccagagtatgggtggctggtgaggtcctttgcacttggacatggaaagggggctgtgcattgaaaacattcttacctttgctggttcagtacatgaaagacgagtcatatcttgagatcaacattgtgccattgttgcttgatacactgttaggtggcgcccttatgcatgatagtggtccgtgggtactgtttaatgcttggcatctttctgacaacgagatcgataaaattcaagatcgttttcttcgtgctcttgtggctttgttatttactattaatacaaatgattgtctctggagagaatctgatgcacttgtattttttgagcaactgctgagcaatctttttattggctcatcagttaatagaaaatgcctgaagattctaccctatgttatgacctccatcataaaacagttctcagccttgaacaacggagattcttcgtatgctgatttggtgcggaaaagcatacagagttggcttgatgcaaccatttcttgtctgtcatcaagctcaagggaggtacctgtgcaagatattgaggactggatgcaagtggtgttgtcttgcttcccattgaggataactggaggagcccgggaattggtagctgtggttgagcgagagatcagtgatacagaaagatcactgatgttgactctgtttcagaaataccagattttctatggtagtacagcttcatcattggtcactagtggaactgccgtatcaacgacagttgaattactgggagtgaaactgacagctgttttggttggttattgctggagcaaccttaaggagaatgattggcattttgtgttccgcatggtattcaaatgcattgaatcgtctgttttgcttgtggaagaaatgactgatggcataaatgatgccacaataaaccaggtatcaagtgaagatgccttggagaagcttaaattagtggttggcactacagataagttaacattaagccttgcagaatctgctttggttacaatgtgtcagctcaaccatctttgtaatatccaagaagcagaaaactcccagtgtgtacagcttattaaatcaggggactatgctgagagtaatgacaagatggtagagagtgtcctccgtttgttcttggcctctggtgtttcagaggcaatcacaaaatcttgcagtgaagaggcttcgtctgtcataggttctagtcgccatgcttatttgcacttttgggaacttgtggcatcattcataaaaaatgctccactgcaaagtagaaagtctgcacttgagtccatggaactgtggggactgaccaagggttcagtcagtggactatattcgattcttttctcctcacaaccaatatttcacttacaacttgcagctttctctctacttctctctgagcccttctgtcaactttcactggttaaaaattattcaatgggagaaagttgctcatctgctcagcaatctggcacaagccaaagtgctgagttgatgccagattcagacaagacagtgcatctaagagaggaactttcagacttaatcgagttcccaacatctgaacttctcaaaactgatctgacagctcgagatagggttgatgtattcattgcctggtcattgttgctgtcccacctgcaaacactaccagcatcttccagtatcaagggagatgtgcttcaatacatacaagaaaagcatatcccagtaaaggccgctgcaccgaatgggaagaaaaaggataccgagctagcgcctgaagcagaagctgctgccaaagcttcgaagaatgccatagctacttgttctttgcttccgtacttggagtctctttggcccatcgggactttgcagatggcctcacttgcaggctcactgtacgggatgatgattaggctgctgccttcttttgtgcgcacatggtttactaccttgagagaccgttcattgtcatactcaatcgagtccttcaccaaacaatggtgcagccctcctcttcttctagatgagttttctcaggttaaggagtccgtatacggcgatgagaatttctcggttagcgtcaacaggtcggctttcgagatcgttgctacatacaaaaaggaggagacaggaatcgaccttgtcatacgcctcccgagctgttaccctctgcgccacgttgatgtcgaatgcacgagaagtttgggtatcagtgaagtcaagtgcagaaaatggctgctttcgctcacgtcattcgtccgcagccagaatggcgcgatagcagaggcgatccgcacgtggaagagcaatttcgacaaggagtttgagggcgtggaggagtgcccaatctgttacagcattctccacaccagcaaccacaacctgccgcggctggcgtgcaagacgtgcaagcacaagttccacggcgcctgcctctacaagtggttctccacgtccaacaaatcgacttgcccgctgtgccagactccgttctagtcctagctctagacacatgcttgtttgttggcaccacaccgttcgatccttcgatgtaaatggcgtgtgtacgcagcgcagtgttcagcgttttggctgttaaatactctcgaaacaggacgggacctgcagagactgagttcagaggtcttataatctacaattaccgtggattcgctagattatttttaggttaattgaacatgaaaatgtctaaattcttaacactta

SEQ ID NO: 23799 - DNA, 2299 bp, Zea Mays
attcagcaatgcatcccgttccactgttccagcttgcacccgacaagccgaacacttcaccctttcccacttcacctccgccgttccgcatctgtggtcaaatacgacgctcgcgtccataccgatccgtgtttgcccattcctctcctcccactcgcttttcctccaaagcgagcgagctaggcgttacgccggagctcgtttgggcggtggtggaggagagaggaaagggaggagatgaaggcggtggagcgagcgaaactgtgaacggcaggctgtcggtggaccaggcgccgcgctcgctcttgatccgccagcgggttgacgccgacgaggggagatccgccgaaactctcgcctcagccaccggagatccaaaggtggtcgaagacgatacctacggcgaggaagccagcgccaaagccagagccaacgccaatgcccgagggaccactgccgaggaggaacggatgctcgctagtgagcccgagcagagaaaaagggcacaggaagccactacatctgagattttagctggggaagacgaccggggaaggaaaagccagcaagagggacacaaagagcaccagcagcacaagttgaccctcccaactgtttcgaattataccattcacgatgccactgacggcaccgacaatggcaaacaggaagatacagaatttaatctcactccagatgttgaccagagaaatggtcgagacagatctcatcaagcagcattggataatatggagcgggacaaaccattgtgtgatttctcaaacttcagagcaaatgtctgtgagatgagaggtaacatcagaatacacccaaatggcagttcggtcatatacatggaacctacgagttcaggttcaaagagaaacgaacaatggaaaattaagccttaccctcgcaaaggtgatgaattatgcctcaatcatattacagaggtgacagtgaaatccagcatagtggcacctgagtgttccaagtaccatgacgtgcctgctgtgatctttgctctgactggatacaccggaaatctattccatgacttcaccgacgtgcttgtcccccttttcacgactgcaagcgagttcaatggtgaagttcagttcctaatcacagacatggctatttggtggacaaggaagtatgctgtggtgtttgagaagctaaccaagtaccccttgattgatttcaacaaagacaacgaagtgcattgcttcaaccatgccattgtcggccttcatgcttacatggagttcacaatcgacccgttaaaggctccacacaattactcaatggtggacttcaaccagttcatgcgcaggacctactcactgcctagggatgcagtgagagcacctggtgagaccccacagaccaggaagccaaggctgctgattatctcgaggcaaaggacaaggatgttcctcaatcttaaggagatcgtggccatggctgaggagatcggctacgaggtggtggttgaagaggccaatgtgaactccaacgtcggccatttcgccaaggtagttaattctgtggacgtgatgatgggcgtccatggcgccgggctcacaaactgcgtgttccttccgcacggcgccacactgatccagattgtaccttggggcgccctagatgggatatgcaggatcgattttggttacccagcagaacagatgggcctgaggtacaagcactacagcatcggcgtgcacgagagcagcctcacggagcagtaccctttggaccacgagatcttcagaaacccgcttgcgttccacaagaacgggttcgagttcgtcaggcagaccttcatggatacacagaatgtaaggcttgactgcaaccgtttcagacctgtgctcttggaggctcttgaccaattgaaccaataaggacccattggtctaattccacggccactgtactagatttttgttttccttggcgattctagtctcaccatttttcctctttgtaaaatttcgtgatcactgtatctggttacatgagcaacatgaaaatcaattgtttctccaaatgtgtaggatcgaaatcgggattgtactgtattttgtttaatgtaaattagcagtcgtcgatcacagaaatatcagcgagaagctgctgttacatgatcacagcgagtagaattttccaggcctgacaggcatgatagaaatggggttggtggagaccaccttttttttaggctgtgtgattcatcatgttttttgctcccacttttttggttcttggacacgaagaaacgctaatgctgttc

SEQ ID NO: 23800 - DNA, 2242 bp, Zea Mays
gtaggacgcgttaaggatgaggaggcggaccgagtcgacgaaagtggctccggtgctggtgccatcgaggcggtagacaccggtggcctcaaacgaccgcagctcgtcgctgacttccatctgcggtggcagcggcaagggtttggcagaatctgaacttggaactactgggtctccttccttcgagccggtgcagagggccgagcgtcgccgtcaccgccgacgcccgagtttgcgggccgcctccagtcctccctccatctcaggtaagcggccgccgagcagccccgggccaggaggcgggagcgagcacgcgggcgtggggaggtcagtcagggaggcacgcgccgtcagtcgggttcaagtatcattggccccctaccagtcagatactctgcgagcgaaacgtgagttggcacagcagacaacacccgcgtgcagcgctgcaatccaaagaagcgaagcaaccaacccccgaaatcttcaacggcgccatcgccactgcgtcatgcccgtcccgcccctcctctcgccacttcgcctgccctcgccagcgccgcccctccaccgcaatggagcgccatggcggcgcccgacgcaactacgtgccgcactacgggtcccccctccgcttcacctggggctcgccgcggcccgtggcgatggcgtgaggcggttcgtcgggacgctgggctcgaagagagcgcgagctgttggtgcaattagggtttctgcgatctctggagacggcggtggcggtgctggtggtacgggaattgcggcggcagcggccgccactgtggtctttgctgtgatgaaccgggtgctctacaagctggcgctcgtgccaatgaagaattaccccttcttcctcgcccagttcgccacatttgggtatgtcctagtgtatttctcaattctcttcataagatttcgcgctgggattgtcactagagaaatgttagcgcttccgaagccacagttcatgctaattggtttactggaagcgctaggtgctgcttcaggcatggctgctgctgctatgttgcccgggccatctattccagtgttgtcacagtcctttctggtttggcaacttatcttatctgccctcatcttgggaaggaaatatagagcaaatcagatccttggctgcttgcttgttacagctggagtaattctagcagtggccggtggagccagtaatggtccgattctctttgaagtcaaattcttttggccagcagtaatgatgatttcagctgcatttcaagctgctgcttccattatcaaggagtttgttttcattgatggtgcaaaacgccttgagggaaagaagcctgatatatttgtagtcaactcttttggttctggtttccaggcactttttattttcctactccttccatttctctctaacttgaaagggattccttttgctgaactccctgcatacctaacccgtggtgctgcatgctttctgaatgtgggagggaatctgaaggattgccatggagctcctttgctaccacttctctacataactctgaacatggccttcaacatttctgtccttaatcttgtgaagatgtctacagcagtggttgcttcgctgacatcaactttagcagtacctctttccatctatatactgtcactgcctctaccatatctacccgaaggaacaaatttgagcgcatcttttttgattggtgttgctaccttagtgctcggattgcttctatacaatcttcctcaagaatcaaccaatcaagtaaaggaagattaatctaaacccatatcagatataaggttaacaggaagctattggtgctccactaagaaaatagccgcattttgttgacagtggcttcacagtttggtacataactcatgaagagcagtgttcttctgccacaaacatttgcggtgcaaacatttgaggcaccagctgacttcaaagtttagaaacagcaagttcttgtttcatctgttaacaaaatcctaatggattatgcagctatatataagctctacctgagcggatgtaactactaactactttcagatgagtaagggctttacaaattcattggttgtataattgttctcaccattttttggtcaattcaagactaacataccagactccgtgggatttattatgtaaataagtaatgattgtaaccattataaatcttgattgtatggccaaccatttcaagtgaatgctagatacacg

SEQ ID NO: 23801 - DNA, 2420 bp, Zea Mays
ccaagtacttgaccgcctcgtcgacgactacgctgactaccgtcgcgatcccaaacgcccgcgtggcgccgctgctgctgacgatcccgagccggcgtcagagggcgacttcggcacgtccctccactccagccttaagcttgatgacatcctgacctacgcgcaccgcataagttacacaacctttgctccgccggagcatggtgctgggttgcctctccgtgttagcctgccacctgtaccacaggagaatcagatgagagcgtcgcagctgtatctgtttgctgatttggatgtaggggtacccaagaagccattggatgcgaaggacgggatcgcggcagaagtggaggttgcgccgctgtatgaggcaccacaggaggggccgtcgaggctaccaaacaccttgccacccatgttcccgaaggagctaaagccgccgccgggatggaagcctggtgatccgatcacgctaccacttgatgagatactacctggtatcaagggtgaagagcgggaggcacaggcccctgtgccgcaggcacctgtttcagtgcgaccagtggcaccaatgggaccagagacaatacaggtcaagcctgtgcagcttgattttgggagcagtagtagtgacgagtacagtagtgacgttgggagctcagaagaagatgatgaggattagtgctcgagatttatttctctgcttaccagtttacaaggataacagaagatgagaagaacaatagcagcagcaaaacaatctaaatcagacatcacacttgtagctgaattccaacaggatacccgaacccactccaggaacccaaaggcaacaggaacaccacctcttgcacttgtacagaggctcaaatcactgtgtatgtgatttaactgggtttttcttcttcttgtgatttaactgtgtacatgtgaatgctgcattccataggtcttacttagcgggatgcatgtgatcttctgaataaggtcgtttcgtatggtcccgtggttaggtgtctacagatgcagtgcattcagctgtcccaccacaccaccttctcagccgaccgaaaggcatcttacttatcccaatcagcctgccacagtggcgagaatggaaccgtacctccagtggttagggatacagctcatggagctcggcggtaccgcaatgtcgctgctgctgctgctcgtgctcgccgcgtcgccattgcagcaggccagggcggttggcggcggcaggccgcgggtgccggccatcctggtgttcggcgactccatcgtggacacgggcaacaacaacgccgtcctcacgctcaccaagtccaacttcaggccatacggcaaggacctcaacggcggcgtacccaccggacgcttctccaacggccggattccgacggacttcgtagcttcacggctcggcttgaaagatctggttccggcgtatctcggcaccgacctcagcgacgacgacctctgcacgggcgtcagcttcgcgtctgggggcaccggctacgacccgctcacctccactctcgtgttctgccgatgcaggaggagctcaacatgttcgcggagtacaaggagaggctcgcaggggtcgtcggagacgaggccgccgccgcaggaatcgtggccgaaagcctgttccttgtctgcgccgggtcggacgacatcgccaacaactactacctcgcccccgtcagacctctgcagtacgacatctcggcgtacgtggatttccttgtggagcaggcctgcgacttcattaggcaactgtaccagcaaggggccaggaggatcgcggtcctggggatgccgccggtcgggtgcgtgccctcgcagcggaccctcgccggcggcctagccagggactgcgaccccgctcgcaaccacgcggcgcagctgtacaactccaggctgaaggaggaggtagtgctgctccagaaggagctggcgtgccagagaatcggctacgtggatatctacgacgtcctgcaggacatgatcacgaacccctgcaaatacggcttcgaggtctccacgagaggatgctgcggcaccggggacttggaggtgtcgctcctgtgcaaccagctgacggcgccgacgtgccctgacgaccggaaatacgtcttctgggacagcttccatcccaccgagaaagcatacgagatcatcgtggactacctgttcccgagatacatagagaacctgctataattacttctgctttaccgtcgcttctttaattcgatcgtttctagttgttgtcaagtttagacatgccgtctttgtttcccaatttaagcttttgctttaaaactcaagacttttcaaggaaatgaaatgacacctgctagcttgttgcaagctgtaaagattgattggttttgtttacttgttccgtgtgaaac

SEQ ID NO: 23802 - DNA, 2246 bp, Zea Mays
aaatctgttcattgccggctacctttcataaataacttatgaggccaaactaaagagggcagggcaggcgaatcgaaggaaaagtagtcaggagaggcgtttccctcgcaatcgaccatcacagatcaaatcgctgcaactagctagggtttcgtcgcctcatctctcgtcgatccatcgatggcgtccgagggcgaaaacaagaggatgatcacgctcaggagctccgacttagaggagttcgaggtggaggaagcggtggccatggagtcgcagactctccgccacatgatcgaggacgactgcgccgacaacggcatcccgctccccaacgtcaactccaggatcctctctaaggtcatcgagtactgcaacagtcacgtccacgccgccgccaaacccgctgactccgctgcctccgagggcggcgaggacctcaagagctgggacgcgaagttcgtcaaggtggaccaggctacgctcttcgacctcatcctggctgccaactatctgaacatcaagggattgctggacctgacctgccagacggttgctgacatgatcaagggcaagactccggaggagatccgcaagacattcagcatcaagaacgacttcacccaagaggaggaggatgagatccgcatggagaaccagtgggccttcgagtgattgttgtcttcctttccctgccatggcgaagcccgtctccatccaggtgtggaaccccagcggcaagtaccgcgtggtgagcaccaagtccatgccgggcacacgatggatccgcctgctcaccgacaacgactgccgccttgagatatgcaccgagcacaagaccatcctctccgtggacgacatcctggcgctcatcggcgatcgctgcgacggcgtcattggacagctcaccgaggactggggggacgtgctcttctctgcgctcaagcgcgccggaggcacggtcttcagcaacatggccgtcggctacaacaacgtcgatgtcgaggctgccaacaggaatggcatcgcaatcggcaacacgccgggcgttctgacggagacgacggctgagctcgccgcctccctctcgctggcggcagccaggaggatcgtcgaggctgaccagttcatgagggctggcctctatgacggatggctcccacacctgttcgttggcaacctgctcaagggccaaactgttggagtcattggagctggtcgcattggctccgcctatgcacgcatgatgattgagggtttcaagatgaacctcatctactacgacctgtatcaggccacacgtcttgagaatttcgtcacagcatatgggcagttcctcaaagcaaacggtgaggagcctgtcacctggaagagggccgccaccatggaggatgtcctcagggaggctgacgtgataagtctgcatccggtgctggacaagaccacctaccatctgataaaccccgagaggctggccatcatgaagaaggaggctgttcttgtgaacgcaagccgagggcccgtgatcgatgaggccgcgctggtggagcacctcaaggctaaccccatgttccgcgttggcctcgatgtctttgaggatgagccttacatgaaacctggactcgctgacatgaagaacgccgtcgtggtaccgcacatcgcatcagcctccaagtggacacgcgagggaatggcaaccctgtctgctctcaacgttcttggtaagatcaaggggtaccctgtgtgggggaaccccaatcaggtggagcccttcttgcaggagaatttgacgccaccgcctgcctgcccaagcatcgttaatgccaaacaaattggcctgccatcggcaaagctttaggagcgaacactgacaggctggtatctacatgttgaagatgtgtcgtcgtcgtctccaccacgcgcacatatatgtacatgcatgtggattgaggtcatgcatctgcagagcaggtagcacatattaatttggatcatatatattgaccaatacacactgtatgctagattgctaggttgctgtgcatggatcatattgatcaatgacgaccaggcctccctccgtttcccttctatatttaggacctatttggttccttaagtccaatttggttccttaagtccatggactaaactcccgtattcttacgagtcatttaataagttttgaacacttttagtctcttcaaacagggtagggactaagagcatgtatggtttttttagtccag

SEQ ID NO: 23803 - DNA, 2325 bp, Zea Mays
ctccgagagattttcttcatgcggagagattattgacgcgcgcataatgaaagatcagagtggtcactcaaagggatatggttttgtgcggtttgcaaagagggattatgctaatactgccaaaaggcaaaagaatggtattgaggttcaaggaaagaggcttgtggttgagctttcaatggatcaagatacagttttctttggaaatctttgcaaagagtggactttagaagaatttgaagaattgattcacaaggcattcaaagatgttgtttcggttgaccttgcaatggcgtcaaatcttggttcttcaaacaagaagaatatcaatcgaggctttggatttgtgagattttcttctcatgcagctgcagcacgtgtaatccgcatcggttcaagaacagatttcatgcttggtgatattttgcatcctgcgataaattgggctgataaagagtctcatctggatcctgatgaaatggccaagatgaagtctgcttttattggtaacctgccagaagatgttaatgaggagtacttgagaaagctttttggacagttcggtgaggtagtacgggttgctatctcaagaaaaggacaatgtccagttgcttttgttcacttcgccaaacgttcagagcttgagaatgctatagaagaaatggatggtaaaacggtgagaggacctggtcgagggccgtctttcaagatccaggtgtcagttgctcgacctacggcagacaacgacaagaagcgatctcgtgaagaagtgagaactagaagatcaaatgcatcaggagataggcgagattattctcatggaagatatggacacgattcacttgatcgtcaagtgaaagctccaagattatctaattatgtggccgatgctgctgacccctatgaatcagctgttaattcattaccttcagctgtcaaggaagtcttgcttcgaattctacgtctaagaattggtactcgatatgatattgatatccattgtgttaaaagccttgatgagcttcctgagtcatctgctcttgctgtccttaatcagtttttgatatcaggtggagacaaacacaacaaaggagattattttgcatcgttggttgctaaggctgagacctttggcttaacacatgcattacacggtaccacttatttgtcaagaaatccggaaatgcatagcaagcgatacccacatgaagattatgattttgtgacacccagtaggtacgattcgtcagcccatcatccttcaacatactacgaagacgatccaccagtgtctgagtcaagggttagaagatatgctgaagaaaggtccaccattgtaagaagcccagaaccacgtccgcgatatgacgaaacagacataagaataaacccagaaccaagattaccatatgaatcaagacacaacgccgaaaagcatctcgatcgaagatacatacaagagcatagttcaaatattgaaagaccagctgaagaagctctcctttctagggaaaggagatttctgcctgctgcagggtacatgccgaacccaggcggctcggatttccgctccaggtcgcccgccgaatattcagcacaacgccaacaaatgaggtttgatccattcacaggtgaaccttacaagtttgatcccttcacaggggagcccatcaggccagatccgaaccagcgccgctcaggaagcctgtactgatcagattagttggagcgatatgccagataagaccctgaaacaaagctagatctggataactcttcttcttgtctgccaagtgtctctgtgattttgcttgtgggctacagatcatgtaccccgagcaccatgtgtgatccagtcggactaatcatttcggcattgaaaagtcggactaactttttttgtgcccataacgctacgtattgtttggtagattaattaaaaattcatccggtgaaaagcaattttctggtatttttctggaggtgcagtaggcgtggtaatgcagaatttcaactgctacgtacactgcaagcgctgttttacccgattcgtctttacgtgttgccaaatgtttcattgacttcatagaactgatttcgactactttggatgctgagcaagggaccatgcctttctcacatatactcatctggagaatgtcaagcaagacggcccatctggacacatggcaagaagagataaactagctagctgcctcccaatgatgctactaccttctcttcgactgcttcaacgttcacatgcccctcccttgcatggcgtagtaaactgggttgcttgaaaaaacgccacttctaagcgta

SEQ ID NO: 23804 - DNA, 2946 bp, Zea Mays
tgacatacttcgcaaagctgttgaaacctacaagggaaaaaattggaaaaagatagctgaatgttttccaggtaggactgatgttcaatgtttgcatagatggcagaaggttttgaaccctgagcttgttaaagggccttggtcgaaagaagaagatgagatcattactcagatggtaaataaacttgggccaaagaaatggtcgaccattgcccaagctcttcctggacgtattggaaagcaatgtcgggaaagatggcacaaccatcttaatcctgggatcaataaggacgcatggacacaagacgaggaaatcaggctcatccatgctcatcaaacttatggaaacaaatgggctgaattgacaaagtttttaccaggaaggacagacaatgcaattaaaaatcattggcacagctcggtgaagaagaaagttgattcatacagatcatctggtttactggctcaatcccagggcttcacacctgttgaatacactgctggtggtttaaatgttgattcttcatctgcaataaccaatcaaattagcgaaggcagtggttttaatgtttttcgggaggctgaagattcgatggagttaagtcagtcttcgtttgccaagggttcttgctctcaggaggagcaaaatgatgtgactttgggatctcatttgcatgtgcatgaatctttgtgtccagatggttccactaatgatggcaatggtgcttctggtttacctgacattcatcaccgcttatgcacttctgacatggatcaagataaacacttgcaggaaggaatggatttggataaacacttgcagcatgaattctctcaaggaacggatttgcatcttgatgtagatgaagtgccaaacaactttgtgataaaaggtagccagtcatctaatgagcttgcagttcaatttcatgacacagagattatgaatagttcaaaaaatgatggagtgtctttggtaccacatgctataacaccatgtgttcccatcttacctagtgtttctggatgtgtgcataacataaatgtgatatacgaaatgggcataaaaaatgataattgtttccaatctgaaaagtgccaggatatttccattcaatcaggtgcatactcgtctgaagctgcaggcagctttttagcaccactttacccattgcagacatctgaaccagcaataatgatgggtggccctgtgtactatcagagttctgtaatgtcattaccaccaggctttatttcttctgatggtgcttctaatgcatctggtgtcaaatctgagacaagttactatcctgtttctcgccaaaatttggagattaaaacttgccacaatgcttctggtgatcctgaacaaaattcatatattagcagcgaagatgacagaaacaagacttctgaacctatgggcagaatatcagaatctgaaaagaaacagcaagttgatgttgaacaatcatgtttggagcctgcagcctgcattggaaaggaagcattatctagtcatggtgacaccatattaagtaaaaaggaggatgctggagctctatgctatgaacctccttgctttcggagttttgaatttccctttgtcagctgtgagcttgtaaactccagcgatctcccagaatatagtcctcttggcattcgagagttgatgaggacatccttgaacttccctaccccagtaagattgtggggctcccctactagggatggtagccctgatgctgtgctaaagaatgctgccaaaagattcatgtgcaccccgtccataatgaaaaaaaggcacagagatcttttatctccagtttctgatataagaactgacaagaaaccaaatactgaaagggattttatgagctcaggcatatcctctacaagagttgggaaatcttgcatggatagcgctgatgattcagctgatttagtttcaccgaaagagagtgcatttcaaaagaagctgaagctttgtcacgaaaacaaagaaaatttgaatgaaattgctgatcaaggagaaaatgaagccaatgcaaagcattcttcagggattcttactccgagcagtgttgacaaccataatacacataagcatggtccaaattttcgaattcaggagctaaataccactgtacaggctttgtctaactctaaagacataatattttctagatcaaagccatcagaacatgttgaaaaatctgcagcctgcattgatgcagattacgagtatttgaacatattggctgatactccaggtattaaaagaggcttagaatctccttctgcctggaagtctcctgtgttcacaccattccaggatgcatacttcatgagcccagcaagcagagcttttgatgccttaggattggtgaagcagattaatgagcagagtgcttctgctgtggaggaagcacatgaagttctggcaaatggaagcccatggaaacaacataacaaggaaaactctgacaaagaaaatatagaaaatacagctttgaagcatgagcatgtcacaagcaaacctccatcgatactcatggtagaggcacgggtgctcgatttcaatgaatgctccacacctgtgaggaagaaagacgataagaaagtggaaatagttttaggaggacctgcaacatcccctgttacttcctcgcatctttggataaatatgcggtagccctttgaggtgggtgggcgtggggatgcttcgcctatgctgttcagtatgtacatgtctgttattcccataatttccaccgttttgaaatacacattccaattagtactttattctttgtgcttggtaccctaaatgtcaattctaaatggaaatacatttttttgtagtgttaagatttgtaatgtgtcatttgattatgttaaatattaaacaaggcaatatatttaaattcagagtatattatgaaa

SEQ ID NO: 23805 - DNA, 1293 bp, Zea Mays
gagtggccgaaccgaacgggtggataacaaagggatagagaagcggcagctgcagaggcagagcgtcagagccatcgtcctcgcctcaccccgtagtcccgtacctagcgcagcgaagccggcacaatgccagccgccgccgtagtctcccctctcctcctctcgctctcctcgtcctcctcccccttcctctcttcctcatccacctcctttttcccaccctcctccgctgccgtcactccacacgccgccgtcaggacgagggcggctgtctccgtcctccgcgcgctgcgcgccgaggcggccaccctccccgtgctctcattcaccggagagaaggtcggggaggtaaccctcgacctcaaatccgcgccaccctccaccgcgcgcgctgtcgtgcaccgcgctatcatcaccgaccgccagaacgcgcgccgaggcacggcctccacgctcacccgcggcgaggtcagaggcggagggaggaagccctatcagcagaagaagacggggaaggcgcggcgggggtcgcagcgtaccccgcttcgtcccggcggtggcgtcgtgttcggccccaagccccgcgactggtccatcaagatcaaccgcaaggagaagcgccttgccatctccactgccatcgtgagcgccgccaaggacgccttcgttgtcgaggagttcgaggaggccttcgcgtcggggcccaagaccagggatttcgtggccgctttgcagcggtgggggcttgacccgaagcagaaagccatgttctttgccacggacttcgacgacaatgtgcggctcagcggcaggaacattggttccctcaaaatgctcacacccaggacgctgaaccttgtttccgatgactactatactgatgacgaggatgatggcgaggaggaactggtcgagcaagaagcagaagaaggcaccacagcagatgctgctccagatgcaactgaagagggcgaggcagacagcagctcctaggcgggaagtgtagatttgttgtttcgcatttgttatgttaccctcaggtgaggatggtggggaattctttcctaacggggagaccttttgtctgcttttattgtaagttgattatgttctcttactgaagcagtatactagatttccaaacctcacataagagcatgttttcaaatacatcatccgttgtcgaccactgcatataaagtgttctttcatctacgctgcaatggtgaagaacagcggacaattatcctggaaactgacggttatgtgcctgattgctgatttaattcgtgc

SEQ ID NO: 23806 - DNA, 723 bp, Zea Mays
aatttgactgatgttgttggcttgtagtaagaattgcttagtttgcgatccaattcagtcgaggttcatctatatccaagggtttctgtggaagcatggaggaacctacacattctgtatctgtacatcgtccaaccattggcgctgtcgctacgtgtgaagtacacaccgtgtacttgtgcagaccttgtaatttttacttgcctggtagcgggaaataaatcgaagctcctctcaccctttcttgaataatttgccccagtaacattatcgatatgtgttcatgtgttgtgcttgattccacataatttcttggtcctgggagtttggaagcttagaacttgcgaatggtcccgtggtggggtatcttgcaagttgcaagcgggtacactccttggctgcagctcgccatggattagctcttttccggctttgattgaccggaaaatttccataacgaaattgtcgcatcatgtctaacatgagatgacgagagtgcctcgatcatgtcagtgtcatgctggctgtactatttaggcttgtttcaaaggaaagaaaaattgacatgaattttgaggaatggcatttacgtacaaagttgcttacgaatttggactagaagatacaactctgagtcgtacagaattttggtgtagcttttgttttgtagggcatataaaatctagaaactctagaatgattttctaaatacaagagtcagtt

SEQ ID NO: 23807 - DNA, 1386 bp, Zea Mays
tgcttggcgagctgggattgatccttcaacacttgttccatagctttgaccccccaactccttgttcacttgcatgtgcgcctgaactcgtgggatgtcgcccgtcctggtgaagaggaggtcaatactctccgtcatgtgattccagcggttttcctcctgctttcgcgccgcctccatcgcctccaacacaaatcagggaaatcgacttccgtcgccggtgttgcgcgacagacagaagaatttcaccaacccaaccctgttatggtggcgatcaacggagtatgcaaaacggcgacagtcgcacagcaggaaagtgtctctgataccaattgtcgtgcccgtggccgtggtgatcgccgacgacgtgagaaacggtggatcggggacacacaagcacaatgagcttgcgagtgctggctgaagaaacagaaggatgtcatggcccctgctgttattgcaaagggggaggacgtcatgtggacttctggtctaatctttggaaaaggagaggggattgtggggcttgaaacaaatttagggacacttcatattcaattgctgcctggttgcgcgccccgttcagtggaccacttcatcgagctcctgggcttgcgcaactgtgctggatgcagattttatcgtgcagaaggacgtgggaacgtctgggatgcaaaaggcgaccatgaaaaaaatgttgcatttggccccccatatgcattgcttcaaggaacactggaagttgatggtgtgcccttcaagaagataccaagagaagcatgtccggcggtgaaaagagggtccgttgcctgggtagggtcagggccagagttcctgatcagcttagcggaccacgaggagtggagggacgcctacaccgtgttcgggaatgtgcttcccatggacatggcgatcgctgaggagatgacactgctgccgacaagcacagacgtgtggagcaacgtgaaagtgaaggtgctgaaagatcctgtctacttcaaggtcaagagaagcagcaatgctagcgctgtctaggtgatgggcatatttcttcttgcttgtttggatggaaggctgtggcaacaccggcaaatggttgtttgaccatgaaaacctgtgttataactcacaggagacgatggtctcgcttcattgtgcaaagaaaggggagagttctaatacaacagtaatatactagcacagtagtaatatactagtacaatactcctagtacaaaggccggagattctctcttttttcctcgtgtagaacacgtgactcaacgagttcttcgtgtcttttagtttgcctcctgcgttttggcccgttaggcatctccagcatatcctatatcatatttctattttatcatctattttaaacttc

SEQ ID NO: 23808 - DNA, 2263 bp, Zea Mays
gccgattaccataaagacttggcccatcacgtttacgggccgctaggaggaaaagaggccgacatccctgctagcctctcgttgtagtaaggagaagaaaaaaaaacaagaataataaaaagccgggccccggccgaagaaacttgcgagcaacccggcgaaagccccccaaaccctcgcaccctaaaacagcggcgcacaagatgtccgacgaccccaccaacggcggcggcggtgatcgcgtggaggacgtcgtccgcgccgagggtgaaacacaacctcgtgatgatggcttgtcgaaatccaaggatagggacaaagatagagaaaaggacaaggacagagatcgtcgccgagaccgtgacagagatcgagggagagacagggaccgtgatagggatagggacagggacagggatcgggacagagacaaggatcgccaaagtaggcatcaccgtgaaagacgggaacagcgagaccgtcctgatgatcacagagtccgtgattctgaaagaagaagagaacgcgacaaagatgggcatcgtaggcatcgttctcggtctcgttcaaggggtagagatcgaagatctaggtcacgttcaagaagcaagcgagttagtggattcgacgccccacccccgcaagcaatgggttcaacatttccagttattccaaccccaagcaaccatgtatggtaacaaggccaatcttgggtcacttgcctcacttctaccagtggaatgagctgcctactatagctttaatgtacaaggaagaatcagtgcgccggtttgatatcgtcatgttcatcttcaactagctagtactaggtcagttaccaggctcttcgcttcccaacattggtggcatgtttccaaacatgctccctttcggtgttgctgggcagttcaatccccttgtcatccagccacaagcaatgactcaacaggctactcgtcatgctcggcgtgtttatgtcggtggccttcctccatctgctaacgaacagacagtggcaatttactttaatcaagtcatggctgctattgggggaaacactgctggtccaggtgatgctgttctcaatgtatacataaatcatgacaagaaatttgcttttgtggagatgagatctgttgaggaagcaagcaatgcaatggccctggatggcattatgttcgaaggggcaccggtgaaggttagaaggccaacagactacaacccttcccttgcagccgccctgggcccaagccagccaagccccaatctgaatcttgctgcagttggcctaacagcaggatctaatggaggactagaaggtccagaccgtatttttgtgggtggcctcccgtattacttcactgaagcgcaagttcgggagttgcttgaatcattcggtcctcttcgagggtttgatcttgtgaaggatagggaaactggtaactcaaaaggctatgcattctgtgtttaccaggacctcaccgtcactgacatcgcttgtgctgcactaaatggtatcaagatgggtgacaaaacccttactgtcagacgagcaaaccagggggcatctcagcccagaccagagcaggaaagtatcctattgcaggcacaacaacaggtgcagttgcagaaacttgtgtatcaagttggagcgcttcctacaaaggttgtatgcctcacacaggtggtaactgcagatgaattgaaagatgatgaagagtatgaggacattatggaagacatgaggctagaagcaggcaaatatggtaatttggtgaaagttatcatcccacgccctgaccccagcggacagccagttgtaggagttgggaaggtgttcctggaatatgcagatatcgatggtgctgccaaagcaaagacagcgctgcatggaaggaaatttggtgggaacccagtggtcgctgtctgctatgcggaggacaagtttgccaatggggaatatgatggatgaaaatcttatccctcttgaactatagcagtagccggtctttgtctttggctctatgctacctgcttgtttaattgcaacaaagatgaacggtctctcatttaagctgaacctctacctgtattgatatccctggattttttctgagccaccacctgttgtgatttgtgaacgttgtaagaataggtttctttgcttgggttcgcttgttgctgtcgaaaatatgtaacgaatgttattaataaagaatttcttgtatgactttactaccgtgtgtttgatttggtttgagtt

SEQ ID NO: 23809 - DNA, 1164 bp, Zea Mays
  misc_feature (1)..(2): n is a, c, g, or t
nnatcgttgagaagtattccaactccaacattgaaattcatactttcaatcagagccagtatcctcgcattgttaccgaggacttcttgccacttccaagcaaagggaaatctgggaaggatggctggtatcctccaggccatggtgatgtgttcccctctttgaataacagtggaaaactcgacatcttattggctcagggcaaggagtatgtcttcgttgctaactcagacaacttgggtgctatagtcgacatcaagatcctgaaccatctgatcaataaccagaatgaatactgcatggaggttactccaaaaacattggctgatgttaaaggcggtactctcatctcttacgaaggaagagttcagcttttggagattgcccaagtacctgatgagcatgtgaatgagtttaaatcaatcgagaagtttaagatattcaacactaacaacttgtgggtgaaccttaaagctgtcaagagactagtagaggctgaggcacttaagatggaaattattccaaaccccaaggaagttgatggtgtgaaagtccttcaacttgaaactgcagctggtgcagctattcgtttctttgacaaagcgattggaattaatgttccccgctcaagatttctcccggtgaaggctacatctgatttattgcttgtgcagtctgatctttacaccttggttgatggctttgtcatccgcaatccatccagagcgaatccagctaacccttcgattgagcttggacctgagttcaagaaggttgccaatttccttgctcggttcaagtccatccccagcatcgtcgagcttgacagcttgaaggtttctggtgatgtctggtttggttctggaattacgctcaagggcaaggtgacaatcaccgccaagtctggagtgaagttggaggttccagatggagctgtatttgaaaacaagggacgagagaggacaccatgggacatttctgtcctaactgtcccgcaactaaacgcacccgcaactaaacgcactatctcaccgggtggtatgctatatgataagggggatctctccacccaggttgccacatccacatgcctggtgctcgagaatattgttgtggaaggccatattccaaggtgataaacgccatcatgtgggaatggactct

SEQ ID NO: 23810 - DNA, 2231 bp, Zea Mays
ggaagtttctagtttctgccccattttacgcaagcgacgacgttctcctccccgtacacaacacgcacgccatctctctcgaagcttccgcttcctccagccgccaccgacccgaacccaccccggacgcggcgcctcccccgcaccctatattgttccccgagctccagccgccaaggattggcgaaaggagccgggcagatattgaaactcgtttcagatcggatccgaggactcgagaaattgcagggaaggaatttgaggatggatttcgagctgcggcaggcgcgggagaagctggagcgcgagcagcgggagcggatgcagcgcgccaaggccaaagcggagcgcgagagcctggccaaggcagaggcggcgcgccgccaggaagcgctcgaggcgtcccaccgcgagcgacgactcgatgccgcacgggcccaggaagaggctgaccggacaatggaagaggtgatgcagctggggaaggggatttcattctcgcacatgtttgaggcacttcgatatgatggccctggggataagatcaagttgccaccatcttcgtttaaggagttgtctgatgaaggagctctcgataaaggtcccatgtacttcaggttgtcgaaggttagggacacagtcccaggtgctgctatggaacaagatgctgggacaacctgttgtggtgttcttgaattcacggcaagggaaggctctgctgaactcccgctgcatgtttggaacaacctgtttgggagtgacaccccagaggtccctctaattgaagtcaaatataccagtttgctcaaaggaacatatgcaaagttgaagccagaaggagctgcagtacaagttgaaggttcttgaactgaagcctgcctcaagtgtatctgtcctagagacagatgttgaagttgacatcgtgggatcagattcggttttggacaacgaagatgaccaacatgtgcttgtgcctcttgtaattggaaatatagaatccagtgttgtggaagaaggaaagttcaggtactacaaattttcagttgaaggaaatgtgagtgagaaagtagcttctgggcatgcaaatatcgagattaaaatagatacggacgcgagcggtggtgacactgatatctatgtttcaagacatcctttagtatttccaactcagcaccgacatgagtggtcttctcatgaaatgggatcgaaggttcttatactcaaaccacgggatgctacattggtcagtggtgtttacagtattggagtttatggtttcaaagggacttctaagtaccagctctctgtagctatcaaggatgttagtggccaaaggattggtgaatatgctagtgcctcgggaagtgttgattttgattctgtgctgtgtagaaactgtaagcgccatatagccagccagtctgctcatcttcatgaggcatactgcatgagacacaatgtagcctgctcacatgatgggtgtggagttgtccttcggaaggaagaagcagcagatcatgtgcactgcaacaagtgcggacgagcttaccagcagagagaaatggaaaagcatatgaaagtcttccatgaaccgttgcagtgcccctgtggggtggtcctggagaaggaagatatggttcagcaccagtccttgacttgccccttgcgattaattgtgtgccgcttctgtggtgacacagtccaggctggtggagagccttctgatgttcgtgacaggatgcgaaacatgtctgagcatgagagtatctgcggatccaggacagcaccatgtgactcctgtggacggtcgatcatgcttaaggagatggagattcatcttattgctgtgcatcagaagagctaatcacctactgacgctgggctggtctgaacttgagcctctattgtcatttggtcaacagaagctgtgaactttaatgtgccattccagggttgttggattgaaaactacaccttgggactgggagctatatgtgattcgtaattcgtggtgttccatgggattaaacatactggtgttatctgtattttatttctctgtatacattatttataaatctgattttacattcggtattacctatttcctaagtgggtgttttgctgactaaagtttgttcacgtcacgtcaaaggtttgatttgaatatcaattatggttattaaatatatgtttaattagatttaataaatttgtctctgtttttagtc

SEQ ID NO: 23811 - DNA, 1246 bp, Zea Mays
ctgagatagaagcgagctctcatcacaagaggcctgtccagtccaggttggagaatctccttcctcctcttcctcccctgcctcgctagatataacaaaccatgccggcctacttgccagctcgcagtcccagcagagaccagagcctccggaaaccgcagcctcttggcctttgcttcctcgcttatctggcgtacaggctaagctagagagggagggagggagagctcgccgtttccgacccatcggcagcgccggagatcctgaaaagagtgccagctgagtacctcctgctgctcgaattttctcgtgggacagacaattttcagataaggacgtcagggagcatcatggacgacagggagcagatgaggatgaccgtcctgaaccaagaacaggtcttcagacatcaggtacacgagctgcaccggctgtaccacgtccagaagcagctgatgatgcagcaggcacacacgcctgctccggcgacccgtgctccagcagtgctcgacgacgccaaggccaagccaagaagaccgcacctagacatctggtgcagcgagacggcgagaaacccccctcagcaacggatcatcagcttcaacacggccacagcaccggcaccggcaccggcaccggcgcctgcaagggccgaggactgcaaccttgagctgacactggcaacgggacgaccgagcagcagcagcggtagcagcagctgtgacgccggaaggcggcgggggaagcggctcaaggtgtcaaccaactcggactccggcgccaccgcggtgtcgtccacgtcgacggactcggagctggcgcagttcggggacatcgacgcggcgaatctgccggtggtcaggtttcagggcgaggttactaggaggatgggcgaggtggggcagggcccgtggatgtaccggtgcctgagcttgaagaccgcgtgacgagtttgtgctgtatgtagttgtaggtaggaaatggggagttgcggttgtagagttcagacttgagaggattgagaaggagacacatcacatgtcttgtgttttacatgcacggattgggatcctcggcagtcgactgctctcacgcatcaacaccggtagactccaactgtcagcctcctggcagtcaactgcgcgactgccgagtatccggatcctacatgcatatgcaccacagaggtgtttcagaagatcaaaaagagagaaaggaacaaaggtttcaaaggtgctgctcatgg

SEQ ID NO: 23812 - DNA, 2322 bp, Zea Mays
atagtagggtttggactatacaattctcgtgtctcgccctcccccgacgcgccgtctagggtttcacagccgcaccccgatccactagagctatggagttcgacgaatacgagtacctggagaaggcggtggagccggctcccccgccggccaatggttccggctccggcgagaaggaccgcggctcgcgtcgccgcgagggcgacgagggccgcatatcgaagcgctcccgctcgggggaggaccgcgagcggggccggcaccgcagcgttcgggaacaccgggatcgggataaggatgacgggaaggagaaggagaggagccgcgatagccgcgggaaggacagagacagggaagggagagaacgggagaaggagaggggggacaggcaccggcccagagagagggaggtggaacgggagcggaggagcctgagccgttcggagcggcgccgtatcgaggaagaggagatggtgagggagctggagatggagcgcgagcgcagcgagcgacaccactatcgcgaccgtgacgtcaggcgtaggaaagatgacggggcagagccagaagttgatccagaaagggaccagaggactgtatttgctttccagctatctctgaaggcagacgaaagagatgtttatgagttcttctcaagggctgggaaggttcgtgatgttcgtcttatcatggaccgaaactcaagacgttctaaaggagttgggattacacactgaaattttatagtttgctctacatgctgggattatcggcaatttacaagttctaggcaataaagggggcacccaagaaccaagtacattgagttttacgatgttatgtctgttccaatggcaattgctttgtctggtcaaccgctgcttggacaagcagtgatggttaagccatctgaggctgaaaagaacttagttcagtcaaatgcgacatcaggtggtgcggcttcaggtggagcaagaaagttgtatgttggcaatcttcactcaaatattactgaagaccaattaagacaggtatttgaaccatttgggcaagtggagcttgtacagcttcctctagatgcaatgactggactgtgcaaaggttatggctttattcagtttgcccggcttgaagatgcaaaagctgcacagagtttgaatgggcagcttgatattgccggcagagttattaaggtttcagctgttactgatcatgtgggagtgcaagctagtggagctactactggagatctagatgatgatgaaggtggaggcttggcgctaaatgcaagctccagagctgctctaatgctcaaattggacaggagtggtacagcaaccagcttaactggtggtattggtgctgctggagtggctgtaccagctacttcagttattggggcagcaggagctgcttctcttctgtcaccaacagtttctgctgttggatcagttcctggggcacctgtgcttcctattaccgctcagaatgtgatcatgtccacacctacagaattcttgttgcttaaaaacatgtttgacccatcattggagacggatcctgattttgacttggatattagagatgatgtccaagatgaatgttccaagtttggtgcagtgaagcatatttttgttgacaaaaatactgcaggcttcgtgtatctgcagttcgatagtgtaactgcagcagggaaggcccaacaagcacttcatggaagatggttcgccggaaagatgattacagcgacatttatgtccgatcaggaatacagtactaagttcccaaacttgtgagcatatgcggggaagagttggtcagacccgcatagttcgttcggagagtttgctagtgctgtatcgttggatggtagactagacgaacaccttattgattgtatgacaggatagtttcagttgcagcgctggtcgtgcgtacaatgtttgatgtactttatttacggcatcacacacagtgaccatcccttattttgtccaccgaatgaaatgccctatgatctccaggcacgttggcatatggtttatttatgtacgatctgttggcactggtacgtatttgtatactaagcaaaagcgttacataatcacaatggtacctttattagtcccctgtcgtgggatatgcggccgcattttggccagctttccaatgtgttccattttatttttgttctcatgatgtttcgacatgttttcatcagtttttcctttcaccaaggtcactatttcattccgtttcattttcatttactccactgatactgtatctagttattttatttggtttatcaagaaattataa

SEQ ID NO: 23813 - DNA, 4002 bp, Zea Mays
caggaatccaaatttctcccagtggaacggtggaagtgtggaaccatcgcataaatgccccactcgtcagcgtggagcgtggctatatggacccacatggcattcggctacacgcattcgctaggtgggcctcacaacagagcacacaggctggttcgagaccccgggcacgtttctacaaatcctaagaaaactccaaaaaaagacaaaataacccagaaataaaaatcgccgtggaggcgagtcgccgccggcaccgcccggcacggccttcttctccggcgaaggcggagctcgttacggggattccgcatccgttaatcggtcccaccggatccctcgccgcctcccacgggccgggccgcgccgtggcgcgcgcgcaggccgagatgcggaagaggatggagagcgtcgacgatctgatcgaggaggcaaagctgcgcaccgtctgatacaagtaaatcaatgtggacaaatgtgcccatgtcaatccttatacttgcatttctgcgatatctctccttcaaagtggagttccgttggagggaacaccctgtacgtaagcagacacatttgtctcaagcctcaaagagacagttgtctgcaaatgatcatcgcctttcgactgtaccaccagtctccagatggagaaggaaagttggttcaccttctgttgaggctgcttttgaaagtttcattgagaaaattttacgagactttgttttagacttgtggtactcagatattactcccgacagagaggcaccagaactgatacgtggcttagtacttcatgctcttggtgaattatcaggcagggtgaaagagatgaatctagttgacatgctaacaagggatatggttgatttgattggtaatcatttagatatttttcggaaaaatgaaattctaattggcgttgatgtcatgaggactttgtcttcagaggaaatagatgagagactgaagcagcacctaatagtttcacaggaacttcatccagcactgttatcttcagagcatgagtacaaggttcttcaagaaattgttgggggcattatggctctagtgttgagaccacaggatgctcagagtccgctagttcgctgtttctccagggaattgatgacctgcctaatcttgcagcctgttatgaacttcgcaagccctgtctacatcaatgagttggttgtctaccttctaaatgccaaagatacaggtagcgctggaggtacaaacatggctaatacaggaacagtaacactagtgccttacaaaggaggctcacaaggttgtcaaatggaatcaaggaatttgactgtagaaactagcggtttagttccaccaaataattctgggatgagatcacttgttacttctgaatgtggaaagtcaaaagtgtcagaggatgacaatgatggtaccatccaacctcgtcagccagactgggcggcggtattggatgcagctactaaaagaaggtcagaggttcttgcccctgagaatcttgagaacatgtgggcaattggaagaaattatcaaaagaaaatggttaaattagaccactcatcaagacagaaaggctctgaaggttcagataatagtacaagtgcaggggcagttggtaaagagctatcctctaacttcaacgacagaattgcatctgttgatgataaatacatggtcaatttgatgcaaagtaaaaataggaatgctcaatctaccttcgtcacaggtagtcatccacttgctctacaaaatatgaatgaagtgaaaccaaaagaggggagtcaagttaattttaccagcaaggaaaaaccacatgaaaccagcaacagagtaaaagcccaactaaaacggtgtaatagtactcctgatattgagaaaagatatttggcaaaaagtaaccagcccatggtttccagtgaaaggctaaatgtgaggataaatcaggatgagagaggtgttggtcctgcctcacatgttgaggtgctaatgcatgttccgaagataagatgtcgggttgttggtgcatattttgagaaacaaggttcaaaatcttttgcagtttattctattgtggtgactgatgcggataacaagagctggtttgtgaaaagaagataccggaattttgaacgtcttcatcgacaactgaaggagatacctaattattcattacatctgcctccaaagagttttctttcatctagcgttgatgattatcttgtgcaccaacggtgcattctcctggacaaatatcttcaagatctcttgtctatagctaatattgcagagcagcatgaagttttggattttctgagtgcatcctcaaagacttactctgctggaaagtcctcctctgttatgaaaaccttggctgttaatgttgatgatgcaatggatgacattgttcgacaatttaaaggagtttcagatggtttgaaacgggcggtcggcacatcaccttctagtgcaactgcccaatttgcagataataggatgtctctatcttggaaccaggaagagaaagataaccacaacttgcatcaaagaaacttggaaagggctcatagcctttcagatggtgatagtaactatgaagatcacatctcttctgtgaatagtggatgccattcagacaatgaggtcaataatagaggacatacttcaaatgatgttgagcacatcgaaacatgctctagtttggataaacaagccagcgaccaaataggaaaacctgcaaaggaatattctgattcttcaaacatgtcatctctaaatgcatttgaggatccaacaggaattcctcctgagtggatgccaacaaatgttagtgtgcctttattgaacctggttgacaaagtattccagctaaagcgacggggttggatacggagacaggttctttggatatcaaaacaaattttgcagttggtcatggaagatgcaattgatgaatggatcataagacaaatcaattggctccgaagagaagatgtcatcgtacaaggaatacattggattcaagataccctttggccaaatggtatattcttcaccaagttggatgaatataaagggaatgcaggcacaagtgaatttgacaagcagtcattagggagtcccacactggctgttggcaataaaaagggccgcacaagctcttttgaacttcatcttgaggcatccagaaatgccagtgaggtcaaaaaacttattttagatggaactccatcggccttggtcagcataattggatacaagcagtaccggcgcagcgcaagggacatgtactacttcctccaatccaacgtctgcatcaaacagctcgcatatgcaatgctagagcaggtcctcgtgacagtcttcccagagcttcgccagctaatagaagacatacatgagaaaggccgcaaagagcaagcctcattcacataccaactctgacccaagagaaaacatgctaattcagagaggagtcgcaacaattttgaacgcacttgcattgctccacggtgagttactgaaacacaaagcctttgcaattatattttgatgatgcataagttggattgaggaagtgcttggtgcttaagaatgatctgtacagatgtatatcagaggttatgtaaattatccccctgatgtagtcaaccagaacaacttacagtgagatcttgtaggtgttgaatgtaatgtatcattctttaattcccccccccccccccccccccaagaattaagttattctcccccctgacttatgctgaggcttgtaaagttttgaaagttccaagtgtatagctgtactgtttgtgttgctgagtaaatcaaaatgttgcgcgagatgccatctctgtttcccaatatttgtccggtcgcacactcaggaggcagaaggtatgtaaattttttaaccaaactaagtgattccttgttgttttggatgaaatataataacatactataatacccaaacagcgcaaattcacgtggata

SEQ ID NO: 23814 - DNA, 572 bp, Zea Mays
gcttgctaagtcagcttcttctgagcttcggctgtctgtatggatggatgatgtctataattttatgcgctcgcaaaagaggcgtcgacttctaagttcagacgttactcaagattttgatgcaatgagaaagcagctagtgtcagattctgcagcaatatttaggtcaaaagttccggagtcactgatggaaaatctcattaaacgcctgagatcatacttcgagggcaaacattcaccacatgagtagtttttcatgcagttcttcagaagctacttaaggcaacgcaccaccatccccaccgcttctctgtctagaatgtagaagatacttccttttctccttttgtaagatactatagctggcagattaaagcaagagtttatggtgtttttgaccctttacaaatgtattttttgccccgatcagtctcagttttggtcaatgttctgttacgggcagattcgatagcaacatttttctagattttctggtgtaatctccggaagcaaattgacttgagaatacaatcttttatcgttctgatggtaaattgatgtttgatcatgag

SEQ ID NO: 23815 - DNA, 1138 bp, Zea Mays
atagatcgcctgtgcaccctaagtccatccgtcacaacctcaagatgcccccggggaagaaggggccgcgagtcccacgacatcacgcagaacctactcctacagactatgagaaacagagggcaattacaatcatgaagaataatcaaatgatgcaacggttagggattcgtcaattacagtcaatgatggctagtattccaagtggaaggatgaacgataatgctcctcaggaatctggatcgttgtatgatggtgatgatattgaagactctgaggatgagatggaatccctagttgataagtcggtagccagccacatccccaacaatggtgctgaaatctcttcgaaaaatacaagagcctctaaaagggttgttgcacctggagtgcaagaacaaccaattagagttactaggcgaaggagtgctaccataaaccaagagtccaaccaaaatataatggctggtatattatctgattcttgtgatgccacaaaccaagattgcatccaacgcatatctactgttgtacaacctagttcaccaatagagaccgagagcgaagatcccaccggagaccaagaactagtaccaaggcaaagaagtatgggcaggcaacttgagtcattaagcagaggattaggcattaagattccaatccagattcgtgaagggaaaagaagaccagaggcacctatccaagctgccaaatttgcatcagagggtgggatcgcacttaggcagcacatgccgatattttcacattggaaggagtacaagaagaaagagaacgctggtaaaatagaaaactacattggaaagattgctggacaattcaccatggatgctgataatacagcagtgagagcagcatgtattgatatgctaaagggtggtcatcgctagatgaggtataacctaaaaaagaaatacttcaatgaggttcctgcaaatctagtgaggactacatcgcctgtttcgtgcatgactgatgaccaatggaaacttctagtagaaatgtggtctacctcaaagcacaaggacacatgtatgaagaacaaaattagtcgtgaacaagtaaagtttccacaaggcacaggctctcaatcctacattgcaaaggcatactcattgaa

SEQ ID NO: 23816 - DNA, 2349 bp, Zea Mays
atatattgttatatagattcatatgctcgttcgaccaaaaacggtcatcgattgcagttctatcttgtagatacaaatttacgcatttaaccgatgacttcttcctttttaattttttgtagctcacaggcatcacagctacagcctcagctagttggggcaaaccatcccgacgctttacaatgtacttaatgaggaccgcatgaagaagaaagctgataatggaaaaatgtcagaaatatttaagagcaaaattgtttcttcaaaacaatcaaaacaaaagatgcaagacttgtgttttgcactctctataagtctagttggttggaaaatcagaaattccacatcttagttattgatgaggcagcatacttaaaagaatgtgaatcattaatcccttttgcaactagtgggataaaacatgtggtgcttgttgggatgacaagcaactacaatcagtggtaaagagcacggtgtgtattcattataacttataagaccatttgaatgtatccttgattccttgtgttaccaataattatttatagactgctaatactttctctttactgataagattgctaaagagaacaggtttgggcgaagcctctttgagagattaagtggacttgatttcccaaagcacatgctaaatattcaatatagaatgcacccttccatcagcaagtttccaaatcaaaagttttatgaaggaaaaattatagatggtctcaacgttaaggactataacaatatttatctcgatggtcatatgtatggtccttattcattcatccatgttgaagttggtttcgaagaaaacaataaacagggcttaaaaatattgttgaagctgctgtggtagcaaatattgttggcagacttgctgaaggtaagtctaacatttgagctgataaagaacatgtaagtttcattaaagttgatatgtttaagtgacatccatgtttttttggtctataaccactacagcatgcgccgagcagaagaagaaaaccagcgttggtatagtatctccatatgcagcccaagtaatttctttgcaagaaagaattcagagttatgaaaagtatgactttctttctgttgaagtatgcactgttgattcatgtcaaggtgctgagaaggacattaatcctttcaacagttagacaaaataatggtgggaatatatactttcttgattgtgttatgagaactaatgtggctttgacaagagcaaagtaggttaacttttgttcctttttgttggtttaattaaattttgtttttttgttggcaaaggatcagcctttggatacttagttaattcaagatcccagtacatactcatctaaataattatttcttccacaggcactccatgtggatccttggacatgaaacgactcaccttgacagtaattcaacatggtctgattatgtcaaagacgcgaaggatcgtgaatgtttccttaaaactcgcgatgatgattttcttgctagaacaatggatcagtttagacttatgcaaaactcacaggtgacagacaatgtttcacgatggaacattgaatgccagtgtgctccagatgcacaactcacaggtgacaaccgtgccacaataccagacaaggcacaggttgtagagcctgcacatgcagagcaggtgcctgtgcagtcagaaagggctgtagagaagacatggcaggtgcgtcttgatcagctctcgctcagtccttcttttgctccaggtgaacaactaacagatgaaaaggttgtagagcctgcacatgcagagcaagtgcatcttgctcggctctcgcccagtccatcaagggagagggcccgtctcagtcagtttgctccaggtgctcaactcacagatgaagaagcggctacactagaggaagaagaccgtcctcaaattgaccttctagatggtttgccccaactagctgaggctgtagccaggacgcctgtcagatctgcaagcgatgggcgtttttggtccaacgagcatatggatctatacaacagtatttatagcaagaagaaatgtgctgacaacaaatggatcgattggaaaaatatcaaacgtttaccgaagatgccatatgttgagaaagcaagtcgtgacattagtcttcatgaattgatggctataaaacagaactggtatgaagagccgatcaaacagttctactccacattgtccataaatcaaagtaggacctcactgacttggatgacaggcataaataagaagattactgtcacaaagagattttgtcaaaaggttctccatgttccgtccgagcacaatattaagattaagcgccaattgatgga

SEQ ID NO: 23817 - DNA, 1510 bp, Zea Mays
gttttgctggcccacatcgtgcggcagccctggctggtcttccgtcttcctcgaaaccctgacgcggccgccacgccatgctcgccgcaagtcccctgcgccaagtgccgccgccgggcatcccatccacctcccgtcctactccctgaaggcatgaacccccgttccaagcgccctataccgccgccatctcccgttcccctttcctttgttctctttcgtctgctgggcaaaccaacgccgccagccactggtcgatcacttccagccaaggagtggcggacgcgcagggcttggagtgtggcggacaggcggatcctgtagcggcagagacaggtacggacgagagagatggtccttcccttgtccacctttatgaggctagccgacaaccaatgatgtttcgtgcccaatgcagccttgttgttgactgtggcttctctttcacccatgcatcccctgtacttcagaactttactcttaattatggtgttcggcgtatggaccttggcggcaaggcccttacaaactatctcaaggagctcgtctcataccgttcccttaatgttatggatgaaactctcctcattgatgatgcaaaggaaaagctatgttttgtctcgcttgatgtccctggtgatctacaccttgccagatgttcttatattctccctgatggtataacatacaagaaagggtttgtcaaggatatggatgaagcacttagatatcgcaccctgcctcaagtatcagatagcaaagaccatggtatggatacaaataagtccgaggatcggaaaaaggcagaattaagtcaaaatgaatttgtcttgacaaacgagaggttccttgtcccagagatgctttttcatcccattgatcttggcataaatcaagctgggcttgctgagtgtatagttcgtgctgtacaagcttgccatccatatcttcaacctgtgctttttgagagcatcatcttgacaggtggaagcacactgttccccagattcaccgaaagattggagagggaacttcggcctcttgtccctgacgactacaaggttaagataactcgtcaagagaacccaatttttggtgtctggagaggcggatctattctagcatcaagtcctgatttcgaatcaatgtgcataacgaagtctgagtacgaggagatgggatcagcacggtgccgacgaaggttttttcactgaacagaatactgagtttttggcgaagtagcttcagtgtaggtcaatcgcttaggagaagcgagtcttgtttgtaaatactggtgttgcatgtatttagtccagatgtttgacagtttggtggtatatgaattagaagtccggttaacagtaatcatttttactctgatttgacaactgtagctcgtgagattgaaatggcaaggtggttgaccggacccttgcgtatgacagtggctcgaaaattgaaatgcatgggcccttgtttggttttatgtgatccgaaagcgattgaggag

SEQ ID NO: 23818 - DNA, 3018 bp, Zea Mays
atgtgtcggtcttgtctgtcatcacttttttttactggtgtacttggcaagacttgaacaagatgtctctgccaaagaggtcttattgcttacagaaaagcaggcacacgaggcaacaaggaagactctcactgaagttcaggaaaaaagtgaagaacttctgaagaaaattcatgataatgataaacatattcttcagcttcagtttactatacagaggcttgaggaaaccacagttgcaaatgagaatttgctgttgagggagagggagcagaatgacacaacaacaaaagcgcacaatgaaagtcaagaaaaatatgaagaattactaaagaaatttattgatgttgacaggaaaatcgaccttcttcaaggtaccatagaaaggcttggagaaaatacaacagcaaaggattctctgttgctatcagagagacatgaaaaggctgctattaagaaagcacttactgaggctgaagagaaaaatgaagagttactgatgaaagttgaagatgctaatgaaaaaataggacaccttcaaactaagataaatatgcttgaagataatgtagccgcaaaagatgtttctttagaagctgcaatcaaggaaaatgacgcaaccaggaaatctcttactgaagctcaagagagaaatggtgaattactcaagaaaatcagtgacagtgactacaggatccatttacttcaagacacggtacaaaagcttcaagtagatgcaatatcaaggttgtcgtcttttgtaatggaaaaacaagaaagtgatattgcaaagagagccgttactgaagctcatgaaagaaatgaagatttactaaagagaaatgaggacctcctcaagaggaatgatgatttgattaagaaaattgaagactctagtaaaattgtcactcaacttcaggaagctctacaaagacttgaaggaaaagcatccaacttagaggttgagaaccaagttcttcgtcaacatgcaacttcaactccaccgtctactgctaaatctccagcttcacgctcaaagatctcaaggatccatagaagtccagagaatggccatattttgaatggtgacattaggcaaactgaaatgaagccctcaactggcacatcagcagcaattacctcagtagctaatgttcctgacttgggcgaccaaaaggagtttgaacatggagaaaaactgcaaagaataccaaaacagaaatatcagccttcccataaccagcagccccaagacgatcagcagtggctagtcacttgtatttcacaatatcttggattttctgggagcaaacctgttgcagctctccttatataccaatgtcttctccattggaaatcatttgaagccatgaagacgggtgtctttgatagcattttgcatgctataaactcagccacagaggttcaaaatgacatgagaacattggcgtattggttgtccaacttatctacattaacagttttccttcaacggtcattcaaaactactaggaccacaatctcaactccacaaaggagaagattttcgtccgagaggatgtttggaaatcaaacttcaaatgctgggcttgcttatctcagtggtcaatcagttggatctgctggattgctccaagttgaagcaaagtatcctgctttgctattcaaacagcagctcgtggatttaattgaaaaggtttatggcatgataagtgacagcgtgaagaaggaactaaaccctttgcttgaattgtgtatacaggatccacaaacttctcagtcaagtattgcaaaaggtaatcttaatggcatgggtcaacagaaccaactcacacattggctgggcatagtgaaaatcctcactagctacttggatgtactaagggaaaatcacgttccctcaattctggtgcataaacttttcactcaaatgttctcacttattgatgttcaattatttaaccgattacttttgcggcgtgagtgctgttcttttagtaacggggaatatatcagagctggactagctgaactaaaacattggtccgacaatgctacaagagagtttgcaggttcagcgtgggaggcattgaggcatattagacaagctgttgatttcctggtgatttctcttaagccaatgaggacattaagagagatacgcactgatgtgtgccctgccctcagtatacaacagctagagcgaatagttagtatgtactgggatgatgtgaatggtacaaacactatttcagcagagtttacatcaagcttgaaatctgccatacgtgatgaatccaatatggccacaaatttctctatactgctagatgatgattccagtatacctttttcacttgatgatattacaaagacattgccggtcattgagctggctgatgacgactttctgccatttgtccatgaaaacccaagctttgcgtttttattgcaaagaggggagtagtcttttttttttgtcaccattgtgacttcacctacctgtggataagtcaggattcctgctaggatgtacagtacgcgtgattctttttgtaccaggtagcaaggcatcaaagattagatgctaggtgagcttataggcttctggtttctattgatttgtttgttggttgtatatttgtattcaggttttccttgccattttttctacttgtagccgttttttgggcttgtatactaggtggtaagggcagaagaccctgccctgtaagcatagttacacaaggtcttgctgtaggtatggaagctgtacatgtgttgtaacggattataaaagggggaaagtagtgcgtagtgatggctttgtggttggtgtgttgcttacctttgatcaatgatcatgtattggttcgtcatatattgtttattgtactgcacaccattccattgtagataacatacacgctcaagacttgttctgggatgtcaaatgagtaatctgttacggtacagaaatgtcatgcttacttccagatcttctgtaatgaacacaaa

SEQ ID NO: 23819 - DNA, 3079 bp, Zea Mays
caggcacccagcagattttcgccgttcctgctagcatgtgtgtgtgtgtgttctccaaccatctccgaggatctcgtcagtcgtcacgaaatctccatggctggagcacgcgagaggccaggatatctcgccggagtaacaagggtagaaacatctccggcgtgccacgtgtcagccctttccacggcactacaatacacttatacaccccaggtccccagccgcgcccgcgctatataaagctcccgccccccattcccttcccctcctcccccagccccaggtagtagcttagctagcgtgataatcaccgcgctaaactgatcatatatacacagcaattggcgtgtgacaggacagaggaggagggggcaggctggtaatatctagcaaaagtacaagcgttcctccagtggcgtccagcgctatatagttcgctgtccggcgtcctttccgaccgagcgcgagcgatgacggtgacgccgaggattacggtgtgggatgggcggctggtggcgcacgggcggagcgtcctcgccggcgtgccggacaacatcgtgctcacgcacgcctccggggcggggctggtcgacggcgccttcgtcggcgccacggccgccgagcccagcagcatgcacgtcttcaccttcggcaccctccgggacctgcggttcgtgtgctgcttccggttcaagctgtggtggatgacccagcgcatgggcacctccggccgcgacgtcccgctggagacgcagttcatgctcctggagtgcggcccgggcgacggccacggcgacggcgacgcggcggtgtacgtggcgatgctgccgctgctggagggccagttccgggcggcgctgcagggcaacgaccgcgacgagctggagatcaccctcgagagcggggacaaggcggtgcagactgcgcaggggacctgcatgctgtacgtgcacgccgggaccaaccctttcgacaccatcactcaggcggtcaaggtggtggagagacacatgcagacgttccatcacagggagaagaaaaagctgccgtcgttcgtggactggttcggctggtgcacgtgggacgccttctacaccgacgtcaccgccgagagcgtcaagcaaggcctcaagagcttggcggacggcggcacgccgccgcggttcctgatcatcgacgacgggtggcagcagatcggcagcgagaacaaggaggagtccgccaacgccgtcgtccaggaaggggcgcagttcgccagtaggctgacggggatcaaggagaacgccaagttccagaagaagacgaagacgaaggagagcggcggcggcggcggcgagcagcaggcgcaaacgccgggcctgaagctgctggtggaggaggcgaagcgcgagcacggcgtcaggtacgtgtacgtgtggcacgccatggcggggtactggggcggcgtgaagccggcggcggaggggatggagcactacgagagcgcgctggcgtacccggtgcagtcgccgggtgtgatgggcaaccagccggacatcgtcatggactcgctgtccgtgctgggcctggggctggtgcacccgcgcagggcgctgagcttctacgacgagctgcactcgtacctcgcctcctgcggcgtcgacggcgtcaaggtggacgtgcagaacatcatcgagacgctcggcgccgggcacggcggccgggtcgcgctcacccgcgcctaccaccgcgcgctcgaggactccgtggcgcgcaacttccccgacaacggctgcatctcctgcatgtgccacaacaccgacatgctctacagcgcgcgccagaccgccgtcgtgcgcgcctccgacgacttctacccgcgggacccggcgtcgcacaccgtccacgtctcctccgtcgcctacaacaccctcttcctcggcgagttcatgcagcccgactgggacatgttccatagcctgcacccggcggcggactaccacggcgcggcgagggcaatcggcggctgcccgatatacgtcagcgacaagccaggcaaccacaacttcgagctgctcaagaagctggtgctccccgacggctccgtgctccgcgcgcagctcccgggccgccccacccgcgactgcctcttcgccgacccggcgcgcgacggcacgagcctgctcaagatctggaacgtgaacaagtgcacgggcgtggtgggcgtgttcaactgccagggcgccgggtggtgccgcgtcaccaagaagacccgggtgcacgacgcggcgccggggacgctgacggggtcggtccgcgccgacgacgtggacgtgatcgccggcctcgccggggacggctggggcggcgaggccgtcgtgtacgcctacaggtcaggggagctagtcaggctgccccagggcgccacactgccggtgacgctcaaggtgctggagttcgaggtgttccacgtctcccccgtcagggcggtcgcgccgggcgtgtcgttcgcgcccatcggcctgctcgacatgttcaactccggcggggcggtggagcagtgcgaggtccgtggcggcgcgaacgcggccgccgccgtcgcgctcagggtccgcggctgcggccgcttcggcgcgtactgctcgcggcggcccgcgaggtgcatgctggacgcgacggaggtggagttcagccacgacgctgatacggggctcgtcacgctccacatccccgtgccggagcaggagttctacagatggagcctggagatcgaagtctagaggtgctcccggcctgtcggatctgtggcaattgcctcccattcttcagtggattcaccattacacgcgtgcctcagtgtgtggttggcgtgtgtgcgacgtagggaggcgtgtggaacgcatgaaacgggcacgtacgccattgacgcgcctctcttcgtccctagaagaataagctaagcctctgttctaccttgctgcatcgacctgcttgcaataaactgctactatactccatgtgtatgcaatgtgacacaaacaaaaacacatctccagttccatgatacactgtactgttgactaattagacaaattccaaa

SEQ ID NO: 23820 - DNA, 1023 bp, Zea Mays
cggatgaccggagacgacctagagttgagtcggttccagcagcgcgtgaaactgaaaaagaaaagagaaacccgcaagccgcccgcgcagaccatcgccccgttgccacggtcaaattcgtcggcgtttggtgccgcggcgtgactgtccgccggtcgcggcgcgcgtcctgcctggttggatcccttcggacttccgcagattcccgcgcgggggtgtttgatttggatgagaggagcgcggcggcgggatggggaccccttcgcagggctcggcggccgtgacggcggcccgggtcgacctctgcgcgctcgacctcatgcctgtctttgccaaggagatgatcgccggcggcgtcgccggcgccttctccaaaaccgccatcgcgccgctcgagcgcgtcaagatattgctgcagaccagaacaaatgagtttgggtctcttggagttctcaaatcattgaagaaactgagacaacttgatggagtcatggggttttacaaaggaaatggtgccagtgtgatgagaattgttccttatgctgcattacatttcatggcatatgagcggtaccggtgttggattttgaataactgtccctcactgggaacagggcctttagtagatcttttagccggttcagcatcagggggaactgctgtattgtgtacttatcccttggatttggcccggactaagcttgcctttcaggtcaatagttcagatgaactcagcagagctttgaaaaggggaagtccccagccagcatatggaggaatcattgatgtctttagatgtgtttactcagaaggtggagtgcgggctctttaccgaggtgtaggtatagttattcccttcatatgtcatattatcattaattagtcaagcacatggaaatctctagtcagttcactaggcgcatcatattttagttgtctggatgaattttttacttgttgatgtagttatactgttcagagtttagtcagcacactagacgctataaacagtttagattcagg

SEQ ID NO: 23821 - DNA, 687 bp, Zea Mays
tcaggaccaccataagggataagattatccctcatgctgtttcctggttcactggtgaggctgttcaaggtgaggattttgctaacttgggtgatgatgaggatgacgacgataaggatgacgacgacgaagaagaggacgaggatgaggagggagaaagcaagccagcaaggaagttaggcttgcagttgaccagcaatatgtttagatatgggaattgaacctttcctcttgctaatacatcccatttctaattgtctcaacagttgggatccggtcacaaacagaaggaagtgttgcagggaaatgccgaacaaccagcgtagtgcaagcagcagtaaattggctggtggccattttttgcctgttgatgttggtgcttggttgatgcagtattttccattgatctggagcactctgctgcgttagtggatggaaatcggtttgcaacttgtctcctagtgatctcggggttttcgctacgtgcaatcggatgatattatatggttgtgtaattatctttgcactcagcagataatggcgctttatttgtcctaggtctatattggctatcttaaattgatttgtagttagcttagagcatctacaatcgaccacccaaatcagggggtctatttttgatttgatgcccactttttttcttgttggtctaaatttatgtttccg

SEQ ID NO: 23822 - DNA, 1377 bp, Zea Mays
agtgttttgggctgatctgcaaacttgcggtgaaattccggtttcggcttccgcggggtgggaatttggatagcgcggcgcaggaaaaatggcggcttccgctctccacctccgcctccacccctcgccgccggcgggtgtgaagcttcagcagcggaaactgcgctcgaaaatacagaggcagggtggcctatctcgaagattttcaaaagttgtgtcctattacggtctcacaaccccaccatataaactggatgctctggaaccttatatgagcaagaggacagttgaacttcactggggtaagcaccatcaagattacgtggatggcttgaataagcagttggctaccagccctctgtatggatacactctggaggatctgataaaagaagcttataacaatggcaatccattaccagagtataacaacgcagcacaggtctggaaccatcacttcttctgggaatcaatgcaaccagaaggtggtggcttacctgagggagtgaagagaaatgagagaaagctttcggttgttcatacacgaaatgctatctccccacttgcttttggtgacattccaatcatcagcctagacttgtgggagcacgcttactacttagactacaaggatgataagctaacatatgtcacaaactttatggaccatcttgtctcttggcatactgtcactctacgcatgatgcgtgcagagtcttttgtgaaccttggtgagccaaatatcccagaggcttgagctacagatacaccctagttatcatcgtgaggcattcttcggatacatcggatcaaatcctgctggaggaaccagagagttggaaaatctcatgtctcacaagaaatgcttatcaccccaatgtcatacacgccaagataagctgctgggatttcaccattgcccttggatattgctacaaggaaatcactagtcagcatccagtttgaagacatgcaacaaaacagctctagaagctatggagctggtagattctggagttggcagtgaggcagtgatccaacttgggctttgaagccatggtgctttctctagacggctattatttccatagtgttgttagaataatcctggttctgtgttttcataacttcatcatgctagggttctgttgtagcgtaacgcagaatggaacggaacaatattcttgttttactggttgagaaacctgttagttttggactgcagggaaatcttttacttgtatcagacgctgcaagcatggactttttttgtctggaaggaagttgaaacttctgaacttgaatgcaatactatagccatccaattccaaaacgtgcagaccttgagaaccgtgtaaccgtgtagtagtttattac

SEQ ID NO: 23823 - DNA, 1291 bp, Zea Mays
atcggcgtcgccatctccggagtgccacgcctaggagctattctctctagtactgcggcgacttcactccaagcctcccccttcagcgatcagcacacatcacgtaaagcgcaaccaaatgatttccaccaccgtcgctgctcaccccgccaccgtcacagcgctgcggcgaaggtacccgcttcgccctcgccagccactctgtgctccaatcttcacggcggcgacgaggcagtgcatggctacggcgaagccctcggtcacaaacgcgctcgctaacctatccgttgagagcgcccccgcggcgcttcccaagctttcgttcccgatactggtgaatagttgcactgggaaaatggggaaggctgttgctgaagcagctgtctcggctggtcttcacaaatgctgaactctattgcaaatttggtttgccatttgtaatgggcacaactggtggaaataggcaactcttgcacaaaactgtgcatgatgcgaatatctacgctgtgatatcccctcagatggggaagcaggttgttgcttttcttgctgccatggaaattatgtcagagcaatttcctggtgcattttcaggttacaagctggaggtcatggagtctcatcaagcaacaaaattggacatttctgggactgccaaggctgttatctcttgttttcagaagttgggtgtatcgtttgacatgaatgaggtaaagcaagttagggatcctgaggagcaggtaacgttagtgggtgtcccagaagaacatctcgggggccatgccttccacatgtaccatctcacttcgcctgatgggacagtttcgtttgagttccagcacaatgtatgtggccgttcaatatacgcagaaggaactgttgatgcagctatgtttctctacacaaagattcaatcgggtgcgagcaagaaattgtatgacatgattgatgtcttgagagaagggaacatgagatgaggtccatgttggcgtcagatgagctttcatgtaccaatttgcaagctcaattccaccgtgaattaggttacttttacaatgtacccttcccaatttaccagttaactcactttcagttttgaattggctgcttcaatgatggaaggtactccgttccagagtgtatgcaattttagtttctctaggtatattgattttggcgttttgctatacacctatatgcaatctatagattgtagtaaaaaaaatgtattcagaaaggccagaatgatctacaatttgaaacggagtaatgcttagggacttaatgcttt

SEQ ID NO: 23824 - DNA, 2529 bp, Zea Mays
gctttcatggctccagtttttgggaaaagaaggaaggcagccttcctctcccatcccaatgcggcctccttgctttcatgactcaccagtgcatcatcagcttcacatcccctctgatccctaaaaatacgagatggtttgtgattaactataattccattctgctgcagtacctccacctccttcggctcgcactcttctctcctcgctctcgcctgtccttccaaaattccaattcttcccatcttcttgtctctttcctccagaggccttgatgtgttatgccactacattagatgcttcctccagaagcttgccgacctgggctacaagaggagcgccaagaagtgcaaggagaagtttgagaacgtgcacaagtactacaagcgcacaaaggaaggccgcgccggcaggcaggacggcaagagctaccgcttcttcgaggagctggaggcgttgcacgcagccgcgccgcagccgccaccacagcacttgccggcagccagcaccgccccgcagttgcacgccctcgccgcgccagtatccccgacgccccagcagcagttgccggcatccagcgccgccccgccgttgcacgccttccccgcgccagtatccgcgccgccgccgttgagttcaatgccactgctgacagggccgatgcagccagcgcccatatcatcggcggccccagccccggcaccggtggatctgctcgtggcccaccagcccctcaacctgcaaggcttcagcttctcttccatgtcggactcggagtccgacgacgagtccgaggacgacgacatgacggcggagacaggcggaaaccaggaccgcctcggcaagcggaagcgcggcgacggcggcggcagcagcagcaacaagatgatgtctttcttcgaggggctcatgcagcaggtcgtcgacaggcaggaggaaatgcagcggcggttcctggagaccatggagaagcgggaggccgagcgcacggctcgggaggaggcgtggcgcaggcaggaggtcgcccgcctcaaccgcgagcaggagcagctcgctcaggagcgcgccgccgcggcctccagggacgccgccatcatcgccttcctccagcgcatcggcgggcagtccgtgcagccccctgctaccgccgttgttgtcccaatgccagcaccggtgtcagtccataccacgccgccgaaacaaccttctcgccagcagcagcaaccgccgccgccgtcgccccaggccggccaggcgacaccgcagtcgaagccaatctcagccgcgccgctccagcagcaaccgccacagcagcaaccgaaggatacgtcgcagcaggacgccggcacgccgcgcagcttgcccccggcgtctagccagtcactcgagctggtgcccgtcgccgccacggagcaccacgtcgattccgggctaggaggaggggatggaggtgcggcgtcgtcatcgcggtggcccaagaccgaggtgcacgcgctcatccagctgcgcatggacctggacatgcgctaccaggagacaggtcccaagggtcctctctgggaggatatttcgtccgggatgcggcggctgggatacaaccggagctccaagcggtgcaaggagaagtgggagaacatcaacaagtactacaagaaggtgaaggagagcaacaagaagcggcccgaggactccaagacctgcccatacttccaccagctcgaggccatctacaacagaaagcacctccgcagcctcacaaccgcggccacatcgtccgccgccgccgctcctcgtcccgcctacccagatcagctgaacccgagcaggcaagagatagaggggaagaacatcaacgatgacaagaggaacaacggtggatcaggtggaggcacgcaggtgccgaccagcaatggcgagacagcgacgacgacgacgacgacgacgctcgtcgcgttcgacgccgacaccggcatgaagaagaagacatcgtcagggagttgaacgagcacccgcgtcgggagttcacgacggaggacgagacggacagcgacgacatgggcgacgagtacaccgacgacggcgaggaaggcgaagacgacggcaaaatgcagtacaggatacagttccagaggccgaacccgggcggcaccaacaccgcgccagcaccggcagcagcgacgacggctgcgccagcggtgccgacttcggctccgaccagcaccttcctcgccatggttcaataggggcgcgggcggcacccctctcaaaccttactcccttcccgggacggcagtatacaagtttgtataagagtatacaagaattacagacagttcaagcaacctggagcttgcggaggtgagaaggtgtttttgccgttgggaatctacattttttttgtcgatcctttttcttttaacagtggatataattaaatcctgttacttgttacagtgtacattaatcgtgttgttattccagtactctgccctttgtggcaaatatacatgagcagttttaccgttgcca

SEQ ID NO: 23825 - DNA, 1183 bp, Zea Mays
gattactggagaagtatctaatgattgtgtttcaacgtgtaaaccacttattaattcgctaaggagagagagaattgcagaaaggatgagggcattgcaggaattagtccccaacacaaacaagacagatagggcagccatgctagatgagatccttgattatgtgaagtttcttaggcttcaagtaaaggttctgagtatgagcagactgggcggtgctggcgcggttgcgcagctggttgctgatattccactctcagttaagggcgaggcaggcgacggcgggggggcgccgcagcagcagcagcagcagcacgtgtgggagaagtggtcgacggacggcacggagaagcaggtggcgaagctgatggaggaggacatcggggcggcaatgcagttcctccagtccaaggcgctgtgcatgatgccggtctcgctcgcgatggcgatctacgacacccagcaccccctggacggccacggccactcgctgaagcccgagcccaacgcgtcatcctagtacagtaacgtcgtccttagcgtgccttccaattccaacacccaccccccttctccctaaaaagtactgttaggcgccgatattatccggaagaaaaaaagaagtgtatgatataccgagcgtgcgtttccagtgtgctgacccgtgggataggaaaggaccgaaaattgttggtatatgatgattatgtagcctcctgtttgcctgttctgtttcaaatcaaagcaatgctcatgcatccaggtttcaatgtgcctatgagtgcaagtgatgggcagcagagagtctggcactgctctcatgctgcctgtttccctttgggcggtgtagtgcactggccatagacttgggtgggtggtggtagggccgcccgccggtcgccccttttggtagtgggtgtttggaccaatggaaagaggctgctgatgtatgtgctggtaattctgagcgagcaaacggttgacgaaatctgaaagaatgtggtggtggtggtggtgggtggtgatagcttgtctttttattttattttaaaaaaaatagagtgggagcggaggtctgggtcaatggaggcccgagcgtgcgatgatcggctgggcgctagtggggagcgtgctcctccgggtcttggcttttctgcctacaagtcgccgtcttgataagaac

SEQ ID NO: 23826 - DNA, 2606 bp, Zea Mays
ccgccgacagcttggggatggtgagtcaataaaggaacttcctggttctgttaatgtcccatctacatctgactttagcgtgtctgctcctttgtcaaacatccctggttcagaaaatgagttcaaacaagaccagcgacctcttgcacggggtgctgactttattcgaggtggtcctgctaatgattggattgagtcttttcggcctccgagggttcctcaacttggtgtagaagcacaatttccagattttgagcaaatttataacaatgcagggacaacctttcagtttcagccgccattggatggtccaccacaaagagtgttgtccggtgtcttgcattcctttctcacaagtggcccagctggtgtgccatttcaaccacttccggtaccagctgctcttggtttatctgaaagcgacaaacaatgcattcgtgatcgtagctgcataatggcacggcatattttttctgaccaaccagaagaatatatacagagtcaggtcaatactttgctgcattcgcttgatattgacaaccgtatgagaggacctatgcatgggcaatacccagaactacaggagtactggaagcagtcccaaagttctacgcgtcctgccccaatgcataatgctgctgataaatggattactgagtttggcaagcaaaataataatccagaaaattgggcgaactctttcgaacaacaatatggccccaatgggtgggcctctgagtttgaacagcatcagtctcagatggccatgcgccagatgggaggagcgaacatggccaacctggctgctatggagcaatcccgagtgcttgcacaaactttagcaagtaataatgatcccaagtttcagaattctaagttcttccagtttgtttcaaagatgagccgaggtgaacttattatagaagataatcaagtaaaagaaggttcagcatcccaatccagtggctgggctgatgaatttcaaacaccgtacattgctaatgcaaactcatgggcagatcagtttgcacatgaagagctttcacaaggggcggataagtgggttagcgagttctctagtcaacctaatcatggtgcactaaatgagaactgggttgatgagttctcgaaattaaatgttactgacgaatgggcagaggaattcagtggaggtggttttggcgaaagctctgctgatccatgggtagatgagttccaagaacacttgtcatctttcaaacaaagtccgggcgcctctcgaggggtttatgttttttctgagaacaacccgtatgttggtcaccctaatccaatgcaggaaggacaggagctcttccgcaagggcctcttaagtgaagctgttcttgctttagaggctgaagttttgaagaatcctgataacacagaaggttggaggttgttaggcgtaacacatgcagaaaatgatgatgaccaacaggccattgcagcaatgatgcgtgcgttggaagctaatccaacaaaccttgaagttcttcttgctcttggtgttagtcacacaaatgaattggagcagggggaagcattaagatatctttataggtggcttcagaatcaaccaaaatatggtggccttgtccctctgcagtcaactgattcaccttatggtcctgatgttgttagattgtttaatgaagctgctcagatgtcacctgaagatgcagatgttcatatagttctgggagtcttatacaacctatcaagagagtatgataaagctatagcttcatttaagacagcactacagctcaaaccacaggactattcactctggaacaagcttggtgcaacccaagcaaacagcatccagagtgctgatgcaatattggcgtatcagcaggctctggacttgaaacccaactacgtgcgtgcatgggcgaatatgggaatcagctatgccaaccagggtttgtatgaggattccattcgatactatgtaagggcagttgcaatgaacccaaaagctgacaatgcctggcagtacctgaggatctctcttagcaatgcttcgcgagcggacatgattgctgcatgcgacgcccgcaaccttgacgctcttcagaaagagtttcctctgtgagccctccggtccaaggcattagagcttccatggaaggaagcagcacactagcaagccgagtgactgcacctgtggtcatggaaatggaattggaaaccagtagcgttttgtatttgcctgttgattcttatatttatttttaggaagtgggggaatgtgtagcaactaggaagcgagggaacaacatccagttgatgtgaagcattcatggcacagtaggcaatagtggcaaaggggtactatacatacacacttacgggacgcacaacataaataaagaatggttgattaataaactatttattttggggacacacccctaggatcaacccctacttgtttcgagtttgaatactgatttgtatcaacaggcaataaataatgcgctttgtaaccttttatatcataatgtaatgcgcacgcccaaatcagttgtgtctaagaaaaaacttgacaaaatgaagtaacaaaaagaggaacttctgtg

SEQ ID NO: 23827 - DNA, 695 bp, Zea Mays
gtcgatggccctcatgaaaatcacaaattgagagagggagaagggggtgggggttacgtaacacggcgattcaggaggggatagcatcgtcatcgcaaaatgcaggctctcctgctccccgcgcgggccgcgccgccgacgccggcgatgcttcggcagcgtgcggtttctgcctccgcgtgtgcgtcgcaggtctgccgccccctattcggtgccgccagttgcatctcctgtggggtccacggaagcgttcggcggcacctcacagtggcggtggcggcggccccgccctcgccttcgtcctcaccttcgtcgggaccgctctacccgacgcctccacccaccgagcaggaggtggagagggtcaagctcgagcaggttatgaggagactagagaaaacagcaagtcttctggtcatttggttacatccgtctctctgaaaggcttagaaaaacatccaaagaacctgctaaggctcctccacgtgctgatgttgttaagagccttaaaaatggcatcgtggttaatattcttgggatgggcgctgctgttctcggcatgcaagctactgttggtgctttggtagcaaaagctctcacaacctctgcagtaccctattatcaggctgctggccaaagccctgtcttggctttagatgttttcctagttcagccgaaggtcctgttagaaagaa

SEQ ID NO: 23828 - DNA, 1418 bp, Zea Mays
gtaatgcaatggaacttctatgcacttgtattttttttccagaagtcacactgaaatgctatatgtagaggcctagagggggttgttaaatgtgtttgactgtatgactgctagctcgatgtgatccattggttattctttgactgtttgtagatgtggtgcaacttaaaaccacttccaggagctaatcgactgataaaacatttaaagactaacggggtgcctactgctttggcttcaaactcaccaagatgtaacatagaagccaaaattttcttccaacaagggtggaaagagtctttctctgcaattgttggtggagatgaagtagagaaggggaagccatccccgaatatatttttggaagctgcaaagagaatgaactgtgctccttcaaattgcttagtaatagaggattccttgtgttacaggtggaaaagctgcagaaatgcatgtcatagctgtaccttcaatacccaaaaagactgctgagttcagttctgctgatgaggtgatcaattccctccttgatgtgaggcctgaaaagtgggggttgccaccatttaatgattggattgaaggtaccttaccaatagaaccatggtttattggtgggcctgtgatcaaaggatttggccgtggttctaaagtactaggaataccaacagcaaatttacccgcggagaatttttccgacgtagtgtcagaacatacatcaggggtatactttggctgggcaggactttcaacgcgtggtatatataagatggttatgagcattggctggaacccatatttcgacaataccgagaagacagtagaaccttggctgcttcataatttcggcgaggacttctatggcgaggaggtgcgccttgccatcgttggctacataagacctgaggccaactttccttcgctcgagagcttgatagagagaattcacgaggatggaagagtagcagagaaggcactagacctgccaatgtatgccaagtacaaagactcgccttatctgagaaacccttcgaagcacgggagtagtactaccggtgggacccagtctgagatggattccaagtgacaacccccctacagggccactagataatatgttacttattttctctatggtaaatgcgtcggtgttgatgcagaaacaattggactctctgtgagctaactcgcttcttaattttcggaagtagatagtattcctcgaagtggtgtttttactttgtaatatagaaaaaaataaagtggggttgttgaaacttgagagtcaaattccgagacgttatgcacgttttgatttctgaattaatcgattggtatcacttgtactgtttttatacgatgatgcttgaaccattcatttgtcattttaatttgatatacttgaagtcaacaatatgctt

SEQ ID NO: 23829 - DNA, 1340 bp, Zea Mays
ctccagccagcaggtagcagccagcaggttcctgctgtactttttactgaattactgcaaccaagatactatagtgacttcactcgttcttgcaacggaagcagcaaaggttatttgtgcaatcattttattgattgcagacggtagtctgaaaaaacagttcagtaattggaccctcattggatcactgactgcgtctggactgcctgctgctatctatgcccttcagaatagtctgctgcaagtatcattcaagaatctggattccttgaccttttcaatccttaaccagactaagcttttgtggacatcatttttcacatttcttattttggggcaaaagcaatcatccaagcaaattttagcattggccctcttaattagtgccgctgttcttttaagtgttggggagagtactagcaaaggttcaaatggtggtggctctgactatatcttgctatatgggatcattccggttacagtcgcttctatgctgtctggtttggcctcttcattatgtcagtgggcatctcaggttaaaaagcatacctcttacatgatgactatagaaatgtcatttattggaagtgtgtgcttgttagcaagtacctatcggtcaccagatggagaagccataaggaaatatggggttttccatgaatggactttctggaccatggtaccggtattaatgaatgccgtgggtggaattcttgttggtcttgtcacaacttacgcaggtggtattagaaagggttttgttatagtctcagctctccttgtaactgcactgctacaattcgtgtatgatgggaagccaccatcactctactgcctgatggcattaccacttgttgcgacaagcatattcatctaccagaagtatccatatgtggataagaagaagaaagtctgatgcacataattgtcagagatgggaagtatcatcagcaggatgtaatgctaaccttattttgtccacaaggctggaatttgcaccgtcaagtgggccagatgtgactcttgaagagttgcctgttcgtgaatctattttcaattatctactgatctagatatataattaaattagcagtacagtagcctggaatcagtttcagcaggcagttgacatgcttgcatgtaacatctggaaggaggtttcatattaatggtgtttacttgcacagcatgatgaacctactgtgtctgcctttcatggattgttatttatagactgatttgtgaattttgaatatgttatttatgatgacagaaactaagaactaattattttgcgtcaatccttctcattcggaatctgcactatgttagttgtcata

SEQ ID NO: 23830 - DNA, 5386 bp, Zea Mays
cgatgcggcatcatgggtgctgcggacggcgccaccaacgtgtgcttggtaggcggcgatggcgacaactgcaagtacggcaccagcctgcagcgcatctcagatctcggatttttttgccatcaatcagcaagcgcggcaggagggagcagagccggagatggggcggtgctggtgctgctgccggtacctaaagctgctatgcttggttctcctcccaccgctcaacttatgcctgcaccacagctgctgctccaatctgtccccattctcaccgccgaagattcgctccattttctatggcacctagagttggccttcaggggaagaccgctccacaggccaagaagtcgtggggttccgagattgccagtagcggtggccggagctcctccgatgtttccacgccatatgctacgacgtcttgtgcttccacgccggatgccacaatagacaagcatattaagactgtcatgtctctcaatctctgcccatacttgaagccaatctggctgatcacaaaagacagtcatcaccctttaccgcacgtagcagcccagtattcgagattaaatcctgaatttgattgttaaaagatatcatcatatcaacgaagctaggccacaagactagcctgatacactgtgatgcctgcaccacttaaggtactactttcctgaagaaagtcaatttgctgacaatgcaatgaccattcccttgcctattcacatggagaaacttgatgttcatatagaaataaatatttctagacacttcaagtaataaaaatacaaaacaacttaagactacgtatgaatggctcaaaataatcattagtcacaaagctgaaaatacaccgtgacctaacttttttaattgtggtctcacagtttgatgtatatagtgcaaaatttctttcaatctttgcttacttcaacttctttctataaagtggacataatctaactttccaggcacatgccctagaagatgagatcttttcttcattgcatgaattcttgagaacctttatttgaattctagtgttaatttcttttcaattgattttctccctgctgatatacatgcttataaagaaaaataaaattatttctttttcacttatatatgtttaaccttttcatgagagcagctttatatattcacgatttcttgttgggttgccaacgttatgtttatattgaccaactttattaggacactgcattctggtatttggcacttaacagttccactttgcaggaagaaaggttcagattgtgagacaaaggatatatgtaccatatcactgctcctctatcaagcatcagttctcattatgtatatagttttaccattatgacatccattttccttatcaaatgaatatccattttatccctaggaagaatgggataactgttagtattaattaggtatgtgatattcgtgaaaggcactgtgactttactacatgaatatgctcaaatcactttaatataaaacccttcatataacacatggtaacagaactgttacttatatttcctctaaccattctagacgatttaccctacaatctttcagttccttcattaatacttttcttttcaattcatgcctgtgttcttatacaacacacaaatgactacttatgttttatagctccgtctagtttagaatcgtagaatttcctgcccgtgcaagcattagattgttttttggattggttaactaacagttatcgataattatttgttgtagtcactgttgttttcttttttcctttttttacttgattcaaggactgctagtggccgaagggcactgcctcctccttttgcttttacgtgctgcaagaccattgttatgtatttcatgtttattattacttcgaatacggctagaatacaatgttttaacaaggtatggtgatggattactctcggttgttgattaatcttgtagcacgtcctttactaaatattgtgtttaaatggcgaaggatgatggagatacaatgaacacgaaagtcattattatttttagccttggcgctatatgtttgttagcagaggttacatgattcttctttcggaataggcggaaaaatgagagccttcactgttgtttatttagtagaggttgagatcgtatttcaaattattaagaacactattgttttagattctttcacatattcatacgtttgaaaaaaaaccgcattctccatgatgttttggtcatagagaatgtaataaaagtccattaaatagcattgatactcccatactatagtattttcctttgtgttgaggattaatgcaaccacagtgttgtggtttgaacactaatcgagaaggcctctttactgttgtctaggtcagttataactttcatatatgtgcttccatacactttaatgttagtagtacaattgctgttagcagattaaaaacttagttaaacatatgcgtactcacatatttattatttctctttacatcaaggattcccatggacatgtggttgtccattacacagatgttgatacaaatgttcagctcctttttaggtaccgttgctcatgttgcagcccgaggttgtagctacacaggaacacaaattcagatagggataagtccgggcgcaaaaaagcgggaaacaaagcgaagttggggcggcgagacgcgagacgcgagacgcgagacgcgagaaatggcggagccgcctttggccgccggctgcacgacaaactggaggagggaggcggatgagcggctgcggcgcctccactccctcctcttcggcgccgacgccgcactcgagcacggggacgccacggtggcgcaggcgctcgcgctccgcctcctcggcttcctcgactctcaggcgctagccgcaggcgcgggccccgaggacgccgccttcgtcgcgcccattcgcaccgcggcttccgctcggctagccgccgcctcacgcgcccgcgcctctgactccgaccgtgcagcttttgagcttgcaagaacggatgttggctgtgtttttgcaaatcagggtgacaataatgttgaaagaatccagcgttcgaagtatttccaagctcttcttcagaagtctaaagcaaatgtttctgaacaacggaatgcaacatgtcaagagttctcagttcaatgggctccatgcgtcgatgaaagccaagctgaaatggaaaatgagaagctaagcatcagggcttcaaagttaatgatgcaaacgaagttgacatcattgtatagcaaacaagtcaaaatagtaacaggcggcatgcttacctggacgttgaggaggatgagaaatcccatgggcaattgcagaatgcaaagtggaaacatacagggttcagaagtcctatatttgaggttgcaaattctccatcaagtaatgatgaagctgatgctcctgccaatgagtttacgactgccaagagaatgatggggttggatgttgtgcaaaagccagcacaaaatggtccacaaggtgcttctgtatcaccacaatgtgataacaactatagtacacggaattatggcgtgagaccaagttggaattctcgtcgtggaccacgtggtagttttataccccctatcagaaacaatggaggatcaggtacaacgatctcacgggtcactggtaaaaatgacgagtccatggaagattcaacaaggaaatgtattgaaatgctttgtgctcctgatggtgagcttcctgagaagctgaggaatctagaacctcgccttattgaacatgtcagtaatgaaataatggatagggatcctaatgtccgctggaatgacatagctggtttggaacatgcaaagaagtgtgtgacagagatggtgatatggccactgctacgtcctgatatattccgtggttgtcggtctcctggaagaggtctactgttgtttggacctcctggaacaggcaaaaccatgattggaaaggcaatagctggtgaagccaaggcaacatttttctacatatctgctagttcactaacaagcaaatggattggtgagggtgaaaaacttgttcgggcactttttggtgtggccagttgtcgtcaacctgctgtcatatttgtggatgagatagactcattattatctcagcgcaaatcagatggtgaacatgaatcaagcaggagactgaaaacacagtttctaattgagatggaaggttttgacaccggaaatgaacagatcttacttataggagcaacaaacagaccccaggaactggatgaagcagcgcgcaggcgactcacgaaacgtctatacatcccccttccttcattagaagcacgggcttggataattcgcaatctattggagaaagatggacttttcatgctctcggaagaagaaacaagtgccatctgtaaattaactgaaggctactcaggatctgacatgaaaaacttggtgaaagatgcctcaatgggaccactaagagaggctcttcagacgggcgttgaaatcgcaaagctcagcaaggaggatatgcggccagtgatgctgaaggatttcgagaatgctatgcgggaggtaagaccttctgtttcctcaagcgagctggggacttatgaagaatggaacaggcagtttgggagcctatcgatctagtctgtcggcaggcatcaacgaatacaatcatgtcggcactatagaaaaaggagctcaacgattttagccggaacatgacatgcataacacagctctacagtttaacaatcttttgaagcatcaaaatttgaactgtctatttggagtgctgagtaatatccaggagcctacatatcaaatagtttcaattgtttttaaatcttcacttttctgtaaatttgtttgccttggttttgattgacatatgactagcgcggaagtcaaatactccgttccaaattataaaatgttttagcttttccgcatacagttttttagatgaataaaaaaattaatgtatctataaaaagcaatatgtaaagagatggtacaacattgacaacaaagaagaagatttgtgggtccaactcagacctagaccgtcttcatgggtagtgtaaaatagagaatgcggaactgtagatgatattgtttgatactgtttgtaaagtaaagtttgtttgatactgtttgtaaagtaaagtttgatatataggatgagataggagattggataatagatctgctagagataaccttctcatgctctcgaggatcgaaatagataatgttccatgggatcgaaatagataacgaagaggactcatcttacaagggttgtatctttgtaatagcagtatgtcttgaattataagggattttatgtaaatattgaaata

SEQ ID NO: 23831 - DNA, 1751 bp, Zea Mays
ctaaaacttccacttgttctagccgtcacggcgctaccagttctctgccgcatctctctgttcctctgtttcttcctcttctctaatacattccactagtaatctgttaacacttcgtcatgaagttcggcggctcgtcgctcgcgtcagccgagcggatgcaggaggtggccgacctcatccttagcttcctcggcgagatgcccgtcgtcgtcctctccgccatggggaagaccaccaataacctcctcctaggaccctccatttctagctctcagcgcctgggtcggggtgctcgattctttcgcttactagctaacaaggctagatgtgcgtgtgcctgattcgttgtctgtgtaggccggagagaaggcagtgagctgcggtggaggaggggcgtccgaaatccctgagctcgctgtcatcagggagctgaatcttaggacaattgatgagctcggtttagataagtcgatagtttcaggtatgttgttgtttgctccactctgctcttggaacgcctcagctgttcctcttgctctatcatgaatgcttctgttatacaatgggatgtcgttctcttggatgtgccaaagttttctctccccttagtctgaataacaattcctggtggatgtatgtatgtatgtattctcttggatgtgcgaaagttttccccttggatgtgcgaaacacatttactcctcactgcaatccacgcctccactctcgacccctcctccttcctcctctccctagggaccgttctccccaacacgcaggggtagcgtaggaggtgttgtggcggcattatctaggaagcggtctgtggacgtgaggcggatcaacccgaaggtgcctaaggaggaggctgtcaccatctccggtcgactcgtccagatcctctccgaccatgggcccctcaccatcggcaacacctggaacaacaccaaggtacccaatcaaccagtcagtcaagcagagtggcaaaagccggggagcgatgcaggcgtcggagcagcaacaacggaggactctgctggtgtagatgagaaggaaacacacaaagagcatcaaaagcaagttcaacgatcttatgtcaacccatccacctctgaatgaggcatattcagatgtgtgtgtattcagaactcaagaagctcaagcacaagaagtgcctcgtccagtccccccaactccttcatggtccaattcgcttgtggcataggaatcccatcctagattcaatagaggggttgcaatgccggcatcgccatagctggaaatcgagcactgacggacaccgagcgccgagatgggccgtcttgtccaccgccgcaagaaccgcatgcgttggatccatccttacacctgctcctacttccgcgccagcagcccaacactccgacgacacgagctcctccctataaaagtgacatctttactgtatagataacgaatggttatagttatttattcttatgtccaagtggtattggatttttttagcttgggattaaagaaaagacaatcatgtactttgcatcttttttgtatttatgttttatgctaaattgtggaataacactatattagttgttagcaaagaatttgtgagatattaaggttgatgataatatatgttgttatttcatttaatcattgtgtattaatattttatcgaataatttgtgtaccgtcgcaacgcacgggcactatactagtagagtcctaaaatccatccacctgcc

SEQ ID NO: 23832 - DNA, 1997 bp, Zea Mays
taattagttaaaacggaaccggtgaaaagaaaggccaaacaaacaaggagcttccaactttcttcctcgctctttctctctctccgtgcgtctgcggtctgccatcggcatcgcccccaccccaccaccacacgtccacctctcccgcaattgggaatttctcctcaccgcctcgtctctgccgggctcgctcgatcgccttcggatcctgtgccaaccagagcgagccccagcccatttggaacgccgtcgcggggttcgacccgcaggtgttcgtctggctcggggacaacgtctacggcgacaacaagcgcccattccgggtcttcgggagggagcgcaccgtggggccctggaagaacgtgccgcgcttctacccttccaccgaggaggagctgcggaggcggtaccagctcgccagggcgcagcccgggtacgccaggctcagggagagggctcaggttcttggaacatgggatgaccatgattatggattgaatgatgcaggaaaagaacttagtgggaaagtgattgctcaaaggcttatgttagatttcttggatgaacctgaagacagtaaacggaggaaacaagctggtgtttatgcctcatacatgtttggccctgaaggaaaacgtgtgaaggtaatcttgctggataccagatatcacagagacccgctattaagtgatggaactattctgggagatccccagtggcagtggctagagagggagcttcatggtccacaatcagagatcaccatcattggatcttcgatccaggtagtgtctaatctttcagccactactgggcctttgttctatgtggagtcctgggcacgcttcccgagggagagagaaaggctgttcagattgattgatagtagtaagagacctggagtgctatttattagtggggatgtccatttcggagaaatcaccagattcgattgtggagctgaatacccatcatatgatgttacttcgagtggtcttacccaatctgtcgagaactctgtgccagaagtgtttcaacctcttatgagacttctggcaatactaacaccaactaccatgcgagttttgagcccaaattgccaatataaatcatgtacaataggccaaccaaattttggagcgattgaaattgattggaacgctgtacctccgcggattaaacttgaactaagagatgttgagggtcattctgttcacagcgtagagttccctatatctgaactgcagccctcggaagcgcatgcaatcaaaagacaaacccatactttccaacgtcactgtactctcgaaacagagctcccatggctaacacgataccggcttgctctgatgctgtttgtcatcatagctgtttttgcggtggttgtggtgatgctagcgatcgcctgcttgtcaaactttaccaagtccagtaagaaaagcaagaaggaatagctgtgagctgcagaggagaaacgaagattcggtccagctataagctggatttcacactgaccagggatcacatatctcaaaccatgcctttgagcaggcaagagccagattgcaccacagtatcaagcagtacactgcgttgtgcaatttgcaaagcgcagattggataaatagatatgatagctaacaaataacttacaaccatgtgcctgcctcgtacagcttcgctttttgttttccgtcttcatgccttccgccctgtttttgttttctggtaagcattacattgactaagaaaaatcttggcggtggaagtgtcccacaagtcagctaactagtctgctgtgtgcctcctcgcacacggatggcatccctggtgctctcggttaattgcagtgtactcagacacgcgttcacatgtaccctgctagggccaatacggcctccagtctcgaaatagaactgatgtgaaacacgtgagcgacggtttatcttcgtatcgcatctatattcatatttaacattaaggactcgtttggtttg

SEQ ID NO: 23833 - DNA, 350 bp, Zea Mays
cctaaatccgcagacccttggggaggctgtcttgaaggttaaggtaccgtctttgtagacttggctggagaaattggttgtttctatgatgaagactaagacgagtaggagcttacagaagtctgggagaggtaatcaggtccaaggagaagggccaaactgggttcttgttgctgggggttttttgcttagcgcgctttcagtcaagattgggtgcaaactaaagcagtggttcaatgggaagcagcaaaataatacttccaaagctaaaagaagacctgaagcatgcgagctgcactcagacctctaccggttcagtgaccaaactggctgttgctactctgtttctt

SEQ ID NO: 23834 - DNA, 947 bp, Zea Mays
gagctaccaaaccctaacttatgctatttggttacctgcatccggatctgatctagtagttactagtgcaacctagtggtgtgttcgggaacgtttccgagggcgggcggcggcccccagtggcgaagatgatccgactaccgacgtacgcagcaggaggcgtccgttgccatcttcttctcctttgagtatatgatactagcaacatccacagtatcaacattcgtgaagtatatattctatgttagtgacatgctaatggaaggtcaatgggagaaaaaggcagtgtatacattttacttggttcgtgagctatatgtgacttttcgcaacttcagaattcgcattgcagattatgtgcgctacagaaagatcacttccaacatgaatgaacgctttccagatgctacatcagaagagctcgatgtgagtgatgctacatgtattatttgccgtgaggaaatggctacagcaaagaaactgctcgatgggcatctgttccatgtgcattgtctaaggagaacaggctgaagaagaggttcctctacggcttctccatgggagcttcagctccacaggaaggattctctctactgggacggtgccgtgctgcttgccccaatgtgcaagggttattgtatattaacaaccaacagtagtgtcgaaggagcacaagatgatgtgtgagcacaaagtggccagcaagaatggagtcatggaacatcggcaggaggggtgcgacagcggcaaccgatgtatcccttggacaatctggttttgacatgatgcaaatcaatgtgctgtacattgtattctgcacttgcacagattgtttggctaattacaggattatctcaatgttttggtttggatttaaagtacacttatgtatgaaatatttattggtactcatctatattatattaattatattattattaaatata

SEQ ID NO: 23835 - DNA, 2055 bp, Zea Mays
agggagaactatgggcttgttactttccgcgaagtggctttgctttttgatgaggagtcttcaatggaatccagcaaacagagtattgcaattactgtagcacatgagctggctcatcagtggtttggcaatcttgtaaccatggagtggtggacccacttgtggctaaatgaaggttttgctacatggatgagtaatctagctgtaaattctttctttccgcaatggaatatctggacacaatttcttgatgacacaaccgctggtctcaaattggattcacttgaagagtctcaccctattgagaaagcgttggcttcatatataagaaaatttgcctactcaaatgctaaaaccgaggacctttgggctgttcttgaagagaattctggtgaacctatcaagaatatgatgactacatggacaaagcaacaagggtaccctgttattaatgcaaagcttcaagggaattatctggaacttgaacaggcacagtttttgttagatgggtcctctggccccagaatgtggattgttcctataactgcagactgtggttcatattatacacagaaaaaaattctactgaaaggcaaaagtgataggctggatataagagacattgcttcacagtgtggtaaccaagagaagggtggaaacttttggattaagttgaacattaatcaaacaggattttatagagtccaatatgacgataaacttgcagctgcacttcaaaatgcattgcaggccaagaagctgtctgtaatggataaaattggcattgtggaagattcactggccttatctatggcctgcaaacaaaccttaacatcgttgctacgtttactgtatgcttaccgcgaggaggctgattacagtgttctttcacacataaatactgcgagtttaagtattgctaaaatatcggttgatgctactcctggattggtcggtgacatcaaacaacttctgatcaagcttcttctgccacctgctgtaaaattaggttgggacctcaagaatggtgagagccacctggactcgttgcttagaccagtgctcttggttgctcttgtcaaacttgggcatgataagagtataaatgagggagctaggcgtttcagtatctttgtacatgatcggaacacttctcttcttcgtcctgataccagaaaggctgcatacctagctgcaatgcagaatgtaactgcttcatacagatctgcttataatgatcttctgaaagtctacagggagtcagatgaagcagaggaaagggggcgtgtcctaagcacactgtgcttttgtaaggacgagaatattgttcttgaatcactgaatcttctttttaccaatgagtttcgcaagcaagatgcatattatgtacttcaaggtcttgacgtggagacgcgtgataccgcatgggtgtggttgaaggataactgggatcgtgtgacaaggaaatacggggacacacaagcaggaggttttatcagatacgtcgtcacattgttcacctccaacgagaaggcagcagagttctcccgcttcttcgcaacccgcaagaagcctgaattcgagagaacactaaagcagagccttgagaacgtccggatcagcgcaaggtggatccagggcatcaagagcgaaccgaggctcgctcaaacggtgcaggagctgctgcgtagaccctgatctgccctcggttgagttgcaggtgtggccggaaataagctggtcgtagatgacatacgctttgtacattctcagtgtgtaaaaggttacctctcttagtgttcatggcagcatgcaaatgtaagctattgggttgaatttttagcccaagcatgtgctagcagtgatctcgtgtctaatttgagaagcgtagaggtttaaaagaagattaaagtgcatttccgattcttaaatttgtgcggctgtgttaatctgatctataaacttttaaaatatatctcttaaaggctcaatatttgttttggtgtttgttacgtgcaaacggacccaaacagatccggtaagtccatctcccca

SEQ ID NO: 23836 - DNA, 2082 bp, Zea Mays
aatttccctcgcttctcgcaccccttcgtttccctcgttttcttccctcccttcctccccctaccccgcgcaaaccctcgcccgccgcctcctcctcctcagatcccagctccaggaccctgccgcccgcccgcgcccgcgaccgggcctccgatccgcgcacccgcgcgtgccccgatccccatggcggcggcggccggtgacggggccggcgaggccagggcacgggcgctgctgcagcagcaccggccgtttgcgacgccgccaggggagtaccaccacttcggcgcgccttccgccgccgccgacgagatggtggaggcggttgtcctcaggacgccattgaaacggaaacataacgacagaacagaaaatgaagctgccgaatcaaatgactggatgagccctggatatgctaatgctggcagcagcccagttcctacacccccttcagggaaaggtttaaaagcatccaccaagcctaaggctacgaagggccagaaatctggtcctcagacccctttgggttttggttctccgggcaatccttctactcctgttggtggctgccgctatgatagctccctcgggctcttgacaaagaagttcctgaacttgctaaaaggtgcacctggtggcattgttgatctgaataatgctgcagaaactctagagaaaaggcgtatatatgacatcactaatgttcttgaagggataggactgatagaaaaaaagcttaagaacaacatccgttggaaaggagttgatgactctcgacccggagaagttagtgatgatatgtcaattttacaggcagatattgatgctcttacactgcaagagcgcaatttggatgaacgaataagtgaaatgcgggacagattaagagggcttactgaagatgaaaataatcaaaagtggctttatgtcacggaagaagatatcaaatctttgccatgcttccagaatcagactctaattgctataaaagcaccgcatggcacaactttggaagtcccagatcctgatgaggttaatgattatcctcaaaggagatataggattgtcctaagaagtaccatgggtccgatagatgtgtacctagttagtcaatttgaggagatgagtggcatggagactcctccaaggcctacacagacaataagcatggattctctagagaatcctaggacgcctttggctgcggattgcaacaaagtcacagggatggaatcaaatattcacggaggactgatcctaccttctgatgcacctagtagttcacaggacatttcagggatgatgaagattgtcccttcggagcttgatgctgatacagactactggctcttatcggacaacacaggagttagcatgacgaacatgtgggagacaggaccagatgagtgggatgggattgagaaattcaacgcggaggatttcttggaagtgggcactccccagcagcaggataaaccagccgatgtcgtggatgacgacccctcctgtataatctgaagcccgccgaatcacggtggcgaaacctttcatagttcagcgcccgctccgatcaacctggagcagtagatggctgtgactgatgtacagatgccagatcagtattaataacttactaactgtctagaccatggcatcatccagaaatgtcgatcataaccgagagttgatggtgcaggcagtccttgtcaggttcaggctcaaacattgcagatgcaggctgaggctgcattagctgtgcctggtagttggtgcatgctgtgtatcttaagggtcacagcactagtagtgtacaactaggaatatgtgtgtcgaatccatttgtaaaatagcagccgttattgtttgtgtggtactgatccagcttttttttagaagaaaacatgtgttgccatcccgagatggctggacaggtgttgctactattcgcgccgttgccgggcaatatcgtgtgctatctgcatcgttatttctgccactacgtgacgttgtctgtaatagaggatttgtactacattgtttatatagtgaagtattgtttatataatgaagttcaaaatagag

SEQ ID NO: 23837 - DNA, 416 bp, Zea Mays
ctcccagcctcgccctcccaccgtcccacgttgttcctcccgaccctcgccgtccctcccgccgcgacccgccctcctcctcccgaccacgccgcccagcccgtgtaccactccctcccagcctcgccctcccacgccgtccctcccgccgtgacccttcctcctcctcccgacctcgccgcctagcccgtgtcgccgccgtcgcccgtgccactctgctgctgcgaccacgacaatggggatgtggaaggtggtgtgcgtcaccgacgcatcagcgtacatcgcgtcctggatcgtcaggctcctcctcgaccgtggctacaccgtccgcgccaccgtgcgagacacagcctatccttagctccatccaacgcagtcacttgcaatgttttctttgggtcagccgaaaagtgaag

SEQ ID NO: 23838 - DNA, 2435 bp, Zea Mays
gttgcagacagctacagccgtatgtccgtgtgacattctgctcagtcggccaatcctcaccaaattctccatcaaatccaaccaacccctcaccgcctatgccgccgcgggccgcctagggttccggcggccgccgctccctcgccggcgcgatggggaacacctgcatcggtcccagcgccccctcggaccgccacagcttcttcaacaccgtctccctggccgtgctctggcgacccccggccgccgctgaccgcgccgagccttccccgaccgctgaacccagctcatccactccctgctctcccccctccagggcccctaaccctgtcaccatctccgactccgagcacccgccacactccacctccaccgccttaggccccgccgcgccgcccaatcctaacggcaagcccaagcccaagcccaaggtgaagcgcgtgcagagcgccggcctcctcgccggctccgtgctgaagcgcgactccgagcggctcaaggacgtctacaccctgggcaagaagctcgggcaggggcagttcggcaccacctaccagtgcgtcgagaaggcaaccgggaagcacttcgcctgcaagtcaatcgccaagcggaagctcgtcaccgatgaggacgtcgaggacgtgcgccgcgagatccagatcatgcaccacctggccggccaccccaacgtcgtatccatcgtgggagcctacgaggacgctgtagccgtgcacctcgtcatggagctgtgcgctggaggggagctgttcgataggatcatacagcgggggcactactctgagaaagccgccgcacagttggcccgggtgatcatcggggttgtcgaagcatgccattcacttggggtgatgcacagagacctcaagcctgagaatttcttgtttgtgaaccaaaaggaggatgcacccttaaaggctattgatttcgggctctccatcttcttcaaaccagccttgatctgttttgctgggagaggcgaagatctcctgggtcaatcatgtgaaatattttctgatgtcgttggaagtccttactatgttgcccctgaggttctgaaaaaacgctatggctgtgaggttgatgtgtggagtgccggtgtaataatttatatcttattgagtggggttcctccgttttgggctgaatctgaacaagggatatttaaacaagttctaaaaggtggtcttgatttttcatccgatccctggcccagcatttcggagagtgcaaaggatttggttaggaagatgctaaatcgtgatcccagaaagagattgactgcacatgatgctctatgtcatccttgggtttgtgtagatggagttgctcctgacaaacctctggattctgctgtcttaaccagattgaaacagttttctgcaatgaataaactaaagaagatggcccttagggtcattgctgaaaatttgtctgaagatgaaattgcaggattgaaagagatgttcaaaatgctggacactgacaatagtgggcagatcacgttggaggaactaaaaattggtttgaagagagttggtgctaacttaaaggactcagaaattacaacactaatggaagcggcagatattgataacagtggttccatcgactatggagagttcctagctgcaactttacatctgaacaaagtcgagcgagaagacaacctcttcgcagcattctcatactttgataaagacggcagcggttatattactcatgatgagctacaaaaagcatgtgaggaattcggtatagaagatgcacacctagaagatatcatccatgacgttgatcaggacaatgatggtcggatcgactacaacgagtttgtaacaatgatgcagaagggaaataacccactagggaaaaaggggcactgccagatgagctttggtcttagagaagcattgaagcttggctaagtggcatgatcaatcctgtgtgaagtgccattcggcttcatatgccaactttagctgatgaaactaagtccgtgaatttgggacgccggtaccaaaggtggagcaagtgcgcgatacgattagctttgggataccaactaagcagtgagcatgcaggaacacattggtgatctttcgtcgttaaccccccatgtacatggcttttttgaggtgggataggaatggcggttgtgtttcccatggccattctttgcacgttatgaagctcagctgcaggatgctcttatatagagagaaatgttagtcacatcacatcgcgtgtccatactgtatagcgaaacttaacatgttgtaatatcggtcggacaatgtgtgcgtgttgtatgttatctttcttagatagaggcacaggcttagcgttgtcatatatgtattgcaagaatatgcaggctgtatattaaccaaatgatttttttgtgtacatttcag

SEQ ID NO: 23839 - DNA, 2974 bp, Zea Mays
ctcaaagcccgcctccggtttccgtcccccatcctcctccgccccccagccgccgcatccaatggagtcctcgctcctcctctctaccccgcgcccgctcaagcccttccatccgcatcacttccccaccgctcgtcgtcgcgacgcgtccttccgcgggaagccccctccgccgccgcccctgccaccgctcggacgcggcagccgccggttgggtcgggcggtgccgcgcgcctcgagcgaggcgttcggcgacggattccgcagccaggacaggcctcccggggttagcagcgggggtgttcgccggaggacctaccgcgaggcgcagggcgaggcggccgtgccacccgtggccgcggccgcgagagcagtcgcgccctacgtcgccccggtcggggcagtactcatgctgagctttgtcatatggaaggtggttcagaatatgattccagggaagaaaaaggatcatggttctggaaaacatgcgccttctggtatcatgtggtccttcgctgctggctccaatttggcaacatctaccctcagtgctgaaaaggagtcgcggaaaaatctgaacaagttctacaaagaacttcgaactttgaaaactgttaacatggctggtcgtcagtttggagatgagggcctgttttttctagcagaaagcttagcctatgacaagagtgcagaagaggtggacttttctggcaatgggataacagctgtggggatagaagcctttgatggagttcttcagataaacacaactttgaaaactctcaatttatctggaaatgacatcggggatgaaggagctaagatatattggttgaaaatgtgggtatccagaaactcctcctgaacagtatcaatattggggacgagggtgccaaggcactttcgaacatgctgaaaaagaataaatcaatacgtattctacagttcagcaataatgcaattgaatacagtggttttgcaagtattgcagaagcccttttagagaataatacgatacggagcttgtatctcaatggcaactatggtggtccccttggtgcatgcagcctagctcaaggaattctagggaataagtctttaagggtactacttaagacacttggttatatacttccagtcttccacatagttttaatgtttttttttttgtaaaattttaaatgtttgaaagtgaagcagattgaattccatctttgcttatgcatcaagttatggagaagtgtctgtttcagctttctgaaggggtagtagtattttgaaactttcaggtttggctatatgtccaaagcgtatggatcaatttgccttctcactactttatgctaaccgcacaatatggttggatttcaggatacatatctgtaaagcatggagtgtatagtaggacttgcacacaaagagcattttattaacttttcttgcttagatgataaaaacctattggtaatctgtaagtcttgctgtggcaatattggtagaatgattaccaatagaagtatagaactcttctgtaccaatgtgctacctatgaccaaatggaactatttattatttaagactgtaggttcgaaattaatgtgtttgaagttcttcgatctctgttcatagccccccccccccccccccccaaaaaaaaatgtttattactgtttggtatttttgtctatttctaactttgtatattatattcaatttacctatcatggttatgatatgtaagcatttaaccttcactaggaaattcacttgcatggtaatgggattgggaatgagggaatacgtgagttgatgtctgcattatctgctcacaaagggaagatcacagttgtggatattggcaacaacaacattagcccggaaggtttacatcctgtagccgagttcctcaaaaggacaaagtccttacagtggttcagtctctacatgaacgatattagtgatgagggagctgaaaaggttgctgaggctctgaaagataacaaaacaatttctaccatagacttgggtggcaataacattcactccaaagctgttagtgcagtagcggaaactttgaaggataatgcagtgctgacaacactggatttgagctacaatccaattggatcagacggagtaaaggctttgtgcgatgtcctcaagttccatgggaagatccaaacccttaagctcggctggtgccagataggcatggaaggtgcagagtgtattgccgactgtctcaagtacaacacaacgttatcgacattggatctgcgggcaaacgggcttggaaacgatggtgctatatgcttggcgcgaagtttcaagataatcaacgaatcgttgacgtcccttgacctgggtttcaatgagattcgagacgacggagcattcgcattggcacaggcgctcaaggctaacgaggatctggcggtcacgtcattaaatctcgcaaacaacttcttcacgaaattcggacaggtcgctctttctgaggcgcgggaccatgtgtacgagatgaccgaacgggagatagacatttatttttaggggggtaccggttcccctgtgcacacagttagcacaggacatgaccgatgcttgtttgtcgagtaggttgaagaataaggtcgcgcggtagagcgatggtttatcctttgtataggaaaattttggtgggttagttaaatatttttagttactatgtaggttagccattcgatcaggtgtctatatgcaagttttgctggaaacgtcggtgtcgttttgaaccattcgtattattggttgaaaatggaatggatatgacgggcatcacatgcaaactgattcttttttgtggaggacttcactgatgtggtggtgtgtgttcctcggaagttgaaatgtattctcatgccatccatgtgggatggtgttggtaacctcagacctgtcgtaggctgttgtgaatgtcacacaaagatttcgc

SEQ ID NO: 23840 - DNA, 3242 bp, Zea Mays
cggatagcccacagaacgcacgcgctaccttttctctctctacgaccttccccttacctattcgccgtccctctctcctgctgccctccccccgccgccgccctacggcccaccccgccgacgcgccacctccgtatctctcttccccgcctacgcgggcggcggatctccggatccgcgcgggggagggagatctggattggatggtcctctccggccgcggctagtccggcctgatctgatccgacccgtcccggcggcgcagtccgggcaggttgtctgggaaatttcggactcgggcggtgttgatcccggggagaggtcgtgcctcgctcgatctccgcataaaagctgtgattttgtggcggcgcggctgcgagttaccgggattttcccagggtttccggcggccgatccgcgctagttacgctattctgttccgtcagggcggcctcgtgttgggggctcgtttatttgccgcgtcccggaggagggttttgtgttcttctgtcgttggctccatggccagcggctctgatgccccgaagcagtatggaataaccaagccgttgtcgttgctcggaccggtggaggccgacctccagaggacggaggagctagagaagttcttgctcgagtcgggtctctatgagagccctgacgaatctgctaggcgggaggaggtgctggggaagcttgaccagattgtaaaagactgggtaaaacaattgactagtcagagaggatacactgatcaaatggttgaagaggcaaatgctgtactcttcacctttggctcataccgtcttggggttcatggacctggagctgatattgataccctctgtgttggaccttcatatgtgaaccgtgaggaagatttttttattgtactgcatgggatattagcacaaacagaggatgtgaccgagctgcagcctgtacctgatgcacatgtccctgttatgaaattcaagttccatggaatatctattgaccttctttatgccagtgtctccctcttagtagtaccagctgacttggatatctcccaaggatcagtgctttatgatgttgatgaagctactgtccgtagtcttaatgggtgcagagtagcagaccaaatcattagacttgttccaaattttgagaattttcgcacggcattaagatgtttgaagtactgggcaaaaaggagaggtgtttactctaatgttactggctttcttggtggtgtcaactgggctttactggttgcgcgtgtctgccagctctatcccaatgctgtgccaagtatgctggtctcacggttttttagagtttttacacaatggcagtggccaaacccggttatgctttgttctatagaagaggaagaacttggtttccctgtttgggatccacgcaaaaatcctcgagatagatgtcatcatatgcctattataacccctgcgtacccatgcatgaattcaagctataatgtttccacaagcacactgagggttatgttggaacaattccagtttggtaatagaatttgccaggaaattgaaatgaataagaccagctggcctgctctgtttgagccttttcaattttttgaagcatacaagaattatctacaggttgacatcattgctgaggatgatgaagaccttaggctttggaaaggatgggttgaatctcgattgcggcaactaactttgaagattgaacgtgatacatatggaatgctacagtgtcatccttacccacatgaatatgcagacccttctaggcagtgtgctcattgtgctttcttcatgggcttgtcaaggaaagaaggtgtgaaaatacaggaaggacaacagttcgatattcgaggaacggtggatgagttcaggcatgaaatcaacatgtatatgttctggaagcctgggatggagttagctgtttctcatgttcgtaggaagcaggtcccagcttatgtgtttccagagggttataaaagacctcgcccttcaagacatgtgaaccatcagtctgataaaaatgacactgaagatggcacagcgaccaggtctccagacagtcaactgaagagaaagcatgattctgttggaactgatgatatcaggtatgcaaagaggtcatcgaccagcccagttcatccgaaaaattcacctcaatctggaagcactggcgatgagactagatgtaacaaccaaataaaaagggctcctagcgatgcaagtggtggcagtccggcttcacctcaggcatcagagagaagcccagatactattctgtctgcccctaggtgcacgacaacaggagcagtgtgttctggtgatgcaattagtaagcatagtagtgttcctcttgttgagaactgcaccactccgactgtagcagtgtgcacaactttgaagcgcgtagctgagaaagttgtttcagagctagttggaagtgaaaggctggggagcaacaacagtgcggaattgttggagagtatggaaaaggaggatgtccttgctgaaaatgttcgttttggcgggaatggagttgcgcaaggtggccttccagaagagttagagccaaacaataggattgaagcggtttcttgagctgatgcaggtatgaacaagtgtacattgtggaagtcgtcactgagggttagtggcatcaaccacacaagattggggaaaaaatggtgtagagatggataagttctacccccttgctggagggaatggtaagtagctcaactcacaagtttccttctggacacagattcgcaattacgggggtttctatgatgatggatgatgggagattatcggatatcatgtcttgcacaacggcatggcaaaaaaaaaacgacgaagaagattttgtggaaggccatggtcgaatgtcatgtcttgctggtacactctagatgagcatgaaccttaagttttcgtttttttttaacttgttgagcagctgactcttgtgtatgaactgagctgcagcgggcttccctgagttgacttgtttgggtctgagatgcttctgccatgttctaggtctagaatagaactagatgcggtgattttgcattgtctcctgttgcggtgcggatcgttctttactacccccgtccggtggtgctctacttcgagcatgatcggcagatgaactcctagagttgatatcactttgtgaatagaagggtctcaataaccagaaacacagctcaagctgtaggtagagatgtc

SEQ ID NO: 23841 - DNA, 158 bp, Zea Mays
actgacgacatcgttgtacgaagaagaccactccttgcaccatcttgaggtcaacttagttctagttctccgcatcacgtagttaattcacgtacctaaatgaaatgcattatgcacatgaatgcatagcactgacttcactgcacaactaaaattcc

SEQ ID NO: 23842 - DNA, 2388 bp, Zea Mays
catctcctcacctcctcgacggcgcgactccctcgacctcgccctcctccccccgccttgacgctgtcgcctggtcctccgcggtcggctgtctcgattcgatcgtaatacatcgacaataggattgaatcacttcttcaagatttggagttgaagtgctggatgctgacagaatagaagttccttcaccaaaagaagaaaataattcgacaaattctgaagctgctacagatagcgaagacattgaaatcagcgatgatgatgaccgcaaccacaagcaccgaagacgggaggctaaacaacaatctgatgacaatacagaggagcaacatccagggccacctcttaaaaaaaggagtagggttgctggtaatggagaaccttttggtggagctggctctcaaggtgaagtacaaaaggattttgtgccaaattttaaaaggcgttctggagcaggaggtcacactcgagcacctagagcgaaccaatccttccgagctgattcatcggcttctgctgctactcgccctcctatgacacgaggaagaggacgtaatgttgcaccttggactcaccatgatccaagatttaactcacttgatatgatggattttgcatcccagatggcttcacaaggaccacctgcacatcctagcttatttatgggcactgcattgccatgtggtccatatggatttatgcctggaatgcctcatgggattttggatccaatccacccacttggaatgcaaggccctattcagcgctcagtatctcctttgattgatcttggcatgcctcgtcaacgttgcagagactttgaggaacgtggattttgcttgagaggggatatgtgccccatggagcatggtgtaaatagaattgttgttgatgatatgcagagtctttctcaattcaatcttccagtatcagttccaaatgctcaaggattgggaatccaaaatgagggaggaaccagttctgttaacttatccaaccttggagggagtaaaagcgttcctgtaaaagatgtgaaatctggtgtagcaagtgatgcattaaagccaaatggaagtgctgtttcagctgttgctgatgctgatgtatatgatcctgatcaacctctttggaacaatgagcaccgagaagcatcatctactggctttataaataaagatgttggaccgtggaatgctgaatcatccggctatgaaatggggcaggagcattcaaaccaggttttggcttctgatggttctcagagtttgaagtcttctgtttgggggcgaataacatcaaaaagaaaaccaggaggtaataacacagctaaaagtacaccaacgagtatcactggaaaccaaaaaagtgattatgatgacatggctatcagcacgggccaagtaaaatctgctgctaaggataccaatggtcaacccaattcaagaatatatggagatgtgggctggcaaagtaatcgagctgctcagaaagcatcccgtacattatatgtaaatggaattccccaagaaagcaacagatgggagacccttctatcgcattttcagaagtttggtcaagtaatagatatttatattccatctaacagtgaaaaagcttttgtccagttctcgagaagggaagaagctgaagctgccctaaaagctccagatgctgttatgggaaaccgctttataaagctatggtgggccaacagagatagagttcttgatgtgggagagggcagaatctctcaaaagccttcccagttgtctactacgccggctaattcttaccccaacagagtcaaggaaaatgttcaaccaacagctccagggcccagctctggatcttctgctgaactgttgagttctggtacaccaagttctagaatgctgccagcaagtagtgcgaaagcagtaccaccccatgctccaaaaaggcaagaaagcctagaactattggaagaactacgtaaaaaacaagagatcttagctcagaagcgtgatgagttccgccggcagttagagaaacttacaaaacaaaaaggttcagcaaattcagttaagcatgcagagactggtggaaaagaaattgcttctaatgatgcatcacaagtaaaggatgcagcgtccacgagggttgaagggtcacaggagacagctggttcattggaaaagagaagttctggagagtttgccttgttgtctcaaaagtctgctgcgatatccacgcagaaaccagtggtggttacaaaacagactactctgccagcacctcctcagaataggtttaagcttgacaatcggaccacatcattcagaattcttccacctttgccacctgaaattgcaaatgtaagttttacatccaaccacttgccattccttg

SEQ ID NO: 23843 - DNA, 1925 bp, Zea Mays
cttggagtgagcttcataaattgaaatccaagatttacctggcttcacacgtagtgttttcaaaagggatcatgctttaataacaccagagagtcatgtattcagtcctttgcctgattggatcaatacagtaggagcatatttgatcagtccagctattggtgcacacttcattatgtatctagcaaacatgcaaggctggaaggctcctttaatgaaccaagctggaagattaacacttgtcagatctgtcctcactgccatccctatttatcaccttattgcgattccctgccctaaatgggtggtcaaggctatcgacaaaatcagaaggggctttttgtggaagggcagaaaagatgttagaggtggtcattgccttgtggggtggaataaggtctgtaaacccctaagtatggggggtttgggaattcacaatcttgaaattcttggttgggctttgaatctgaggtggctgtggctcaagaaaactcaaccagacaggccttgggctgagtttgatgtgcaagtccatcctaatgttactgccatgttctcagcctcagtttgctccatagtaggggatgggggtggtacactgttttggactgaccgctggttgcatggccaatgtatctcagaaattgccccttccctgttaaatagagttccaattcgagtgagaaaaaggaaaacagttcagcaagctctcagggacaacagttgggttggtgacatctctggcagcttaccggcagaagtgattgttgatttcttaataatttgggatttaactcaggatattcatttgcaacctggagtacctgatgctttccgttggcttccaggtgcttcaggggagtactctgctaaaacagcctaccaacgttttttggctggttctatggaatttgagccaggtaaaaggatatggaagagttgggcgccccctaagtgcaaattcttcatttggcttgcttcccttaatagatgctggacagcggaccgtctagctcgtagaggtcttgaccacccggtgaaatgcgttctatgtgatcagcaggaggagacaatccagcacattttggtctcttgtgtcttctccaggaatttatggtggcagatcttatgcaaagtggggctgcagcttgtggcaccagggctggagacatcaattttccaggattggtggagtatggctgaagatcttgtgccatctttgcacaggaaagggttcaacacattggttattctcgtggcttggtggatctggaagcacagaaatgcttgtgtttttgatggtgtctccccaaattcgaatgcagttctgcaacagatccaggaggatgccaggctttgggagatggcaggtgctaaggctctgagaaggctgtggccttaatttaggggcttggttcacttgtttttttgttctttctttttcttcctttttctcctttattttcttttgtatagctgttgttcttggtcttctttagaccttctctctacttaatataatgatgcgcagttctcctgcgtattcgagaaaaaaaaaaaataatttcaaacaaagggagtaccaaggaagagtatccaacaatgtcctcagttgatgtacaattctataagtaactgtttttttttgctcctggtttgccttttctttttggcataggatgtcgtaacttacaacatcatgtaattagtcctacatatgttttagatgccgaagtccatgacctaaggggttgtttgagtcgcctagactcttattcttgttcttaatataatgatatgtagctctcctgcatgtttgagaaaagagatgtggaaatccaaggctgatgcaaactatcagttttttaagagatacctatgagattgtaaatattcaaattcatagctttcttaaatttgtgttc

SEQ ID NO: 23844 - DNA, 1600 bp, Zea Mays
cccctctcgctcgctcctgctgcctgcctgtgcctgcctccacacccctggccttgtgcttcgtgcgtgcgtgcctctgcctccctccctataagtacacacgccgcctccgtctcggacacttgcagaaccatccatcactagttgagtggcctgcaaagacacgtacgcacggcacgcgaccacagcagcagctggtctgaggcagctagcttggaaccacaggacggcgcgatgcagaagcgctggaagccgagagacgccgctgccggtgctttcagcatggcgctggagctggtggacgacgaggacgacgcggcgccgccggcgataccgccgccgcagacgccgctggagcccatggagtacctctctcggtcgtggagcgtgtcggcgtcggagatctccaagatcctcgtcgccggaggcaacaagcccagcagcgttgccgccgcggcgtgccgccttccggaggcggctatgtctataccggagcaggcgcctgtgctcgccacgtcctccaccgtccatctcccgtctcctcagcagcatgtatagagatgcgaggaggtactccacgagcggcggccaccaccaatcgatcggcaggtggttccagcaggctcaccacagggaaacgtgccgggcgaagcagagcggcaaggagaagcagcgcgccgagaaggcccacgtgcacgccatggtgtccgtggcccgggtggcggccgcggtcgccgccgtcgcgggctccggcgacacccagacccaggccaccaagatggccagggccatggcgtcggccaccgagctgctagcctcccactgcgtcgaggcggcccagcacgcgggcgcgcgccacgatcaggtggctgccgcggtgcaggccgcggtcggcgtcggaagccccggcgatctggtcacgctcacggcggccgccgcgaccgctctgcgaggagcggcgacgctgaagcagagggtgcagcgagagacggcgaggagcaacgcgagcgtcctcccgtacgagagagggagttcgtggagcccggacatctggtgcaaggagggggacctgctgaaacgcacgaggaaagggggtttgcacaggataagagtatctatctacatcaacaagaggtcacaggtgatactgaagctgaaaagcaaacaccttggaggcgcgctgtcaaagaacaacaagagcgtggtttacggcgtgtacagcgagcttccgacgtgggctgggaagggctccgtagaggagacatgctgcttcggccttagcaccgcgcaaggtctcgtggagttggagtgcgagggcagcgcgagcaagcggaagtgggttgacgacgtgcagagcctgcttcgtgaggcggctctgcatggccatggtcaagtagggaatggaatgggactagtaaaactcagctagtgcagcctcagtatatccactttcatggtagcagattggtcgtgctcttgtttgtcactgacttacacgctataccacatactatgtaatgatgacatttatacggaatatttttatatgtttgtaaaaaaaactcagttaggaaagaccgtccttctggtattaatttaa

SEQ ID NO: 23845 - DNA, 175 bp, Zea Mays
gtacaggtggttcaagaggagccacacatcgaggagttcgattcgatctaggtggcgtctcccagttgactttctggcgccaaggatggattttaaatcctgttatatttatcttttattttttttgtaagtcttccgctatgtaataagtactctgattattgtgacatttatc

SEQ ID NO: 23846 - DNA, 2134 bp, Zea Mays
tctaatttgttcggtcctcggaataaaggaaccgttgcttcacttgcaagctagcactgctcatgggcatatgacttcggcatctagaacaacaacactttacacttcaggcatctagaacaacacagcgtgttaaagacgacgacgacgacaacgggggaagctttcatgctcatgggcaacacgtggccggtgggcatggcgggagggaacacggcggcgacgctgtggtgcagccactgcggcatgggcatcgcggcgccggcgcccgggtccggctctatcgtccggtgcgcgttctgccgcggggtgacgcgcgtcgagcaccagcgcggcggcgtgggcgagagagccatgacgacgaggacgctcgcggctgcagcctcgctgccgcggcagcttccggtctccgcggggcccgtcgagatcccggccagctaccccagggtgagcggcggcaacaagaagcgggcgctcctggtcggggtcagctacacgggcaccgcgcacgagctcaaggggacggtcaacgacgtcaaggagatgaggaggctcctctgcgacaggttcgggttcccgggcgcctgcatcctggagctcaccgagaaggagagtgaccccaccagggtgccgacgagggagaacctgctgcgggcgatgcggtggctcgtggaggggtccagcagcggcgactcgctggtgttccacttctccgggcacggcgtgcagaagctggacatgaacgacgacgaggtggacgggtacaacgaggcgctctgccccatggacttcgagcggagcggcaagatcctggacgacgagatcaacgacaccatcgtgcggccgctcggcaagggcgtgaagctgcacgccatcgtggacacctgccacagcggcaccatactggacctcccctacctctgccgcatgtccagaactgggtactggcagtgggagaaccacgcccgcccttcgggcatgctgacgaagcgccccaacggaggcctggccatctccatcagcggctgcagcgacgaccagaagtccgccgacgccagcggattttccgatgagtcgtcttcgatcggcgccatgacggacagcttcatcaaggcgatgctcatcagcggctacagtgacggcaaagccaagtccagcgtggccagtgcgcagaaaccggaggcctgcgcgaccatgggggccatgacgcacagcttcatcacggcggtggaacgcgagccgcagggtgtcacctacggccgcctgctcacctccatgaaggccatcatgaccaactccggcggctgcgccgtgcagggtcctattggcgccggcgcggccgcccgcaaggtcgccaacttcagcggcgtggaggaacccaacctgtcctcctcggagaagttcgacatctaccgcaaggcctttgtgctgtaaacctcctctgcatcggccattgcaaactaccgtctggactctttaaattgccgtgtcgggataataaaccagacgggcctatgtgtcaacaatgtgtcgtctttgtgtcatcagtcaccggaggagaatatttgtgtttatgcacacgccaacaatggctccttgctactaaaccttatggcccattgtaataaggctattgtatctcttctacatgtctctaaaataaactaagtgttatggtggtaattaatatcactttcagcatacaagaatggacatagctttatacgatcagaatgatattaaaaccaataatgagatttatatgagcctactaaaccttatgtaccctagaagcttcgatcttcctagacaaaaggagttgagcacaccataggacgaaattagatttagccatttgaattatgatgacttggtgtatgggggatcaacactatggtggtagaagcagtggcatctgacatgtgaggaggaagaaggatgtgcggtgggaaattagaaaaaaaaaatcttggctttgatgccatgcaagacaatatcctcttgaggctgtactcatgtacatatagatatacgagagcattatttacatgagcactacctagattaggggatgtagccctaaacctttacatggcagataacaacactatcaagattaggcattgtcctttgc

SEQ ID NO: 23847 - DNA, 612 bp, Zea Mays
aaagccggagccggagcatttgggagccttcccaaagaggcccttagcaacacctcgatgcatcatcccgtggctgtggcccagctaaacccgaagaagccgtcaacgagagcgacgacacgctagcgctggtgctggtagatccccagctcgttgcagccgcggcaggcggcggtccaagaacgcaggcaggagaggtccgccgtggcaggagtcacgaggaggaagaagaagaggagagcgacaggctcgcgatcgttctagctgagccgcagcgacaggccgccgctgggcgcggcgacgtggagtccgttctcctggcgctgcggcgggtgaaggagcagctgcgctacaccatcgagcggcggtcgcgggcgcggctcgtcgtcgcccaccaggaactctacggccactagctgtgagccgtacgtgtgtgaatcattcgcagcgccgcactgctgctgtgcagcgattttataaatatagctgtctcgggggtcgatggagtatccgtagagaatggaataagatgtcataatttacaaagagtgaattgcttatttgcttctgtttactgatgaggaacacaatgtgatacggttggaagcaccc

SEQ ID NO: 23848 - DNA, 2415 bp, Zea Mays
agactctccgcagttcggcctcgcgattccgcgggagactgttctacttctcgccggcgacgccgattcgatctgacgggcacacatcagaaggctggaggagggcactgggagccgagggggaggctaagggtcaggattcgggcgcgatgccgcgcccgggacgacttcagcggtcggggtccaagcgcgggctggaccccaccggtggtggcggcggcggcgacaacgacgaccatgcgcccaagcgcccgcgcatccctgccctcgctagctctcaagatggacagtttgcagaaactctgttcatcgctcgagcccattctccgaagagttgtaagtgaagaagtagagcgtgctttagccaaactgggtcctgctagaattcaaggaagatcctcccccaaaagaattgaagggcctgatggaagaaatcttcagctccagttcagaagtcagttggctcttccaatcttcactggtggaaaagttgaaggtgagcagggagcagctatacatgtcgtgctgttggatgcaaacactggatgtgttgttacttcaggacctgagtcgtttgcaaaattggatatccttgtacttgagggtgacttcaataaagacgaagatgaggattggacagaagaagagtttgaaagtaatattgtcaaggagcgtgaagggaagagacctcttttgacaggtgacctgcaagtgactcttaaagaaggtgttggaaccataggggagcttaccttcactgacaactccagctggataagaagcaggaaatttatacttgggctgaggattgctcctggcttttatgaaggcattcgtgtccgagaagccaagacagaagctttccccgttaaggatcacagaggagaattgtacaaaaaacactacccacccacgctgaaggatgatgtttggagattagaaaagattggcaaggatggcgcattccacaagaagttaaatgctagtgggatctatacagttgaagatttcctccagcttcttgttagggatcagcagagattacgtagcattctgggcagtggaatgtcaaataagatgtgggacagccttgttgatcatgcaaagacgtgtgtcttaagtggaaagcattatgtatactatgctagagactcaagaaacgtgggtgcaatattcaataacatctatgagttcactggtttgattgccgatgatcagttcatttcagctgaaaatcttacagacaatcaaaagggctatgctgatgcattggtaaagaaagcatatgaggactggatgcaagttgtagaatatgatggcaaggcactcttgagcttcaagcagaaaaagaaatctgtcatgacaagaagcgatgctgcagttgcctcgacaaaccaccctgcttcaaatggttcggccatttcacagaaacaattgtcccttccagcaaaagctggacaaacttcctccgcgggtattatgaatgaagatggaactagaaatgcttacaatgcaaatggaaaccagtcagcaagatatgcagccaccactcagaacattcctgcaaacgtcgccatgcaatatgacaggagtgcagtgtcgcctgaaagccagtttagtggttcatcccttcagagtcaagcttcaagagggtccaatacgctagcattgggccctccacagcaacatcaaagttttgcattcccagcactcggccagtccatgcggccaacaggcctgaatccttttgaagaatggccgcagcaacaggaaaactgtggcggtgttgatgactacctgatggaggagatcaggatgaggagccatgagattctcgaaaacgaagaaatgcagcagatgttgcggcttctgagcacgggtggtgcaggaaccaacctaactgaagatggcttcagtttcccttcgtacatgcctgcaccttcaccaaaattgagctacgaggatgaccgcacccgtgcacctgggaaagccgttgttgggtggctcaagatcaaggctgctatgcggtggggcatctttgtcaggaagaaggcagctgagagaagagctcagcttgttgagctagacgactagaaagtattgcagctggaagcatgtgcactccagatgttcatgtaccaaagtttcgttgatgtttgtggatccggatggactcagccttgttcgatgcatataagttgatttgtccaggctgttcttttaattactatggaaaaaaatccctttcttactttagatgcatataagttgattttttatcacattctggactgctgtcctcgaaattacaaaatctggagctaaaacagtttaggttttaaccttaacctgatagcaactcaatcgaaaactcgatctctctttctgccggcatatcgggtacacatcgatatc

SEQ ID NO: 23849 - DNA, 7224 bp, Zea Mays
caccacccccggcccccgcatcgcgaaaaaatctttttctcgcctctcatcgctcctcgccatttctctctcctcccctccgtctcacccgccgcccgccgcgaaaatctgcgcacggacgcgccggctgcccgcggagagcctcgggtgggagcgcgccccgtcgaggctcttgagctaccaagcatgtcagaatcaaatgtgaagtggattgatgggcttcacttcacatcattgtactggcctccaccccaggatgtggagcagaagcaggcacaaatcttggcctacgtcgagtactttggccagtttacagctgacagtgagcagttccctgaagatgtagctcagctcattcaaagttcctatccatcaaaagaaagtcgcttgatagatgaagtattggcaacttttgttcttcatcatccggagcatggtcatgcagttgtacatccaattctttcacccatcatagatgggacactgtgctatgataggcatggtcctccattcagctccttcatctctttatttagccatacttctgagcaagagtactcagaacagtgggccttggcctgtggagaaattcttagagtcttaactcactacaataggccaattttcaaagttgaacgccaacacagtgaagctgaatgtagcaccacatctgatcaggcaacatctagtgattccacagataagaaatctaacaattctctaggaaatgaatctgaccggaagccattgaggccactaaccccgtggatcactgacatattgctagctgcacctttgggcattcgaagtgactattttcgatggtgtagcggtgtaatgggaaaatatgctgctggtggagagttgaagcctccaactactggttggtaaaatcaatccccaaatattttatcttgatattgtagatttgtagcattataaaaaactcgtccctccgtgcattatattaagaagaagatcttctcacacagtttgagaaaaccttcgaacccctgccccatccatacagcgcggtacgtagcccatgtgaaaatgatagcgaccaaggattaggccttagaccggtgctttggcgtgagactaacgaggtattttttttacccccaacctgaaatccgctcccatggggagttgaactcaggatctgagaggtgctactcacaccacctaaccaactcagctagtaactataaataaccattttcttatatgtagagattgttgggaaatgcacttgttttcattatgaggccctaaggcctgtatatatacatcggtacatgaggataaatatgcactaaacaccttattcaatggggatatataggtacatgaggataaatatgcactaaacaccttattcaatggggatatttaggaatacatatatatacatctaacaccccctctcaaactcaaggtggatcaatgacactaagtttggagagataaaactgatgctaagctctggtttgcgccctgatgaaggtaccagccaactgaagctctgaaggcacatggcgaagaacaatgacatcatcatcctgaatctgcgctcgtgtataagaagcatcaacaccaatatatgcttagtaagctcatgctttaccggatcacgaacaatactaatagcacatgtactatcagacaaatgagaagtcggtatagatacagaaactccaaaatcaacaagcaaccaccgtagccaagtcacctctgtcgtcgcaagagccatagcacacaactcagcctttgtactcgaacgagaaactgctaattgcttcttagtcttccaagcaatgagggaaccactaagaaaaacacaatggtcagaaagagattaaggatatgagaaataactagcccaagtcacatcaaaataggcatggagctgcaaggagctagaacgaggaaagaacagatgacaagagatagtcccacgaagataacatagaacacgaagaagatgattgtagtgaagttgagtgggggtagatacaaacatattcagaatatgcacatgatacgagatgtcatggtgagtaacaccaaggtaaaccagactaccttcaatgtgacgatatcgagtagaatccgaaagaggctcgccattagtggcacaaaggcaaacattgagctccatggggtcttaacagtgcaatgatcagagacacacaagggtgactagcaagtaactgggcacgaagaggctcaaacttttcacgcggatgggtaagcctagacattttacccgctacacgctacccgaacccggacccgaaatacccgaacccacagtacccaaaatctatttcggataaaaaatgctattacccaaaattagtttgggtagtttggctagcagcacctgatacccgaactacctgtaacaacgggtaatatgccctggcgtgcgaggtgtcggagtctgctatctgcgaaccgtggagacgtcagaagtggagtcatgcgacgacccatgagcccatcaagccaaggcgcattcgctttagcttcatctgatccgacgcccgacagtcgacgctgcataacctagcagtagccgccaactgtctccttgtcctcggtggcggtacccgcctgcgactacgccggacgccggttgcttcttcaccagtcaccacggccgtacactccgttgcacagtcgctgcccttactcccttcgtccctcgtccacggtccacctttgcccagttttgatgactggtagttctaaattcttttcctgtaaatcttcaagccgtatgtaatgtgctttggcctttgggcgtatggactctggaatgttgggtgtgtcactgtcagtgtgagcatgtaatgactgttgttcgatgagagcagatagcttctgtcaaatatgctttgggcttctgtcaaatatgcttttgatgagtgatgaccgctagttctattcaccggaaatatttcgggtaaatcgggtataccgaactcgaacccgaaattacgggtagagttttttcttggctgtaatggggtaacaatttctattacccgaatttatcaaagcccgaactacccgacccgaattaaacgggtaacccgaaggtcccgaacgccagtcttatggatgggtcaagaagtcatatgtgcgacgaaactcaagatcagtcttttgatccagacagaactcacatgtgctaggagacatctacagactaagagtatcaagctgacgctaggcgtcagacatctggctatagaattcatcaactgtagaatctccctgacgtaaagaccactcctgacgaatggcagcaagataagtagatgtccagcacacacaacaatcacgaagaagggtccacatctgatgagaactgtcactcaacaaactctgtagaaaagcgagcctccacactagcggtgagaatagaaccagctcaagcatcctcatccatccatatccgatatgcactctactgagcctcatatgatgccagctgatcatcataatctgcaagtagagtgcatcagctgctccctatactgctccattactcgtcttattaagaaaatggctttcatggttgaccttctagagttctaggcacgaaaccaaattggttaaaagagattctcattattcctctcaggcggcgctcgataactctcttccatatcttcatagtatggctcgtcaacttaatttctcggtaattagtacaactttgaatttattcttgtagatcggttccgatatactttaccactcagacatctttattttggacaaacccagccagaagtatctatattttgggatgtaggtagtagtcgataatgtttgttgtgtatggaaaaaaatcaacatatccctgggtgatttagcttacagccgaggatctggaaagcacccacaacttatgccttccacccccagatgggctgttgccaatggagctggagttatattaagtgtctgtgatgaggaggtagctcgttatgagacagcaaatttaacagcagcagctgttcctgcgcttctgctacctccgccaacgacacccttggacgagcatttggtggctggtctgccccctcttgaaccatatgctcgcttgttccatagatattatgcaattgctacaccaagtgctacacagaggttgctttttggtcttctcgaagcacctccatcatgggctccagatgcacttgatgcagcagtacagctagttgagctacttagagcagctgaagattatgcttctggcatgcggcttccaaagaattggatgcatctgcatttcttgcgtgccattggaactgcaatgtcaatgagagctggtattgctgctgatacagctgctgctctgcttttccgaatactttcccaaccaacgctgctttttccaccactgcgacatgctgaaggagttgacgtacatcatgaaccactaggtggctatgtatcatcatataagaaacagttggaagttcctgcatctgaggccactatcgatgccactgcacaaggcattgcttctttgttgtgtgctcatgggcctgatgttgagtggagaatatgtaccatctgggaagctgcctatggtttgctaccactaagttcatcagcagttgatttacctgaaattgttgtagctgccccgcttcagccacctacactgtcatggaacctgtacttaccattattaaaagtattcgagtatctacctcgtggaagtccatctgaagcatgcttgatgaggatatttgtggcaacagttgaagctatacttaggagagcttttccttctgaaacaccagagcaatccagaaagccaagaagtcaatctaagaatcttgctgttgctgaacttcacacaatgatacattcactctttgttgaatcctgtgcctcaatggaccttgcctcccggttgctatttgtggtgttaactgtttgtgtaagtcatcaagctttgccagggggcagcaaaagaccaactggtagcgataaccattccctcgaggaagccactgagcattcaagattaacaaatggaagaagcagatgtaagaagagacaaggccctgttgctacgtttgattcgtatgttctagctgcagtttgtgccttatcttgtgagcttcagctgttcccttgcatttctaagaatggatcacattcaaatttaaaggattccatgaagattatcatacctggaaaaaacaatgggatcaataatgagctacacagtagcatcagctcagcaattattcatactcgtagaattcttgccatcctcgaagcccttttctccttgaagccatcatcagttggtacctcatggagctatagctcaaatgaaatagttgcagcagctatggttgctgctcacgtttctgagttattccgtcggtccaggccatgccttaattcactctctgcactgatgagatgcaagcgggatgctgagatttctaccagggcatcatccctctaccatttgattgacttgcatggtaaaacagtgtcctccattgtgaacaaagctgagcctcttgaagctcacctgacccttacaccagtaaagaaggttaatcaacatcgctgtgaggaaaacaacaccaactcatcggatagtgccaagttggaaaacaagaatggttcaacacataagaaaaacggtttctcaaaaccacacttgaaatgtgcagaagaggttctgaacggcaatgttgcaagtacatctgggaaatccattgcaagcttacaggtggaagcatctgatttggcaaacttccttaccatggatcggaatggggggtaccgagatgtctgcagaaagcacatcagctcaccaaggatggaggaaggttgtggatgcactttgtgatgtcgtttcagcctcaccaaccaaggcctcagctgctatcgttctccaggccgagaaggacttgcagccttggattgctagagacgacgaacaaggccagaagatgtggagagtcaaccaacgtatagtgaagcttatagcggagctcatgaggaaccatgacagccctgaaaccttggtgatactcgctagtgcctctgaccttctacttcgtgctactgatggaatacttgttgacggtgaagcttgtactttgccacagcttgagcttctcgaagtaaccgctcgagcagtccatcttattattgaatggggagatccaggtttatcagttgctgatggcctttctaatctgctaaagtgccgtctttcaaccaccatccgctgcctttctcacccaagcgcgcacgtgcgcgcgctcagcatgtccgttctccgtgacatcctggaccacggatccgtgagccccaacaagatcagccgaggggaacagcagcggaatggcatccagagcccatcgtaccggtgcgtggccgcaggcatcctcaactggcaagcggacgtggagaggtgcatagagtgggaagcccacagccgccgcgccaccgggctgacgctcgccttcctcagtacggcggcgaaggagctcggctgccctctcccgtgctgacgaggccgctcccggatctgatctgacatcggcggccacttgacggccagtgctggcagcttgctgcgggaccggcgagtaggacgctaatctctcgaccaaggacgactcgccggtttgttcacgtgatatgtgatcaaactgatattagatggtgtttccaaagtatatatctactgaggggcttgctcccatgatgcgattttattccaatctgacgtcagatgctttacgagcatatttaactgcttgagctgtacgtagcttgtattacttgtaactttgtgtaatatggttattattgccgaagaagcagaacatagctttttcttttttttctctctcttttttagactgctgctagatccttatccatgcgttgcaacggagcgccatatagattgaagttccccttgcagggctccttgtacggtctataacatgaacataaagatggcatccagtagtcaatcagcaactatcgcaatgagattggtcttctgcacgtgacccagtttagctcccgtgcagggctctctgtaacctactgtgatgtcccatgacatgaacataaatgtggcaggtttatcattcaataaccaaacagcagccgatatgtttcatctttatacataagtgctgatctaat

SEQ ID NO: 23850 - DNA, 1836 bp, Zea Mays
ctcgtctctctaggagtggtggcttcgctgctatagaaccaagacagaggttggagctccttcgccggcgagttctccccgccgctgcttggagctccctcgccggtgaattctcccgccactacttctccatagctaagccatccatgtccatccgtctcctctccctgccgctgcgcaaaaaagatctgtccggaccctgagacgccgccgtcgtcccgtggagcggagccacacgttgtccttccttcgccccgcccttctcggtcgcggctggttggtatgtgttctccacgcaaccgccactccctcgatgacctgctcgcaggcgcaacacgaggatgcccagctgattgcccgatttggttgtcctctccctctgtagcctgttccctctccgcgccatacggccatacccagagcaagtaggtcgtcaagtaagtccgacgacgagagaaacagccgccgctcggcctcatcatatggcggccgccgccccggttgcgtccgggagcggccgcctcagccgcccgcgcccgccccgtgtggggctgcgcggcgcgcgggtcgccgccgcggcgcaggggccgtcctgcctctacgtggggccaatcgagaccgccagccaggagaagctcgaggcgctctaccaccaggccagggattcttactacagtggtcagccattgatcatcgatgacatgttcgacaaagtcgagcttaagctccggctttatggctccaaatccgtcgtcaaatacccccgttgtagcctcataaggcattcaacctacgccgacgccgaggaggaccaatcgatgttcatggcgttatcaagcatctggatgctgctcctcctgtttggtacctctgcagttcttgttcctactctgtacactctgagcatcgcgttcggggatgtgtttggggcaaggcaccttctgtacggtgaaaagtccctcgatgcggtaacaagagttaacgacttggctttggttggattggggtatctggttggttatcccatcgcatctgcgtccgttggcgcgctgcaaggcttattgtcaaacaatttggttgccctaaaagggtcctgcccaaattgtggcgagcaggtatttgcatttgtcaagattgaaaaaaccgtgagagcacctcatcgagcagaatgccatgtctgtcagtgccctttggagtaccgcacgaaaattgagaaatcttcgtcagggcctagaagaagttgggtctacggccgggtttatctagtgaagcaagggcatcctgaaacggaaatggataaatgaaaaattctaattgattgagactgctgagggaagtttagataatcccatgagatggcactcttctggtcgactgaaacatttttcagatgccacttattttgatcagaagggcttactgtgtacgaatcatttgaaagatttgatccagccaagtgctttgtaatacagatacatttctgagatgtccagacgctgcagatgaaccccatgctgcattgtattcttttctgttttctctttagatgaatccatgatacagtttggatgaagaactactgaagaggctacgaaggtgccattgctatcaggagggagggtcactgaaaggctcacaggagggagggtcactgaaaggctcacactctgcaccaaacatgtttaatcatttgatcaaagatgcccacactcagcatgtatacagacttgctcaaatgtgatgtgttatacaagtgtgtgtgtgtgtatatatgaagttttcagctttattgtatgtatgttttcagattaatttgcctgaatctggaacccgtct

SEQ ID NO: 23851 - DNA, 1581 bp, Zea Mays
atccagtcccctcagtgctgctcgcttacatcgggcaagcagcgtacttgagagtgcacccggaggatgtggccaacactttctacagatccactccaatctccttgttctggccaacgttcattctcgcgctagcagcatcgatcattgggagccaagccatgatctcctgcgccttcgcgacaatctcgcattcccagacactcggttgctttccgagggtaaagatactgcacacctcgaggcaatactcgggccaactatacatccctgaagtaaactacctgctgtgcttgggtgcttgcctcgtcacagttggcttcaggacaactgtcatcattggggaagctcatggtatatgcgttgttcttgtgatgatcgtcacaaccctgttgctgacgatcgtgatgctcctagtatggaagatcagcgtctggtggatcgtcgcgttcttccttgttttcatgtcgtccgagtcgatctatctatctgccatcctgtcccgattcgcgcacggcgcgtacgtgcccgtggcaatgtcggcggtcctgatggtggtgatggtcgtgtggcactacgtgcacgtgaacaagtacaggtttgagctcgagcactctatcccccgcgacaaagtgaaagagctccttgagcgcagcgacatacagagggtgccagggatcggcctcttctacaccgagctggttcagggcatacccccggtgttccgtcatctcatcgagaagatcccttccatccactcggtgctcattttcgtctccatgaagcacctgcccatcccatctgtcgacatgtcggagcgctttctctttagacaggtagacagagaagattacaaggtgttccagtgcgtggcacggtatgggtacagggaccccttcgaggaggccaaggacttcgttgacaaacttgtagagcatctccagtactacatccgggatgtcaacctctatggcctgggctgcgagccgatgatgaagcagtccttcagctactgcagttctcgcgctgagagctttggcagccatgaaaaaaccaaagtaaaggcagtctacgctgaggagatgctcacaccagcagagtcattctcggagcacgcgaggcaagctagtggaaagaacaagctttttacacaatttcagggagacaagatgaatatagtagagatgatgaagattcagcaggagcaacaggctgtccttgaagagatgagtaaaggtgtggtgtacatatttggagagagcgaggtggtggcaagaccccactcctcactcattaagaagatagctatcaactacatatactcttttcttagaaagaactccaggaatggtgagaagatgctgtcgatcccccgtcgacagatcctaaaggtcggagtctcatatgaaatctaaaaagtgtggatgaagaacaggatatctgattgcacacacaacttaatttgatgccaaagaaggactctgtattcatttgtttcatggaaaatcaatgtgcttgatttacttactacagcaatgatggatacagaaccttagttttatgcataagtgcttcattgat

SEQ ID NO: 23852 - DNA, 1712 bp, Zea Mays
atcgccgttctgttttcccagttcgctcctcccatggcggcgtcgcccgctctcgtctcgctgactcccgccgtctccaggcatccccacctcctcttctgctccccttgccccccgccgcgccacatccgcctcgcccctccaaccgccacacccgcctcggacggaaacggcctcggccccggccccggccccggtgtcttcctatcgccgcgcgcgctctcgcagctcgacgagctcgcggccttccgctacgagcacgccttcccgcacggcctcctcactgtacctccacgaccgccgcgggctcgctccgcacgccgcggtgctcgtggggttctaccgccccgccgacgccgacgccggcgccgacaacgccaacgccgccccggaggacgacgaaggggagggtggggatgaaggggagatggcgtgcaccgcggaggtgtcgtttgacgcggtgggcgcaccaggggccccgcccacgcccactccgccgctcaacttcccctacatctgcaacatgactgtgaagacgccactgagaaggagaggaattggaaagcaacttcttaaggcatgcgaggatctggttttcaagatgaatgccaaaagacgtgtataccttcactgtagaataattgaccaagtcccattcaacatgtacacgaaagctggatacagtattgtccagactgacagtatattggtctggctgagccttcaaaagcgcaagtacttgatgagcaaggaattaccccaagcttctgttgttagtgagacttcaaccaaaaactttgagtgataatatttgacaagctgaatgtgccacgggaccaacagttgttcaagttattgagcgctgatctaagtgccatctgaacagctgaagtgacatcgaagcttgtaatgttatcctctgagcagtatatgcatattgcatccaatgagtttcccacctttatacagatatttcccccctgaataactatcaggaacttcatatgactaagatattgatctcaagcaagtctgcagctaatatttcatcaagtttgtccaggtgtatgtcatgcatttcaacttatgtgacattgatctctctttctgattcttctactagaaatttggtctacaatgccatcagtgtaaaattgtgggatctaaagtgccaagtgaaaactttatctttactgtgactgtaaactttggttggagtttccaccatgggagttaacatcatgctgatgagccactttggcctattgtagcctctagatcacttaaccatatgaatcaggctatgtgaagatctgaggatactaggatatcacctaatggagatgatataactgaatatcaatccaaattgactttcttgtgttcatatccttagtgatgcaaggcaattttcaacatgggaaactttcagttgctgacttcaatgataatcttgtcaaagaacactggtctactctatagagtctatactatgtcaatttgtcactggtgactaagggtacattgctacttgtcattagcatctcacactctcacagagctaaaacacaggttgctcgcaaagcagtgattccatctggttccgtccaattgaatatgcagcgaacgccggccgccagggtcttccctcggaaaatatttaactgctgaggttcaaaccttaccatgtcacaatcatatgagtatatgac

SEQ ID NO: 23853 - DNA, 3105 bp, Zea Mays
ggatcctgtccacaagttcatgacccgcccccccacccccagtggcggtggcggcagacccgccgggcagctggaccgagccgatcggtccggtcccatctcagcggcccgcggcgcctgcccaccctctcagccaaaagccccctgcacccagtccatccaaacctgtgtccgcagctctcgccagccagtcgccgccacgagaggggatgtcgacggcgagcggcgtatccgctggctccgtgctccagctgccctcctttcgggtgccggccaagagatttctgcctcggagaacagccgctggtgctccggctggtaacttttttgtgaagagagatattatatataatagaagctaccaccaattcttaccattgaagcatataggaggcttgcaagcagcagtacttccagttactccaccactattagatggtgaggggaaaaagaaacaaatggctgaagagtatgggttcacacaaattggagatgaactaccagatgatattactcttaaagatgtcatggatactttacctaaagaggtatttgaaatcaatgatgtgaaggcttggacatcagttttgatatcagttacttcttatgcgctgggtttatatttcattgctaagtctccatggtatcttcttcccttggcttgggcttggacaggcacagcagtgactgggttttttgtgataggtcatgattgtgctcacaaatcattttcaaggaataagttggttgaagatgttgttggaaccttggctttcatgccattgatatatccttatgaaccgtggagatttaagcatgaccgacatcatgccaagacaaacatgttgatagaagatactgcatggcaacctgtttggcaaaaggaaattgaatcatcaccttttctaaggaaggcaattatttttggctatggccctatcaggccatggatgtctattgctcactggttgatttggcactttgatctaaaaaaattcagaccaaatgaagttccaagggttaagataagcttagcatgtgtgtttgcattcatggcgattggatggcccttgatcattctcaaatcaggactagctggatggtttaagttctggttcatgccatggatggtttatcatttttggatgagcacttttacaatggtacatcacacagctcctcatataccattcaagtcatctgaagaatggaatgctgcacaagctcaattaaacggcacagttcattgtaactatcctcaatgagatcctttgccatgacataaatgtgcatgtcccacaccatatttctccaagaattccaagctataaccttcgtgctgcttatgattccatcaaacagaactggggcaagtatgtcaatgaagccaactggaattggcgattgatgaagacgatactgacgagatgccatgtgtacgacaaggagagatactatgttccgttcgatgagctcgcgcctcaggagtcccaaccaatcaaattccttaggaagttcatgccagattacgcatgatgccatcatcacagctgttgactagttgagattattcagtattgtcggcacaggtggacagtcacattttcagtgattacgcatgtcccaaaattttgactggaatactccatgttacactattattcgtgcagtaggaaagcacgtagcgtaccaaaatatttatacttcaggaaatagacaaagacattggtgatgaaaacggacagaatcgtgtggaaaacatctcttctcttgtcatttctatattttttttccggaaacagaaacacgttcaaaattcccggaattgaaaacagggttgggatatgtggttgttcggaaacaaactaatttactaataaaatacgacttgcacaggcctgctgggccgccgcaacctaagaatggacaccgtcaaatgagcccaccccttaataaaccctagcccgcctccgccgccctataatccgacgccggacgccccatgatttcgctttcttcttcccgtcgagacccaaccataccagcggcgccgcaggctgacgaggaggcggagtagagtggccggactacctcgacacctccactgcaaccatgggtatctcacgtgattcgatgcacaagcgccgtgccaccggtggaaagcagaaggcgtggcgcaagaagcgaaagtatgagcttggccgtcagcctgctaacaccaaactgtctagcaataagacagtgaggagggtccgtgtccgtggaggcaacgtgaagtggagggctctccgattggatacaggtaactactcgtggggaagtgaggctcttacccgcaagacccgcatcctggatgtggtctataatgcatcaaacaatgagcttgtgaggactcagactcttgtgaagagcgccattgtacaagttgatgctgctccattcaagcagtggtacctcactcactatggagtggacatcggtaggaagaagaaggtgcctgttgctaagaaggatgcgactgagggacaagagggtgaggctatagctgaggaaacaaagaagagtaaccatgtgcagaggaagattgagaagcgacagcaggaccgtgcactcgacactcatattgaagagcaatttggcagtgggagattgttggcctgcatttctgcccgtcctgggcagtgtggccgagctgatggctacatccttgagggtaaagagctcgagttctacatgaagaagctccagaggaagaagggcaagggtgttgcatcttagagcattcttttagctagaactgcaaaatatcttctacttgggggttttgttgttagtctttatgcatatcatttgcggacctgatgaacacttcataagtgaatcaactctcgattccaagaattgataattttcacatgcggtggttgtaattgtgatatttaggtttgctatttattgaaacttcttgtctaaagcagttttagtttaccttgaagatgattgttagaaacgagatcctatccaatctatattgctgtttggttttcactttatagctgctaacatttgattgcatagtaagaactggtcacgcgtacgacaatc

SEQ ID NO: 23854 - DNA, 4324 bp, Zea Mays
cgtgaagcagcgaagcgtcccggcaaaggcacccggtggccgcgtccagcgcctaccgtttccgggggggctcctcgcctcctcttcccccgtccacccattctcctggccgctcttccccttcgtcgtcgcactccgctagctcacctcctcgtccccatataaaccatatccctctccgggccccgcgcagccgccggcgacaagcgcgcaggagcagcagttgtcgcgcctcactgatggcgaccgccgtggcgtcgcagccgtgccaccttcccctcagcgccggcggagatcccagcacttcgaatgttcatactctggagaaagtatatggtttcagattcatatgcagaagcattgttgatgtaaagactcacaaattccactcccgcatttcaaagaggaagtgctacttgaggaactcactgtcggagtgtgacaggaccatccacagtggtagatggttggagtttcggagacacaagggagtcttccagagaactagaaggatggttcacattattccattggcttctgatggtgatggcaaccatatatctgttaatggagctctgcaagttggttctacaagcaacattgatgaaataaagttgaaattgaataaagcattgcagagtgaagatatcagcaatggactcgtccagtcgatacatgatgctgcaagatctattgagttggctctcatagagcacagcaaattgccaaagagctcttggtttccaaagacatggctaggcgttgagaacaatgcttggataaaatcactgtcttaccaggctgctgtagactcattgttgaaagcagttatcgatgtttcatctcgtgggaatgacagagatagagatattaatgtgtttgttcaaaggagtttgtcccgcctgctcaccccccttgagagtgttatcaagaatgaattatctaagagggaacctgcattgtatgaatggtattcatccgatcaaaatcctttggtggtgagacaatttgtaaacatttttgaaaatgatccaatgttttactctgctacagcaatatgccttgaaggcgagccgatgaatactagtgaaagtgatctttctctgcttatgctaggtttgatctgtcttgctgcaatcacaaagtttggatcagcaaaagtttcttgtcagcaattctcttcaatggtgcctgatattattggtcgattcatggatatgcttcttgagtttgcccctctaagtaaagcatataacttggcgaaagatattggtcttcggagagaatttttgtataattttggtcctcgtgctgctgttcctaaacttggcaatgaccatggacttgaaatatcattttggattgaactggtgcagaagcaattactctgggctcttgatcgtgaaaagatatggtcaagactgacaacaagtgaaagcattgaggttctggaaaaggatcttgcaatatttggtttttttgttgctttgggtagaagcacacaaggatatttgtctttcaagggtttgactgatttggatgattcactgaatggtattgtaaggtatcttatcggtgggagtgtactatattatccacagctgtcctcgattagttcatatcaactgtatgtggaggtagtctgtgaagagctcgagtggcttcctttttacaatgatgatgttttaagtgcaaaaactgatactgaaggtagagaagaagtgcctaaaggagaagtcatatcaagagtcctaaatgtgtgctcttactggatgactagttttacaaagtacagctcatggcttgagaacccttcaaatgtgaaggctgcaaagttcctttctaagggacatgtcatgttgagtgactgcatgaaggagcttgacatatcaagaaatatgtcaaacgacagtggcttcctagaacctgaagaagaattggatactggaacagaattagcttcctttgacaagtcgcttgaaaatgttgaagaagctctggttaagttagaaaatttgcttcaagaattacatgtttccagttcgcactctggtaaggaggatctgaaggctgcatgctctgatcttgaaatgataagaagactgaagaaagaagctgagcttcttgaggcatcctttctagcaaaagcagaatatctggaggccgatgcaagtagcggatcactatctcctgcagaggaaggacctgtaaagacaagtagcaggacgaacgatacatcagcaccacaaaaaacaggaagcagggtggataataaacgtcgcccattttgggacttctttggtcggtctttgaaagttgatccagctcttgcagatcaggatctgatcactgtcgccaatgtggagaaggaaggcatggagtcaaatgacatcctccgcttcgaacagttaagacgtgagctgattgagttagaaaagagagtgcagaagagtgcggatgaagctcaaaaggaggaggagatggttgtcgcagaaaaaacaactgcaccatcgcctggatcatcagtttcttctcgtcagactaccaagaaagaaaatgtcataactaaatcagtggagaaggtcaaagagactacaacgactgtgttgcaggggacacaactattagcaattgatacaggagctgctatgggtttgctaaaaagagctcttattggggatgaactaactcagaaggaaaagcaggctcttcaaagaacattgacagatttggcgtctgtcgttcctataggaatactcatgcttttgccacttaccgccgttggtcatgctgctattttggctttcatccagagatatgtgccatcgatgatcccgtccacatatgcccccggtaggttggatctccttaggcagattgagaaggttaaggaaatggaagttgctgaaggcagcagtgaagatatattggaggaactgaacaaatgaaataagctgggcatgtacagatggacatgattatactgcttagcttacggtctttcctgtaaagttgttttggaacaagacatttgagggggtttgttttatctaaagattctttgaatggcatacccgctggaaacagaagtgcaaggccctaggaataagtaaccaatcattgtgtcgacaaatgttccacgtctgcaggctggtgtatacataaaacatactccacattatacattacatgggcggctcacggtgcccttcaacatagtagaggatgaatgtccaagttcctcctggacagtgttctgtgtagggtagtggttttgatagaggattgtatatctagttggtatgttggtgatcacctttgttttgttttttaggaaccaagcctactacatgcattattgtctgtacccaaatgccaagttcagtgatctcctacgggattgagtggtgcgggcattttctaataataagccaagcccgtgagcaagatgtaggcgtgaacagtgttcgtcagtcgccgccaccgtctcccctcctgatccaatccaatggcgcgcctccacctcgtagccgtggcaatgggcttgctcttggccttgacgacggcgcaggcaccgggcgcgtccacgatgcccgcgcccatggcgcagcctccggcgacctcggcgcctcctcgtcccgcgccatccccgacccagaagaccgctccagctccggcgcccaatgccacggtacccgcccccgcctcgccgccggcgccgagctctatcgggcagacgccgaccgaggcgccgtcctcccctccgccgcccagcgccgcgtccagcgttgcctccgccttgtacgtggccgccgctatggcggctgtcgtgtttttcttctgaggtcggtactcggcgccgatggatccgccgcctatggtatggtacggtgcggtgtggatttgacacgatggctcccgctaccgctggtcgagtttgcttattaggatactagtagttaattaatagttgggttgatcagatcagatctagcgtttttgttgagtggggatattatttcttctacggatctgcacactagggttatgtcactatggttgccattgttattagggaaggtgcaaacttctaatttgaatcacatgatgttgatccaagggacgcataagggacgccaagcttattaaaacgataaaacgatggaacgctcatgggtgaaattttgacttttaaacgtttaaactttgtttaaacatagttttaaacaacataggaaaaataccaatatatcataatttcagacaataatatgaagttaaatactccctccgtcccaggatataaggcgtaactactttttat

SEQ ID NO: 23855 - DNA, 824 bp, Zea Mays
ctgttagattgtctaatcagcttttttagtgaatcagtttgagttctacccacaaacaattccaacagttggccagaattcggacgccgtgcacttggtgggccgtcagcagcctttctccatatcgttctcaagaacaccagacgagttccctttcccacagggtggcggtagcagtgtgctgcaccacctccatgcagcccgccctggccatcacgctgaaggcagcagccacactggaagcagcacacgcgacaacgctctctccggcacactgggccccgagtgtgctctctctcttctgtcatcgtcgctgcgtcgcccctcaactgctggcgtccccgccgttggccaaccccaggttactgcctcttcgaccactgccgtgtcgcaggctgcaacggcagctgtggccactgctgcattcgcggccagtgctggccaccatgtgtttgttcctgatgctatgtttgaggatccatcacaggcactgccattctcttggcagtaggattgttttgttgtcctgtttttatgtgctcctgttgtgttctcgatcgatactctagtgtctgatggctgggaattcggggtacctgtgcacttgcagactcaggttgtggtccgtcagagatgtatacaagtgacacgacgactagtgctggcatctgaaaggaagtggtagctgctgtgcagagtgtttagccgttaaattcaaatgcgcccgttcaatttttttcttcgttttccttgtatatatttgtttgtttttttttgggcaaaaatatgtgcatgttatgcacttctggaatcgtcgaatcagg

SEQ ID NO: 23856 - DNA, 1025 bp, Zea Mays
ccggctccaattccacccctcgccgccatctccgtctctctctctcccgcaaccaagcagttcaactcacacccgaagcggcgccgctagggtttgctccgacagccgcgaaacctagtccttactgcgccctcccacagaggccgtcattcactaatctacctgctacgcttcgcttcccgctccgattgggagctagggtttagcttatctccgagctcagcttcgggtcgcggcacgcggcatggcggggtacggggaagagaaccagaacgccatgaacgggtacgaggaggaagaggaggaagaagaagttgaagaagtcgaggaggtgtacgaagaggaggaggagggggacggggagggggaaggagacgagggggcagccgccgaggcagcagcgatggcggccgagacgagaagtgtcgatggaggccggggcctagcggaggccgttgggaatgttgatgccggaggcgaggatgagagggatgcagattctagcggcggtgacgcttcggggaaggttttcgtagggggtgtagcctgggagacaactgaagaaacattcacaaagcattttcagaagtatggagctataactgattctgtgatcatgaaggacaagcatactaggatgcctcgtggatttggatttgttacattttccgatccgtctgtgcttgacagggttctagaggatgaacatgtcatagatggaaggacggttgaagtcaaaaggactgttccaaaagagctgtcgtcgaaagatggccctaagacaaaaaagatctttgtgggtggtatcccaccatctcttactgaagataaattaaaggagcacttctcatcgtacgggaaggtggttgagcatcagattatgcttgatcatagcactggacgttcacggggctttggatttgtcacatttgaaagcgaggatgctgttgaaagggttatgtcagaggggagaatgcatgatcttggagggaagcagaaatcagcattcaatagttgaagcacat

SEQ ID NO: 23857 - DNA, 1574 bp, Zea Mays
agctctctcttcccttttatccctcctttttctcatatggaggagagtagtagctttactctctccacgccttgcatcaaaagagcggccatgtcttgggtgatggagtgattagaggtgctactacgccacaagcgcaaccctacaagagcacaaacaaagtggagttttacgggccgctagggctaggcaagcccatggaggagatgctcatggctggaaacgccgcgaatccaaacccaccgccagctgctgcgccctcggcacccggggcccagacccagaggggtggtggcgctcctcctcccgctgcgggtgcggcagcgcctagggctggcgcgaccggaggggcggcgccggcgggcacggagcggcggccgcggccgcagaaggagaaggcgctcaactgcccgcggtgcaactccaccaacaccaagttctgctattacaacaactacagcctgcagcagccgcgctacttctgcaagacctgccgccgctactggaccgagggcggctcgctccgcaacgtcccggtgggcggcggctccaggaagaacaagcgcagctcgtcctcggccgcctcctccacctccgcggcgatgtccggcacggtctccgtgaagaaccccaagctggtgcacgagggcgcgcaccacgacctcaacctggctttccctcaccacaacaacggccgcgctctgcagccaccggagttcccgtcgtcgttcccgagcctggagagcagcagcgtgtgctaccccggacccgccatgctgggcaacggcgccgccggcaggggcatgggcgcgctctcggctatggagctgctcaggagcaccggctgctacgtccccctgcagcacgttcagctagggatgcccgccgagtacgcagcacccgcgggattcacgcttggcgagttccgcattcccccgccgccgccgccgcagtctcagagtgtgctcgggttctcgctggacacgcacggcacggggggttacagcgccggcgggttgcaggagagcgcggtgggcaggatgctcttccccttcgaggacttgaagccggcggtgaccacagctggcggcggtgcaagcaacgacggagctgatcatcgtcaaaacgaccacaggaaagatcaagctgcaggcgacggcagcagcgtcaccggtggccacgagactccagggttctggagcaatagcttgatcggaaatggcagcagcaatggtggtggaggcccttggtaaggcggcgcggcatgcatggctcatgcacgcgcgcgccgttgtcagcatgcggagatagggatagagtcatagagacaaggatccaagttatcaagagggtacggtggaggaggtgattagtgttcacatatatggcgtttgatttttctctggttgtttaatttttctcggatcttcgtgttcttgtgtgtaaatcgacttgggggggctaacacagcaggatatacagattgttaaggtggtgaaccggtgatttacagctagcttctcttatccaatggatctcttgtttctgattgtgcaatatataagcggtcaatc

SEQ ID NO: 23858 - DNA, 2646 bp, Zea Mays
aaaaccgcccccggttaaaaattccgaacgcatcacgcaatcgagaaaaacacaaaccgaaaaacctcctctacagtcccatctaggcgcccctcctcggctccgatccagtttcgccggcggccatgtcgcagccggcggcgacggtggccgcggcggcgcagccgcagggtcgcggccccgcggggcgccagggcggcctggggcagagcatcgcaggcatcgtgcggatggcggtgttctggtactttgcgtccaagttcttcgggcccaagcgcccacccgcggaccccgggatgctcatgtccaacctcttccagaagggcgagccaatggatatgtggatgtatttgtcagagaacgagaagttcaacgattttgctaatgaggatgcacttatttggcacgaggcaaacataccatatgcagtctggggacctaccagtactagaacacggtcattaacgtactatccgtcagaggctctcaagcataatggctctttgtatgctcatgtttacttcgccccgttcggggttatcctgtggaccctacagatccagaatatgagcagaaatcttcgtttgggaggacccatcgtatctgttgtggcattcttgccaaaatcaaaagctggtaaaaagaagagcttgcttggagattcagaagagcctgaagagaaagcaccgcgcaataaggagaataaagaatctgaggataaagatgagggtccgactgaatatatatcttattggaaaccaaatgtaacaataaatcttgttgaagatttcacacggtatcccaacaataatgtacctcccattgttgctccatatctgaatgtggatccagttacgggcgattattatcctacagtattcttcaatgagttttggctattgaaggataaattaatagcgctcaacgagactgtggaggaattgcccttaaaccttgaagttggtcctattagcatgaccaagtggcaattatttttacagattgagcagtccttccaggttcatcgtagttatggaagtatgcttgaaggcgaggctgatgaactcaagagggtttttcttgaaggaaatccttatcttcttggattgactatggtcgtttctctattacactccctgtttgattttctggccttcaaaaatgatccagttctggaacaagaacaagtccatggaaggtctatcggcaaaatctgtggttctgaattttgtgtgtcaactagttgttttcctgtaccttcttgacaatgacacttcatggatgatccttgctagctctggagttggtgtgtgcattgaattttggaagattggaaaggcaatgcatattgaggttgatagaagtggaaaaattcccatgttgaggttccgagaccgtgaatcatatgcacagaataagactaaagagtacgatgccattgcaatgaagtaccttacctatgtacttttcctccttgtggtcggtttctctatctattcacttaagtatgaaaagcacaagagctggtactcatggatactttcttctatgacaagctgtgtgtacatgtttggtttcattatgatgtgcccccaattgtttatcaactacaagctgaagtctgttgctcatatgccatggagacaaatgacctacaagttcctcaacactataatcgatgacctttttgcatttgtcatcaaaatgccaatgcttcatcgtctctcagttttcagagatgatgttatcttcttgatatacctctatcagaggtggaagtatccggtcgacaagaagcgtgttaacgagtttggcttcgggggcgaggacgaaccggcagcccaggaggctgtggaaggaagtgattcagctgcagcaccccagctaacggaggccgggtccgagacgagtacggaggacaagaaaaccaagtgatctccaatcttttgatcatccaaatacaagcatacatctctgcaacatctgccttcccagcgggcgtgaaatttctttgctgaaactggatgctggactcttgcggtcttgtcttaccgagacgtgctgaccataagataaggcgtgtaacaagggacacgatagtcttttgtctagagcagcgggcgaacaggcacacactgtcacaattacgtttccagttcgtcttttagcagccattactagttgatatgcttgtttgattggtttgtgtacaaattttgtgcatttttcttaaaacacacaattggcggctcgtagtttcatcgtgatgtgttttccctaatattagtgttgcaacgagtgtccactagtgagtgcacacaacggtgcggttctaaactgttcctcacaagaaacaattgaatccctgccaagagaagtagagaagcatgttggtaaccaaattattagatctataggccatatttggttgcaaggatgggttctgattcttgctaggggatggaagcgggttctgttgttagtctccggtgaatcattttatgtgaagcggttgttttgaattagagaaagaaaagagagagatcatttcccagttttgaattgttcggatatctgccaaacacacggtgcgttcctcgggcagtttctctttttatggctggcgctggctgcaccagagtgaaa

SEQ ID NO: 23859 - DNA, 993 bp, Zea Mays
cccgaaattagcagccggcatacacgagagatacgaccagcggtcagccccctttcggcctttccctcccatatactcgccgtcggccagcggatctaatcggggcgggcgcgatggctgggcagaaccagcggctcaacgtcgtgccgacggtgacgatgctcggcgtcatgaaggctcggctcgtcggcgcgacccgcggccacgcgctgctgaagaagaagtccgacgcgctgacggtccagttccgcgccatcctcaagaagatcgtcgccgccaaggagtcgatgggcgagacgatgcgcgcctcctccttctccctcgccgaggccaagtacgtcgctggcgacggcgtccgccacgtcatcctccagtccgtccgcgcggcatccgtccgcgtccgctcccaccaggagaacgtggccggggtcaagctccccaagttcacccacttcgtcgaccccgccgcggcctccgggggcccctccaacgcgtccccgagcctcacgggcctggcccgcggcgggcagcaggtcgccgcctgccgctccgcgcacgtcaaggccatcgaggtgctcgtcgagctcgcatctctgcaaacctccttcctcactctcgacgaggccatcaagaccaccaaccgccgcgtcaacgcgctcgagaacgtcgtcaagcccaggatcgagaacaccatcagctacatcaagggggagctcgacgagctcgagcgcgaggacttcttcaggctcaagaagatccagggctacaagaagagggagatcgagcgccagatggccgccgccaggctatttgcggaggaacagcttgccgaggatctcgcgcttaagaggggtatctccgtgggggctgcggcaaacctgctggttgctggtggggagaaggacgacgacatcatcttctgaccactccttccatggccatccagtcattcaatcgatttgctgagggagcggcctgcttgacaaagcgcgg

SEQ ID NO: 23860 - DNA, 414 bp, Zea Mays
cttacagctctagctccatgattttctggagcacctagcatgaatggagttgtagtatctgagatcccaaatttaatttgtttcaagatgcagaagaaattgcaacactcgtaatggttacatagggacaaaagtagataagaaaaatagcaaaaagatagtggtttaccagagagggcacttgtgcccaaattggcctagagcatagcgactcattatccttccaccgttggtggcgggcggtactctctgctctgtgaggccagcctcacgcaatgtccaccactttaggtgttgggatataaaggctttcgccaagacacccgaaacccactacacaacttggaatgggtggtccacagtttgtagcactagacccaggcacacgctccacaattgacatccacactacct

SEQ ID NO: 23861 - DNA, 166 bp, Zea Mays
tgattactcgctcgaaatcattgggccgtctgggcttgctccgatccagccttatgtcgatctgcttcactggtcgttcctccctaggcccacaaaggtatgaccttacgatttattgggcccttgggcctttcgtgaggtcttttatccttccagtggacccagg

SEQ ID NO: 23862 - DNA, 1373 bp, Zea Mays
cccgggaatacggaagacgctgaggtcgcgtttatgatcagaagaaggcaatgatcaacttatttgacctcagcgcagggatgtctagcacaaacatgctcacagatcgagctcgtatagatggttctccagcgtgtagaagcaggcaagatgccaagagaacagttgatcctgctaaagtttataccaacgataaagtaggagctagtaactggagctcatccagaaataaatcaaatgtgtctccattgaatgtggcgttagaaaaggagatgtccaaggaattggaatcaaagaagaagtcaccaagtgtggttgccagattgatgggacttgaagaagatctacctggtcaagagccagcattaccttccactaaaagaaatttgaagaaaagacacctaaatggcaacttggtcaaaacaaacaatctccatcgacatcaagagcagtaccattccagtatgacaacatgcgacaaacacataggacccaaagaaacagttgaatttaaggatgtttatgaagtcagtgaagaaccattgagaacataccattttcaggaccaaacttttcctagggaaatgtcttccaggagcaagagagacataaggatggaaattgttcgtcagaagttcatggaagcaaagcgtcttgctacagatgagaaactcctgcattcaaaggagtttcaagaagctcttgaggttctaagttctaacagagatttgttccttaagtttcttgaggaaccaaactctactttctcaaagcagctagctggacttcacagaagcccatcaccacctcagacaaagcgtattactgtgttgaaaccaactaaatttgttgagagcgattgcagaagggaaatcagaacacacagaataaatgaaggaaatgaacacgtgatgcggaggacacactggagatctcattcagcagaagataccttatcccagccaactaggatagtggtcctgaagcctagtcctggcaagcctagcagaacaatggctaggctaacaaccgaagcagccccagctcagttcgctgagcagataggtttttatggaggtttagaaggtcacaattacccatcagatgctctacatcggcgggatgagtctttattatcttctgtatactcaaatggctatggtggagatgaaagttctttcggcagatcagaagttgactacattgatgaagaagatagtaacctaagtgactcggagatcgttagcccagtaccgccgctgcattcatgggatcacttcaaaagatacagcagtcctcactcaggttcaacttttagcagaacatctcggtcgcccgagtcatctgtgatcacggaaagctaaaaaacggct

SEQ ID NO: 23863 - DNA, 3328 bp, Zea Mays
atcctgcgccttattatcatcatctaggtgtaattacttccgtttgtgctaatcacctcgtgattgcctgcaataaggaaccccagcccccccaccttgctgatgccgtgcttttctagagaagtaccctgccgcgtcacgcttcgtcctcgcctgctttggattcaacggctttttggaggccgaggccattggtgccatgcggccagcccttttcttctccatggttcccatcgatgtgtttttgttcggttctctcgtcagatctgtataaataggcgcctcccttctccgccattcctcggtcctctgaagcgtttcagttcatcgattcagttcttgcctgaggatccaggaagaggacagcaatgggggaaggtgcaggtgaccgtgtcctgagccgcctccacagcgtcagggagcgcattggcgactcactctctgcccaccccaatgagcttgtcgccgtcttcaccaggctgaaaaaccttggaaagggtatgctgcagccccaccagatcattgccgagtacaacaatgcgatccctgaggctgagcgcgagaagctcaaggatggtgcttttgaggatgtcctgagggcagctcaggaggcgattgtcatccccccatgggttgcacttgccatccgccctaggcctggtgtctgggagtatgtgagggtcaacgtcagtgagctcgctgttgaggagctgagagttcctgagtacctgcagttcaaggaacagcttgtggaagaaggccccaacaacaactttgttcttgagctggactttgagccattcaatgcctccttcccccgtccttctctgtcaaagtccattggcaatggcgtgcagttcctcaacaggcacctgtcatcaaagctcttccatgacaaggagagcatgtaccccttgctcaacttccttcgcgcccacaactacaaggggatgaccatgatgttgaacgacagaatccgcagtctcagtgctctgcaaggtgcgctgaggaaggctgaggagcacctgtccaccctacaagctgataccccatactctgaatttcaccacaggttccaggaacttggtctggagaagggttggggtgattgcgctaagcgtgcacaggagactatccacctcctcttggacctcctggaggccccagatccgtccaccctggagaagttccttggaacgatccccatggtgttcaatgtcgttatcctctcccctcatggttacttcgctcaagctaatgtcttgggttaccctgacaccggaggccaggttgtctacatcttggatcaagtgcgcgctatggagaacgaaatgctgctgaggatcaagcagtgtggtcttgacatcacgccgaagatccttattgtcaccaggttgctccctgatgcaactggcaccacctgtggccagcgccttgagaaggtccttggcaccgagcactgccatatccttcgcgtgccattcagaacagaaaacggaatcgttcgcaagtggatctcgcgatttgaagtctggccgtacctggagacttacactgatgacgtggcgcatgagattgctggagagcttcaggccaatcctgacctgatcatcggaaactacagtgacggaaaccttgttgcgtgtttgctcgcccacaagatgggtgttactcactgtaccattgcccatgcgcttgagaaaactaagtaccctaactccgacctctactggaagaagtttgaggatcactaccacttctcgtgccagttcaccactgacttgattgcaatgaaccatgccgacttcatcatcaccagtaccttccaagagatcgccggaaacaaggacaccgtcggccagtacgagtcacacatggcgttcacaatgcctggcctgtaccgcgttgtccacggcattgatgtgttcgaccccaagttcaacatcgtgtctcctggcgcggacctgtccatctacttcccgtacaccgagtcgcacaagaggctgacctcccttcacccggagattgaggagctcctgtacagccaaaccgagaacacggagcacaagttcgttctgaacgacaggaacaagccaatcatcttctccatggctcgtctcgaccgtgtgaagaacttgactgggctggtggagctgtacggccggaacaagcggctgcaggagctggtgaacctcgtggtcgtctgcggcgaccatggcaacccttccaaggacaaggaggagcaggccgagttcaagaagatgtttgacctcatcgagcagtacaacctgaacgggcacatccgctggatctccgcccagatgaaccgcgtccgcaacggcgagctgtaccgctacatctgcgacaccaagggcgccttcgtgcagcctgctttctacgaggctttcgggctgacggtggttgaggccatgacctgcggcctgcccacgtttgccacagcctacggcggtccggccgagatcatcgtgcacggcgtgtctggctaccacatcgacccttaccagggcgacaaggcgtcggccctgctcgtggacttcttcgacaagtgccaggcggacccgagccactggagcaagatctcccagggcgggctccagcgtatcgaggagaagtacacctggaagctctactcggagaggctgatgaccctcaccggcgtgtacgggttctggaagtacgtgtccaacctggagaggcgcgagacccggcggtacctggagatgctgtacgcgctcaagtaccgcaccatggcgagcaccgtgccgctggccgtggagggagagccctccagcaagtgatgcgcgacggcggccacagacctgatcgatcgatgagcgagagggagcactcggagtgtcgtgtcttttcccttgccatttctttctttttttcccttcccggaggcgaaaaaaagagtctgcttttgctaggcggcgggcgttcgttgctgctctttgcttcaagagttaaatttacctaccttgtcaaggtcttgttccatcattgatccgggtgtcgcttttttagtagtctgatggactgttagtagtttgcgttgcgtcggttgagagggaacgttggtggtggtggtgtgtgtgcagtcaggcgtggtgctccctttgtttcctggatgggatgttgctccttgaataataatcgtagtggccttggagcccttttcctgaaataagagcagcatcctagtgcttacctttgcagctgtaactggtgtttgcctcaggatttttgctcctcccttctatggattgtgcttaaaattctctataataaccttacagataaagct

SEQ ID NO: 23864 - DNA, 1328 bp, Zea Mays
cagtatggatggtagatgctggaaacgagctgacattctccaaagtgcattgagggaaggcgttgataaaataaagtacagagcatggccgttggtaccgtcgatgtctgctaggatggatcaccaaccattggaggtttctccttcatctgactttgtccagataccagctgatgcagttgatgtttgggaagtcgatctcaggcttctcaaatttgaacaaaaattagcgtctggatcatttggtgatctataccatgggacgtactgtagtcaagatgtagctatcaaagtactcaagcctgagcgggttagcgttgatatgctacgtgagtttgcacaggaagtttatataatgaaaaaggttcgtcacaaaaatgttgtgcaatttattggtgcatgcacgagacctcctgttttgtgtattattacagaattcatgcatggaggcagtatttttgacttcctttacaatagacgaggaaattttcaactcccggatgtgattagaattgcatctgatgtgtccaagggaatgaattacttgcatcagattaatattgttcatagggatttgaagactgcaaatcttcttatggatgatcaggttgtcaaggttgcagactttggggttgcaagggttaaagaccagtcaggagttatgactgcagaaacaggaacctacagatggatggcccctgaggtcattgagcatttgccgtatgatcatagagcagatgttttcagttttgggatagttctttgggagctgctgaccggaaagcttccatatgaagacatgacacctcttcaggcagcagttgctgttgttcaaaaggatctgaggcctactattgctgttgatactcatcctatgctcgctgagctactccagagatgctggcagaaagatcctgctctaagaccaacatttgcagagattgtggatatattgaactctataaaggaggcggttcggagttctgtgcatcacaaaaggcattcatgtcgatctcactccgggagaagacgaggctgttgatgtgccagttttatgtggtgccgcacgcccttttcattttatttttgtagtcgagcgataacttcagaatacggccagaagagcttactgtgttcattccgagaggttttggtaactttattttttttaatttggacttatgcttcaaggattttcatcgttaaaaagcttagaggtgcatatccacgtttacatttggcatgtatctgtatctcgtactcgttttcttaagtttggcaggcaaccaagattttaatgaaaatctttaaccattactcactccgtc

SEQ ID NO: 23865 - DNA, 1854 bp, Zea Mays
tcaccagatttggatgcagttcaaagcttttccatatgttctcattacaaattctttgtggacggggaatggcggcatgatgagcgtcaacctaccatatctggggagtttggcatagttaacacactttacttgacaagggaatataaccaaataaataccttatcaagtccaagcacacctggaagcaggatgaacatggatgtggataatgaaaattttcaacgttacgttgtcagatggtaccgtttcagaaggtactctgagagtttcagaggctgcaatacaaatatctaggtgtcgtgtttctgaatatctgagtttgcatacatgctatgatttactcccagattctggcaaggttattgccctagacattaatttacctgtgaagcaatcattccatattctccatgaacaggggattcctgtagctcctctctgggactcattcagaggtcaatttgttggtctccttagcccattggatttcatactcatattgcgggagctagaaactcatggctcgaacttgacagaagagcagcttgaaacacacactatatctgcatggaaagaggctaagcggcaaactaatggaagaaatgatggtcagtggcgaccgcaacagcatctagtgcatgccaccccttatgagtccttgagggacattgcagtaaagcttttgcaaaatggcatttctacagtgccagttatttattcatcatcatcagatggatcattcccgcagttattgcatcttgcatcactttctggaattttgaaatgtatttgtagatacttcaaaaactcaactggtaatttgcctattctgaaccaaccagtgtgctccattccgctgggttcctgggttccgaaaattggtgatctgaacagtcgtccattggctatgttgcgacctaatgcatcacttagctctgcccttaacatgttggttcaagctggagtaagctcaataccaattgtggatgacaacgactccctgcttgacacttactctagaagccctagcaaaagacaaggtctacacacatgttcggctggatgagatgaccattcaccaggctttgcagcttggacaagatgccaatacaccttttggattctttaacggccagagatgccagatgtgcctccggtctgatcctttgctgaaggtgatggagcgactggctaatcctggggtgcggcgggtgttcattgtggaagctgggagcaaacgtgtggagggcatcatatcactaagtgacattttcaagttcttgctgagcttgtgaggagaggagggcatggcggagtttttttaacagtagcaaccctctgggcctttgggtccttgcggataattggctatcgtcagggttcatggtctgtaaagttccttttttttttgtttcgttttttaccatttggcccctcccgcttgtataacctcaattaatataatggcaaccttcatttaatatgaggttacttgagggttacttgaaaaattacaagagatgttctttgcgaatagtctctttatacagagccttatacttgtaatatgcggttttttagctgtcccttgtatttagaaaattaatccgatgtctttggattgtatatgctcttagaacaattttaataatagcccacaacggattttataatgttgccatgtcacatatagttaaataaaagtctactcacataattttatgactaaacaacattttttttttgtcttcggtccgccatttacgttttggtctccatagtacggtaaggcatttttggtcatccgtgagtttttctgatcgattaggcattttaagtcttcggtctgcc

SEQ ID NO: 23866 - DNA, 7040 bp, Zea Mays
cgatcccggttgggaatggcctaaacgaacgaacaaggccactcggccccatccggcatccccgacccccgagcgtcttctttcgtctgctcgctctgcgctcgcatctaccatggagactagggtctagggtttagtgcgccgctgcctacatcgccgccatcctcaacttcctacgggatcctgacgaggcgccgtatcatcctcaacgccgcgaacctccgctcccacgttatcctcacgcccaccagtagctctcggcctctacctcgttaaggcttgatatttgactgggacactgggcaaattttaacaagtttcagcaatggggtttgataatgaatgcatcttgagtattcaatcccttcctggtgaatatttctgccctgtttgccggacacttgtatatccgaatgaggccctacaaactcaatgcacacatctctactgcaaatcctgcttggcatatgtagtggcaaccacacaagcttgtccttatgatggataccttgtaacagaagctgattccaagcctcttgtggaatcaaataaaacccttgctgagactattggcaaagtcgcggtctattgcctgtataataagagtggatgccaatggcatggagagctatctgcctgtgtcacacatggtactgcttgtgcatatgggaactctcctgttgtttgcaatcgttgtgggacacaaattgtgcatcgtcaagtgcaagaacatgctcaagtctgccatggcttacaatctcaaacacaacaagctgatggtagtcaggtgcagctggcaacggcaacaactcagccagtcatccaagattcatcacttgcctcagctggatctgctgcagctgcagctacaaccctaacaaagccatcttcaactacagccacagctgtaacagattctgcagcagcaacaggaggggcagctggtgcaaccacagcagctgtgccttcttcagcttcatctatttctgcttcccaaactccaacagctgagcagtggtaccagcagcagcagcagctccaatactcgcaatactaccagcagcagcaccctggatccaacccttacatgcagcaacatcaacaatatgaccaataccagcaggcatatcagcaatacatgcaacctccaatgcaagtaccatcccaaaatgtggtgcaaggatctgcacaacctgcttcttatgttcagcctcaagttcagtcctcccaggtgatgatgcaagcccaaagtcagccccaggtccatccattgacgagtcagccacagcttcaacagcatccagttcaaccccgaccccaaagtcaccctcatatttcccatgttcaagcaccttcaggtcagtcgcagcttcatcaaccaattcagtcagcccaagttccacaggtccaaccaagtcaagttcctctccaaccatctggtctccaagtacaatctgcagcacatccatctgctcctactcaagttggtaatcagcaatttgcgactcaagcaatggcgtatcaggtccagccacatgtacaagctcaacctccgcagcagcaacatattgttgcacatcaacaacatccacatatgcaagctttacccctacagcaaaatattcaacctaagatgcagctaaactctcaagttcagctacagcctccacatgtccagcagcaagcttacccacaatctcaggtctatcctcaacagacacatcatatgcactcccagaatactacatatgcacagcagcaaacccaaggtgctttgatgcaacctgtacatgtgtcccaccaacaaacacatgtttctcatcatcctgcaccgatgcgtcctccatcgtcaggccatcagccagctttgcagcatcctcaggcccagggaattcaacatacatcacaacatgaaaaacatattgggtttcatgctcagtggccaacaatgtattccaacattccttcccaagcaccaccacagggattgtctgtgcactcatctgtttcctcacaatcagttcaatcataccagcaaggaatgtcttcatcacaacagatgcattcccaacctggtcagccatatacacaacagcatgttactggcaatactggacaacatgttcaaacttctgctggcagacctatggcccatcttgcaccaacacagcaatttcagcagcaacatccagcaatgcttagaactgagtcacctgctgctgggcactctattgggcagggtcctttagatcttgaaaaacatacttcaaaatcagggaagttggataatgcaactattgctgctgtcggtgaaaataaaaatagtggtcctgagtcagttgtcatgagacctacaaagtcacaattgggtgatgaaaacatgaacagcgaacacaatggttttgttggtgttagaaaagatgcagtgcaaactggcattgtatcacacaatttagatggttcaattaggagggatgggaatactgaccaggcaggcaattcacatggcccacttgtgcagggaggcaaagatcacaaggcttcagatgcatctactgatcatgagaaaggacgactgtttcaacaggcatcactgcaaaatgcaggggcaccgggctcttatgtgcccccaggtgtggtaccacatccatctggaccagataaaatgcttcctcagcatatgacgaatcatggtcatatgcatggtttctctgaaaatatccgtcctccgctgcaacaaccatatggtgtgtttcattctggaacgataacaaggccatttggagagaaccagattcagatgccaatgccacagcctgggggtatcagacctggtgatggtatgattcgtccttgtttggttggcccattacctggacatcatggtgcagtgttgccttcttttgatcttgaacgtttgggtcagccacgtcctcttggaatgttgaacagcaatgactttggtggtgaggggttcaacgcttcagggggtgcagcgtatcctgaaagacatgataataccgaagacagtcggaaacattttccagcaccagcccctctagatgatcagggcttgcgaagggaccctagacattttgagagagctttaggtagacctgatggtttccttgattcagtacctggaaggcctccatttgcaaaccacagaagtgcaggtttgcatgaggattttccaagaaagcaaaatgcaactgccagtcaccctgacttcctgtcacatggagcagaatttgatcatcacagggctattggaatgcctaatttcagaaatccaggcccatttgctcaagggacaagtggcggtcctggtggccctcctaaacaccagcttggctctggtaaccttcctgggaatttacattcttttgagggtctggacttccctccagctcctttcaaccttggtgacatgcatccaggtgaccctcatcttgtcgctgaatatgctcagcatggatttcctaaaactgcagcacactttggtttgggtggattcttgagaaacgggaattctggttggtgccgaatatgcatgtttaactgtgggagtgcagagaatctggatttgcatgtacaaacaagggaacatcagcaatgtgcaatggacattgtcctgaaaatgaagcaagatgttgcaaaaaggcaaaaactgaattatggagggcccaagtcattcaacaacaaaaaggtttctgggaagggccattttcgtgggaacaggcgctagtgttaactgattaaaattgatgtggttttgaaggttgctactggtgcttatggatgtgtcaatggcaatcgagaattgagatcttttcagacattctgttcatgcggttcagcgtatttgaagggaaacttgctcatgctttttctaatggcgacctaataatagaccatgctggaacttttacaaagagacttgtaattgtgtcatcagacatccataacatggtaaattttgttggaatcttttggtagggggctaatggaaacatgttgaagttactttcagtgcctgaaaattgtgctagttttgcatagtttaaatccaaaaaaatctaagggtgcattggacaaatagttttttttatgtcacagcccaatttgcttaatcatttattttaataaaattattgaatactgactctgtgatatgtccccattcaaaacaagaagggcaaaagtgctgcattcctgaataaacacaagggctagagttgttgacatgtcattgcatgacaacaaagcaatccaaatcaacaaaaataatctcattgaagcggttgcctattttgtgccttgagggatgcattagtgataaagggagacttggaagcctgcaaggaaacacaaaagcatgaagaggtttgagttgggatatgtactttgagtgttagcatgagatgggagggaatcgatggtaaacctaatttagaaccaaaacatgagttgtgctcaaatatagaaggaaaagaaagatatactggttttcatatgaatactggtatgtgcatcatatacgcagtaacgcagagcttgttgataccgaactggagttgtattattcacttctagttagttattcgagatagtgatggttttattgtcataggtttgatgttcagaataggacatcataggattctacaggctacaagcactaaatattatgggtaaaatacttaggtttccaattcactgctgctggacagatgtgattgtttgcatgtgacattttgctgatggtggcctttctctagatgtctgttttaaatcatctgtctttgctgtttgtttgctaaacagaaactgcaaagtgtaggataatttccagcagagggctcctgtcatacttgcatgtttccctaacgatggtaaggatgacatgctttcataatgctggtaaggaaaaataggtattgagcttttattgcaatgcactttgaactttttgacagaagtttttcatatatgtattatggctaaagtgctgaagccattctgtggcctgtcaattacttggacactgaaggttccagtttgtataattgtgaggccatcatgaactgctatctttatctaaaaaaatcatgagctgccatgcttttggccgtaggaaaaaagaactcaccagggtcgtaggaaacaacgtaaggacatttatgtgtaaagtaatggattgtgtatatatatgttcctttggggtaaggagtgacattatggcatgttggataactttccagcgcttagatagtttgcctgaaacaaagctggttgggcatcacataaaatgtatttctcccaattcccaaacgcaggttgcttggggctagacttgttatatacattcttcaccttctcatggattttgtccaaactactcatagggttatcgttgacatgtgtaacttctttgacatactagtatactactgcgattttttatagaactaggtagaaaggctatttatcaagatgatagtatcattcagaagaacttggtgctttcagctctactacccttgactgtagctgctattagtttggatatgacaaatatattaaaagggctccaccttttccttttgctgcatgcacaatttggttcactggtagtggttgcaattgaattgtctacagatttgttccctcttcaaaattatttggcatagtttgctttgctcaagatgattatactgcccctgtttttttctgattggaatgggcttggctaccatgagtccatgatgacttaggccctgtttggaagcacccaatttttaagaaactggtttatagaaattgaggtggttccaaatgtaccagtttatgactcagtttatagaaattagattctcagtttcttaaaaactaagaaggtggcctctcctagctaaatgttaaaaactggttttttaaaaactgggttgcttcttaacgagtcttggcaaatattatgccaaactttgggtagtgatttgttatacagaacggtgggtggaaatgaaacatatctggcaggttccactcagtttctgaccagttttcgacccaaagactggtctggtattaattgcctgaagctgaggtatagactaaagttaaatacatgcatttttgtagtatatatactaaggatcgggccaaattttttgttctcttgaatcctgggttccctcctatttaggtttggattgtagaatcactggtgctggtgccattttttgttctcttgaaatgtatgttgcaacgttgtattactgcaccatatcagtcggattgctgttacagtagtaacttgcagtacagtatgttcaattcgctagtaattagcagctaggtgacattatttgctgttggcataacgtggaggatctatgtttcttttgtctcgtgtttctttgggattcttatagatggtggatgtgcatgggtgctgactactgtttgaacgaactggccacgccttggctctcattttctgccagcatcggatgtttttgactgaccccagggcaccttatatctattgttgtgagggttaaattgtaaaatttctggcccgtggttcattccttaccaactaatgcactcagataaaccaatcaaaagtaaaaaggagaggcgcgtgaagcctaacctacgaaggctacgagtatgaagtcgattatccaatgaagcctcacttacgaaagctatgggtgcaaagttacacatcctgtgaagccttgacgagaagaagaattgctccaagcccttaagaagtcaaagaaccttcactaggtgcatgtatgtgctcgtgaaggccagtcgatcatgaggacccgttaataccatggaatttggatgaaccattgtattttaagccaaaaggtgtttggtagcctttaaaaactctgtatataatactgtggtattatcgatactatggttattttggggtatagaaaactttggtccagaccaaagtttctttgctgtgcgcaatatctgttgagtatgcaagccatggaactggt

SEQ ID NO: 23867 - DNA, 3218 bp, Zea Mays
gccgcagccacttactcgtccccgcatttggatcgtgggccgtgccgcgttcagtggcaatcaccaatggatcgtccacggtactgccaatggtcacgggctctcctccgaggttgctgctgaggtgaacaatcagttcagagttggtattaagactattgcgatcattcctgtgctgccacggggtgtcctacagttaggctctactggtttggttatggaaaacacaaattttgttatgtttgcaaagaagttgtgttctcagctaaacaaccgttcaagcatggctgcatctgcttcggttaagaacacttctagtcagcatggtcagtcacgtcctgatactgcaactgtgtcaactagtacaccaccaaatgcattgctgagtgcatctttgcttaaggttgcgcaacagaatggtcaccctgttagagagcacagtgtctatgctgagcgtgatcttaggtttatacaacaagcatccatctgtgagagtcaatttggaagtaatttacagagtggtgttatgaactcatgtttgacctccccaagcttcgcatcagttaaaaagcagtcacttttgatgaacagcattgggcagttacagttcagtaataatgtgcattcatcagcagatttggcaagggagatcatattaaaatcccttgggcgccaggactcttctatctgcgaaaatacaaacatgaatatgcatcgtggaagatatgtagtatcccttgggcgccaggactcttctgtctgcgaaaatacaaacatgaatatgcatcgtggaagatatgtagtatccaatgatataaatggttctaggaattttgattttcttcctattggtgcgaaagaaagcagagccaacttatcaatccctgcgtcgagtcaaattttggaccacatgccaggaacattgcagcagaaacagtctctagtcccattcagggttacccaatcttctgaattttctaagaaagtggagaaccctgaaagtggatcatttcaaattccttcagttacaacttctgattctggtggtcaggtttctaacagtttcaacatggtccaagagaatcgattgagtatgtcaaacaatgtccgacaagtccaaaagattgacagatttagtgatccaagtgctaatgtcagcactcagagaatgaagaacagagatgaatgcgagccaggaatgcccattgagagagcctcctcgttcctagtcgaacctggtgcagataatgacttgtttgatatgtttggttctgaatttcatcagtcctcccacaacgttggtgctgatttggtcacctggagtggtacagagtctcagaactcagatagagatgtccctgaatcgtcaatatgtttcaatagttcaccacttttcagttcgctagacaacgagcttcactattcaggtatcttatcgctgactgatactgatcaactattggatgctgtcatatcaaatgtcaatccaagtggtaaacagtgtcctgataatagtgcttcttgcaagactgcactgatggatgttcctagcacatctcatctttgttcaatagatttgaagagatgtgagtctcccagcgttccttccctgctaattaagcacgaattggcacagtttgctaaacagccatgtctcgttgataaatctgaggatggttgtctttcccagaataatggaatgcacaaatctcagatacggctttggattgagagtggtcagaacatgaaatgtgagagtgcttcagcttctaatagcaaaggtcttgatgtgccaagcaaggcaaatcgcaagagatctcgaccaggagaaagccctaagccacgacctaaggaccggcagctgatacaggaccgtattaaagagcttcgtgagcttgtaccgaatggggcaaagtgtagcattgatggtttgttggagaagacagttaagcacatgcttttcttacaaagtgtgacgaaaaatgcagacaagctcaaggactctactgagtctaagatacttggtagcgaaaatggccccctttggaaagactacttcgaaggtggggctacctgggcttttgatgtcggctctcagtctatgacatgtccgatcattgtcgaggatcttgaccgacctcgtcaaatgcttgtggagatgctctgcgaggatagaggaatcttcttggagatagctgatttcatcaaaggacttggactgactatcttgaggggtgtgatggaaacacgcaaaagtaaaatctgggcacgattcactgttgaggcgaaccgggacgtaaccagaatggagatattcctatcgcttgtgcgcttattggagccaaattgtgacggcagtggagcggcggacaacactaacaacatgaacatgcatcttggtttggtgcaccaacctgtcatcccagcaacaggtctcatccaatgagattaagactaagaggaaaccctcaagcatcttccaagtgctaagagcaggaggagctcagctaactcctgccatgactagcatcaccaatacgccatgcagtgcaccacctgctttcccgagacaccttaatctgtgcaaaagtgacgtccttcttgagaccaggtcgcagaaatggaagaaggaaaacaacgcaagagtgatcatcaggcagtgttttgttcgtatgatctttagattgtttgttagttagcgctgtttggtcgtatattagtggttttttttgggtactgttatccagaatggaagttcttgggttggtttatttcacacacacaaaaagatggaatgccacctttgttataagtctcttcacattagaaccagtgagcatagctagtgaaaaattgtttgagaagactcttgagtcattgctctgatcagattatttgttattactcactgctgctgcctgccaacatccagaagtagatcactggattctagctgaagccacaatgtcatccagcagcacatggtgctgccaatgagttgcaatgtgatatgtttactttaagcaaaacagatactaataatactagtaggcaatttttgtaaaatgtttgggtatcaactagttacttatcaccatcctatactagataggtgcccgtgcgatgccacggaacataaatctcgatttgtatatcagctatgcttcctatggagcaaggaagcgaacgcaagccagccttttgtattagtgcattct

SEQ ID NO: 23868 - DNA, 3164 bp, Zea Mays
gtccggtccgcgggttgccttctcttgcttacttgctagctcctcgtcgcagtagcggcagcggacgagcagtcgagcgcaacgccgccaatcattccttcctctgccttcctctctccctccccctcccggcgccatctcgacgctcggccccccgcgggcgggatccgtcgccacagatccgctgcctgacctgaccgcccctcatgctcgggtagcgcttttcagtttcccccgttccccgtgggccactcgacccgccgacggagcggaagggcggccccggccgtgaccgcggcgcgactcgcgaccctcccagtcccagaagcggcgtgcggcgaccgggaccggctgctggtggtgaattcgcgccggcgaactgaattcaagcggcgaatcccctcctctggtcctgtctcgagccctcggcgtccgcgcctcctccgtctcgccgccgttctcgacgcccgccgatccaacaccgggtctgcccaacagcccaagtgtttcactagtgatggcagaagtccaggatggtcattatgattcaatgtcacaggccactgatagcttgcgtgttgaacctatatatgagtcgttcctatgcccgcttaccaaacaggttatgcgggatcctgtttctattgacagtggtgttacgtttgaacgcaatgccattttgaattatttcaatgaatgtcttagcagtggaaggaggcttgtctgccctgtaactaagatggagctcagcaacactgagttaaatccaagcatagctctgaggaacactattgatgaatggatgaatcgcaacgaggcggccaaacttgacgtcgctcgtaagtcattgacttctgacagcacagaaagtgatatcctacaagcactccagtatgttgatgagatatgtcagagaagtcgatctaacaggcaggttgtgagaagagatgggttgataatcatgattgctgacttgttgaagaatagcagtacgaaagtacgccaagcggcactagggactctttgctccattgcaaaagatgacaatgaaaataaggttgagattgccgctggagacaatattcgcacaattgtaaagttcttaaatcatgggcagactcaggaaaaggagcaagcggtgtcactgttgtttgaactttcagaaaataaggctctttcagaaagaattggcagtgtttctggagctattcttatacttgttggtttgtcaagcagtaaagtagaaaacttgctcattgttgacagagctgagaagacattggaaaatttagagagctgtgaaaaaaatgttagacagatggctgaaaatggacgattgcaacccctcctgaggctgcttcttgatggttcacctggcatgcaattacctatggctgcataccttggagagcttgttctaagcaatgatgttaagtaatcagcttccaatgagattgaaggaggtctcagcgaccattcttgcaaatgttgtggcatcgggtgcacgttttgagtccattccacttgatcataataggcagaccttggtgtctgaagacattgtacacaatctgcttcatctcataagcaacactggacctgcaattgagtgtaagttgctccaggttttcgttggtctaactgactcttcgacatctgtacaaaatatagttgatgctatcaaaagttcaggtgctattgtcagtttaattcagtttgttgaagcacctcaaagggaagtacgcatgaattccatcaagctcttgaataacatatcaccttatatgggtcaagaacttgctgatgcttttcgtggaaacttcagtcaactaagcagcttggtcaaggtaattgtcgataacaatggtatttctgaagagcaagcagctgctgctggccttgtagctgatcttcccatgggggactcagtcctcaccagacgtcttcttcaagatggggcattcgcagcaatcatttcaaaagttttaagaatccgacaaggggagattcgtggggggcgttttgttaacccattcctcgaaggtctggttagaatagtctcccggatcacatttgtcttggatgatgatccggatatcattgctgttgctcgtgattacaatcttgcttcactcttcactgatctgcttcagatgaatgggcttgacgtagtccagattgtctctgctgtttcactagagaaactctcgcagcagtcaaaacatcttacgaagatactgcctgctcccagcccagggctgtgcttttcaatatttccatgcctcagccagaagactgtagcaactggggtctgtagagttcactgtgggatttgttccgcaagggagagcttctgtctcttggaggggaaggcagtggagaagttagttgcctgcttggataataataacgagaaagtagtcgaagctgctctagcagcgctgtccactttactggaggatggagtggacattgaacaaggtgtcatggtgctgtgtgatgcagaaggaatcaacccgatactcgcggtattgtgcgagaacagaaacgaggcactgcgccagagagcggtgtgggcagtggagagaatcctgaggacggacgaaatagcgtatgagatatctggaaaccagaatgttggtacagccttggtggaggcattcaggcatggcgactctaggacaagacaagttgcagagcgagcattgaagcatgtagataagttgcccaatttctctgggatattttctaagatgggagcacaatgaccacgttccatggaagtactcgtgttctatttgacatgaggcaggcgcagatgaacacttgtgttcccagcaggccttcattggttttgctgactcgcactccagctagatgttgtagcgatctgattggtggaagaagaattaagtattgcacgtgttgtatagtgtgtatttgtacctgtagacttgtctgtactttcgagattggtcagattcatagaataggttgctatccctgttgtgtggagacaatacataatgcataaccgccagcactgggtggaaaaaaaagggaagaaatgtgaagtcgttgcgtcagatatgacatggttttctggtgtatgtcttaatgtctacagaggcaaagtgcaaaggactgtttggttcgctgtctaa

SEQ ID NO: 23869 - DNA, 6380 bp, Zea Mays
cgcaactgccatcgtcctctgctcgtcgcgtcgttctcctctcgaccgcatcgcgcccgtggcggggaacgagccatcgacgccgcgtcgcgtgcctttcttcttcgtcccccccctgcctgcctagctgtctcaggctgccgcccgcccagccccaaaacattcggcagccgagtcaaccgagaacacgagccatccacccaccctgtcccttccccggctttcccccgtcctcggctccaccaattgctctcgcgtcagtggaaggaaaaaccaagggcgagggagggaggagcgcatctccgccccgcccgcgttcccgtaccccgatccgccacatgatctgacaccgcattgccgccgaggtgacccctcccgcccccagaatggaggcgctcaacgagctctgcgacctggtggccgcgcacccggatctcctcctcgccgacaagcttgcatggctctcctcccgctgcgccgccgccccgggtgccgccgccccgcagcgtgcgtcgagggcgcaccttcattcgctcctcgcgttggcgcgcctcctcccggcgggtggcgccggtgccggtgccgaaggcgatgcggcgcccccggccccactcctattcttcctcgcgtcccacgccttcctctcgccggccttctggccccagtctttcgccccggcgccgtttctcgctaggctcctcccgctcctcgccgcggccccatcctcccccgccctttcttccgcgctctccgccgccctcctcgcggcgctcgacgtcgccgacccgacctccgcgccgctcgcccgcgcgtttctctccgccgccgctgccgcggcgcccctgccgctcctccccgcggatgccgcgcccatcgctgcccggctgctcctcgagtttcttggctccgaggaggagccgatcagggccaaggggaagggagaggacaccttgggcgaggaaaacggtggggcaaaggaggtagtgcggaggttcgaggaggaggaggtcgatgagctggagcggaaggaagtcgcattcagactgaccgtgcatatgcttgggggcgagggtgggctagagaccgagcagattgggaaggtcaggaatgctgctgcgcgacaggtccgatcactcacggattttctcaagattagaaagcgggactggagggagcagggtacacagctcagggcaaggataaacaccaaattgatgtgttgtcaagctgcagtgggggtgctggtgcgaagcgtttccaccatggatactgatatcaaatcttcgaaggatatgctccagcagactctagcttggttcatcgaggccaccaagtcgtgcatcctgtcatcctggcggaaactgaagatatgcgaggagctattttgcacactgctcaatgggatcagccagataactgtctcacgtgggggccaacttctgccggtgcttttgattcccttaaaaccgcttgttgtgagcacatgttcgcaggctgacatggcaggcagtagtcctggggctctatttgaagcagttgtgaagttgagctgtgagatcatagagtttggctggacaaaggatagggcccttgttgacacatttgttatgcgtctagctgcttatgttcgtgagcggaatgattacgaggaggaggatggcaaaggaaaagaggcagttccagttattcgacttaatgtcatacgccttttggctgagttatgtgtttgcttgaaaaaatgggaagttgtggacatgattttaccccttttcattgaacatctagaagagggtgatgcttcatctccaagttcattgcgtttacgattattagatgcaatatctcgtgttgcgtgcttgggttttgaaaaatcatatcgtgagagtattgtcttgatgacaagaagctatcttgacaaagttaaagctctaggggcttcagaaaacaatacagttccatcagaagcaacaactgagcgaacagaaactcttcctgcaggctttctgcttgttgcttccaaccttacaagcacaaaactcaggtctgattatcgtcataggttactgtctctgtgctcagatgtggggctagttgctgaatctaaaagtgggaggagtggtgctgatttgatgggtccgttacttcctgcagttgctgatatatgttctgattttgatccagtgtccactgttgagccatcattattgaaactattccgaaacctttggttctacgttgtattgtttgggctagctccacccatacagaataatgaggcacctacaaaaccggtttccacttcattaggtacagcagaaagcagcagtgctatagcccttcaagctgtagctggaccatacatgtggaacagccaatggtctgtagcagtgcaacgtattgcgcaaggaacacctcctctggttgttagttctgtaaaatggcttgaagatgagctagagttaaacactctacacaacccaggtagtcgtggtggtaatggtaatgaaaattctgctgttgggcagagagctgcactttctgctgctttgggaggtcgagttgaggtagcagcaatgaacactatttcaggggtaaaagctacgtacctacttgcagttgctttcctggagatactacgttttagttgcaatggtggcatactctcggctacatctacattgaatagatcaaacagtgctttcagttgtgtatttgaatacctgctcactccaaatttgacaccagcagtaactcagtgtttgacggcagttgcacatagagcttttgaaacagtgctgtcgtggctggatgatcgcatatctgacataggtgaaggagctgatgttagagaatcggttctttctgttcatgcttgctttctgataaaaagcatgtcccagagagacgagcatgttcgtgatgtgagtgttaagcttttaacgcagctgaaggaaaagttcccacaggtcctctggaactcttcatgcttggatttacttcttatttctgttcacaatgagttgacttctggtccagtcagtgatcctgcttgggttgcaactgtacgctcactgtatcaaaagatcgctagggaatggttaacaagtgctctttcatatgctccatgtaccacacaaggccttatacaggaaaatttttgcaagccaagtggagtacaaagaacacaacatacagcagatgttgtttcacttttatctgagatacgtatttgtagtggaaagaatgattggaacggtattaggacggccaatgttcctgcagttatggactcagcagcagcagcatcgggagccaaaaaagaagcacctgacttcactttggaagtactctctactgcagtagtgagtgcaactgtgaagtgcaatcatgctggtgagattgctggtatgagaaggctgtttagtactatgggaggcataaacatgggcatgtctcctcctgggacacaatctttgcacccccatcagtcatttgatgaagtttttgtctccaagtttgtcagtcttcttcagaactttgttgttgcagctgagaaacaaccaatagataattcacaatttcgtgaaacatgttctcaagctacagcattacttcttgatcatatggtgtctgattctagagcaaacctggaagggttttctcagcttatacggcttctatgttggtgtcctgcttatatttctacccctgatgcaatggaaactggaatctacatctggacatggctagtatcggctgcgccttctttaggtcctcttgtgcttgcggaacttgttgatgcatggctgtggaccatagatacaaagcgtggattgtttgcatcagatatgaattactgtggcccagatgcaaaattgaggccgcatcttatcgctggtggttcggcatgacagcattgaacaacttctacttctaggtcgaatgttacaaggaacaatgaagtctccagctcatttttctcaccatcctgctgctactggcactttctttactgcgatgctccttggattgaagttttgctcatgccagtctcaatctaacttgcagaagtgtaatatggggcttcagttgttagaggacagggtataccgtgctgctttgggatggttttcttatgcgcctgagtggtatgaatctccaaacaaaacttatgctcagagagaagctcaatctgtgtcagtatttgttcattttctacaaaatgagcgcaccagtggtcctgtcgattcggtttcaaagttacagggacgtgaaggtgaacctagcatggcagatcacattcatcctgtttggggctgtgttgacaactacacaaatgcaagggaaaagcgtaaacagttacttctgacactttctcagaatgaggcagacagacttgaagtctgggcacaaccaatacatacaaaagatacaacgacttttcgcggtaaaatcagctcggataaatggattgatcatgtcagaactgcttttgctgttgatcctcgaattgctctttctatgcctttgaggtttccaacgaatgctacaatgcaatctgagattactcagttggtacagacacgattactggagcttcgtacaattcctgaagcattaccctttttcattactccaaaagcagtagatgaaaattcagtgctgttacagcaactaccacactgggctccatgttctgttacacaggcattggagtttcttactcctccttataaaggacatccacgtgttatggcctatgtccttcgtgtcttggagacttacccccctgagactgttaccttttttatgccacaattggtacaatctctcagatatgatgaagggaaactggttgaagggtacttgcttggagctactcgaagaagtaatatatttgctcatatcttgatatggcatctgcagggagaatatgttgatgaatctgagaaagatgcagctgctctgaagggcagtgcattccagtccttgctcccagctgttaaggacaaaattatagagagttttactccagaggctcgtgacatgtttgaaagagaatttgatttctttgacaaagtcacatctatttctggtgttcttttccctctccccaaggacgagcggagagcgggtataagaagggaactggagaagatttctattccaggtgatgacctctacctacctactgcaacaaacaagctagtacggggtatacagttggacagcggtattcctctccagtctgctgcaaaagttccaataatgattacttttaacgttgttgaccgtgacggggacccaaatgatgtaaaaccacaggcttgtatttttaaggttggtgatgactgtagacaagatgtgctggcgctgcaagtgattgctctattaagggatgtatttcaagctgtcggattaaacctgtatctttttccatatggtgttttgcctactggaccaggccgaggcataattgaggtggtcccagatactcgaagtagaaatcaaatgggtgaaacaactgatggtggtttattagagatatttcagcaagattatggtcctgtaggttcaccttcttttgaaactgctcgagaaatgtttatgatcagtagtgctggatatgctgttgctagcttactccttcaaccgaaggatcggcataatggcaatcttctctttgatagccatgggagattagttcacattgattttggttttattttggagatttcacctggaggtaacatggggtttgagagtgcacatttcaagctaagccacgagatgactcaattgctggatccatctggaactatgaagagtgatacatggaaccaatttctcaggttgtgtgtcaaaggatacctagcagcaaggaggcatatgaatgggattttaagtacagtcaacctaatggtggacagtggccttccttgctttagcaggggagatcctatcaataatcttcggaagcggtttcatccagagatgaatgaacgtgaggccgctaacttcatggtacgaacatgtgctgatgcttacaacaagtggactaccgcagggtatgacttgattcagtacttgcagcagggtattgagaaatagtttgtttctcgttttttaagtggcgttcgtgtacatcaattgtatgtagccactatctttttatgtagaatttattttttgagttgtatcatcgggcaaggatggaattcatgtgattaacgtaggatgcttggtgcaaagaggcaattctttttttttcttgcactgtaaaactgccaagaaagtagctagtaagttgatcaagattctgtattgctgtcgcagaatgcattttcgtttactagacatgtatgattcgcatttttatc

SEQ ID NO: 23870 - DNA, 1897 bp, Zea Mays
cttcacccaccagccccccaaatctcacgggctcacgacgatagacccgccctctgtgccacaaaggagctcctctccatcccatctccaacgtcgccccaacccccatcaccgacagggaacccacctctcacgtcgacaccgccagaggaggagatggtggagatacgggcgttgcgatccgaggcagcacgctagagcgacgagagcgtggcgacgtggagatcatgggagtcctgcgcagcgtcgcggcgaggcgcccgtcggggaggcagcgggcacggagagagcggagagtgacggcgacaacgggtcccgcctgtcgcgcgaaccagggaaatatctacatctcgtctgcgccgccgctgggatttattagggttctacttctagcccaggccaactccacaccaatccaatcctggggcgggcgactgcctccttccctcgatttgacgtgcgcttcctcttcctcgctcgctctcggtcgcagtcacagttcttctttgactgcaagggataggcagcaggtcttcttcagcctcttttcaattctccctttctgatggaagctggcgtgccggaaggtgccgagcaggtacatgtctcagctgaagaatccgaagactgccaagaaaggcgaggagaccacggtggccaagagcgagaagcgggggcaagaatctaagacgaatgccaagaagaaaatcttaggacgctcacggaagtgtgcccatgccgaacctgatggggagaaccgaaacggttgcagcagcactgatgcagacgagaactcacttgcagaaactgctgcctccgatcaggagaggaaggtggtgctgcaggaattgagaatcgaggtggatacatcacgagctgacaattccaatgacaacaaggagaatctgtcgagtgctccgagtgatgaagaagcattgaacaattcacattctgaaaatgaaaacagacagttggagaacaatgagaacgttcctctgaacgagaatgttgctctgaaggtggctaaactgcagagcaaagtgcatcaagagcaaccaggaaagctcaagaaaactaccaaccctaggccattcaggctaaggactgatgaaagaggagtgcttaaagaagcaaaaccagagaaaaggcagccgttcactgagaataattccacggcagtactcaaggatgcaaacagaggagtgacgaagaaacgaagcacccagattgtaacggctcagcagctcgatgagtccagctccaggccggccgtcaacagcatccaatgcagagctgtgaaaccggagagggtttctagggttgcatcatcaacacgaagagccaaaacagcaagtgaccttatggcaccttcttcccggactgggaagaagaggaaggcggctacggtgaagctgtcgaggatccaaacaccagctgcttgagctcgggcagatcaaggaggaaatgagaaactgccgacaacggtttttgttgtctgctccagcgacgagttctgtatttattactgcgtcgaattcgttttccggattaggtggatttatgtacactgatcatttctttctgcgagtcgtgtggtggaacccctctgctttgttaatgtaccgccaccgaccagattttttcttcttctgtagaatgattcagaatttgattatttttctgtaacttaattgaactggggaaaggaggcccggcccaacccaacccatgaaacatttcaattttagctgtgtactaggatccatttcatcttgctaccatgtgttgttgcccttgatagatatcagaaatagggtgtagtgtatgagaagtagagaaccgatgctcttttatagccctcaatagatatcagtttctttcttttctttgatttaca

SEQ ID NO: 23871 - DNA, 1750 bp, Zea Mays
ccgagtcccaagcgggtatccgcgccccctctccctgacgccgcgatggccgcgcccctctccctccccgcggcgtgatgcccgcagcccccctcccctggtgccctcgcccccgcgccccctctccgtgacgctgcgatggccgcgccccctctccctcccccggcgtgaagcccgcagccccctcccccggtgccatggtgccctcgcctctgcccccgagattgtcgccgagcgcccacccctcattcccgtaccctcgcccaagatcgcggatctacgcccgatgtgggcgtggggctgcgtccgagatcgtgaagccccatcgtgccctcgctcgagatctccccctcgccggtcctgctcgcgaagccctgccgtgatagtcgcgcccacttcacccgtcgtgacagccgcctccacgtccacacccatggggagcggatgcgggccacagatctccttccaaactgccaaactcggaggcgacagcccgacaagggccgaccttccatggtaggcgggccccttccatggtaggcgagatctgcggccatggtaggcagcccccttccatatttgactgacatggcacgcactgcagccccttccccgcccccattccaaaatcagccctcaaccacgcatgcacccacatcaatggattgttattgtctgcattagcagcgctattgttctggttggctggaacatggggaggtgtgcagaggtggtggtggtgagttcgttgttcatttttctgtaggtcaaagggccgttggggctggatttcgcagtcgcaacactgaactactgggtgcacaagggcattgccttcatctgcgagattaggaatcggatcctgtttaatatataagctactggccaatgattatggatcttgctggtagaacgatatgatccgcgcgtctgtattccgtaaagttcttacgatgatttttattttgtgtatctgatgccacattatgggtaaatccggagatctattttgtaaaaagtagtaatatggtctggtgctgctgggtaaatctggagatctattttgtaaaaagtagtaatctgaacacctttttggactgtcttataagtggcttctatatttcactgcacatttcaactaatggaaccagggaaacagataaaggtcatgaaaggattctagaaacgatcaacacagttggacatgatggtaataacattgacactgctgatttttgtttatgttacttgaaagtttaaagatctcctgtgtcatataatttatgctatagacatgaattattggctgccttttccccctgcccctgccttttcaaatcctttttgttgagccacttccctagcttgacaatctattgttacctccggcaaaaggtgagttcttggctgccttttccccccgcccctgccttttcaacctatgttcttttcatgggtagcttgattcagtcggtgaattgagcttccggcttcgacaggagactcagagcacactcacggctgctttgttgtttaatcacaccgctaatcgtgttatgaagagaacacatggaaagcataccaactcaattcttgagacttctattgtaaatgcttctttttgaagatctcagtggacacaaaccagacaattcacctggacacaaaactacagcaacaacaacagtgaaccattcatttcaatttagacaaagcagcaacagttttagtcgatcattctaactcaaac

SEQ ID NO: 23872 - DNA, 832 bp, Zea Mays
cccgcctgtccggtgtcgcgtgccgaggctgtgaggccgtcgcgtctcgcgtcactggctccccgctcctcgcagcaccaaaaacgcggcaggccgagaaatgttcccgaccgcgaggaccatgacaccgagcaggagacggaggaaggggagcgggaggcggtggcggttacccgcgcctgcacctggcttcaagcctccgatccgcccaaggcatcataaatgatgaatatgggggcacattgtatgatggattccttggagtgctaaatgctactccggggttgtcccaaatcatttatagcttggcaggagtagcaacaggcatctattcttcactgtcaggaattcagtggaatggaagatatgacatatgccagaaccgagaaaatgtttggaaagtgagaaggtgctttgtattgggtgttaaaggactactatgtctgctattaaacatgtagaagaacacatttcagcataatctagtctacataagaatgttgacagcaagctgaaaaaagttcccatgaaactggtatctgtcaagaggtaactcagagcatgtaccataagcattttctttgatctatagtttgttggattcgttctaatgaggtccttcattaggatcttgaggtgaactgactgtactgtacccattagccggcaattacctaacgtttggtaagcatgtagtccccaccagaaagtaaatagaagtgggtgtagccaatacaacatctggtacatgtcctaaaatatgaaaaatttcaggtaattttaaagtgtgatgggctgttgcatacttgtatgtagtttgatttgatgatag

SEQ ID NO: 23873 - DNA, 2156 bp, Zea Mays
gaagatccctgcccccctgaccacaaccatttcgagtatcgagagacgagaccgttacaccacccccgccttcggagcggacgaaccagcgaaccgcgcgcccccgcccatctctctctctctccctcctcctccccccaccgaatccgtccaccgaatcccctcacactcccatggatcgcttggcgcggccggcgagcccgggcggcggcgggctgggctacgcgtcgcggcggggcctctacgcgcaggcttcgtcgcatcacctggccggcggcagcgcgcagacgtcgcccggcggatccccgaaggagctgtccccagtccaccgccacgcgcgggcgggatccctcggcggcgctggggcggcctccaccgcaggccgccgcgcgggggtcggcgccggggccggcgctcgcgcgcagaacagcgccgctcgcgccgccgcgcagcgcctcgctcgggtcatgggcggcgcgggcggggacgccggaagcgggagcgacgacgacgacgactacgagctatctggtccacccatcgagctctccaacaccccgcgccgcacctccacccgatccccttccccctcggtaggccgtcaccttgcggatcagacgcaggtgggccggccgccgtcgctgaccaaccgttacacggctgggaagtcggtccccatgatcccgtcgatcaagcggccggccaccagtgggccgggggctggagctggttcagagtcgcccatgccgaaccgaagggagcagaggagatcagttgatcttggaagttcattgagagctcgtcgtacatcttcttcacttaatgatgagattaacacacttcaagtggaaaatgaaagcatgtatgacaaacttcagcttgcagaagaaaggtttgatgatggagatgccaaatccatgcacatggagagagaggattctgatgctggcgatgcagcagaaacagagccaattttgattaacaggaaagatgcagcgctagaacaaagaaagattgctatgagaattgcttcgcgaaggtccagcagtgcaagctgtaatgagattgcaacccttaagtcagaagcaaaggttactactaatgtggttacatctctatctcggagagtgaaaagtgctagatcagaattgagatctcttcaggcaacagctaacagaatgatcctgtcacaggaagagctggaggaggttgtgctaaagagatgttggctggcccgctactggacattatgttctaaacttgggatacattctgatattgctgaagaaaaaaaagaatactggtcctcatttgcaccgcttgcgcttgaagcagtcctatcaattgggcaaaaggcaagagatggaactttatcagataatgctgacatggagagcagaagcaaaatgtctgatgtaaatgatatatctaccgatggcaatattgagaccatgctttcagttgagaaagggttgcgtgaattggcttcactcaaggtagaggatgcaatcatgcttactttggctgaaaatcggcatgtcaaacctctctcaggccaagcttctgagggtcggagcccttccgagtcattagttaagtgcggaagagcgagaagatgtacgcttcaagcaggcatggttgacctatttctggaggcgggcgaaaaatcacaacatagaagaagatatagctgatgagaagctacagttttggatagaacaaatcaattacccagttactacgagcgaagtagtagaagtcgagagaggactccacgagctgaagaaactgggaatcgagtctcagctgtgggaggcgacgaggagagctctggatgatgatttgagcaaccacgggagtccaactggatctgaagcttagcagatgcataatgtggagcgaggctctattgccgattttgtgccgtcagaggccctagagccagccagccctcctagtcctttcctttcgcttgcttggtatcttcatgtaacatattgaacttttcctctttttttttcttcttcttttgggttatctatttttatgctagtttatccgtgaaagcaaaaggggtttaaatcgtggaggagtcgtgatgctctgctctctccatctacagcaacaaaaatattatgcattgcttgattttgcaa

SEQ ID NO: 23874 - DNA, 2335 bp, Zea Mays
acgaaaacgaacagcccctcgctttagattgccgcaagttcccccattcctgtagatcgccggcccctcgctcggctcggccatgtcggccggctccacggcgtccctcctcgcggccgtcatctgccttgccctcgccgtgcttgctcccgtcgttcctgggtatccaatgatccagaacttcaccagaaggtggcaggtgtattggttgagtcaaatggtgtcaacaatgacttacaagagctgtctcctgatagaaaatttccacaagatgattttgcaccctactcaaatcacagccatgattggaatcctgctggatcaggtatcatgtggaacaaatataattttcctgtatttctactttcagaagagagtacaaacactcttcaaaagatttcagaaaaaaatgagaagactggcaatggatataaagcaaatgttgcagaattcgaccttgttatgcagacaaccaaagctcaaacacatgattcagcatcctgcctcaaagaacaatcatgcttgcccttaggtggacacagtgtatggacttcattaccgccacttaataacggatctacagagcatccgaaacctttaatattggctattgcgtctcaagactctgcatcattttttcgggaccgtagtcttggttcagattctcccatatctggattgattgctttgctcactgctgttgatgctctttctcacattcatggtctaagcaagcttaagaaacagcttgtgttcgctgtttttaatggtgaggcctggggttatcttggtagtcggaaattcttacaggaattagatgaaggcgctgcttctgtgaatggaattagtagcttaaagattgaccaggtactggagattggttctgttggcaaggctatacttgaggaatatccatcattttatgtgcatgctgaagggaatccatcagcttcaaaggaaatattagatgcactgcaaagtgccagcaagtctcttggttctgataatgttaaagtaaaacaagcagcttcatcaaatcctggtgttccaccatcttcattaatgtcattcataaggaagaacatgtcaacttctggagttgtgttggaggattttgattcccacttctccaatagattttatcatagctatctggataactctgtaaacatcaattcctcgtcaatagctgcagccgccgctttggttgcgaggtcgatgtatattcttgctagtgatgactcagttgttgaccttataacactaaacactataaaagtgaacgtttcattggtcgaagaacttattggatgcctgcttacttgcaatcctggtctttcgtgcggccttgtgaaaagattcatttctccaagcaatccctgcccaagtcattatgttggtgtttttctggatgacccatctggcacgcagcttccttcatatgcagatgacacgtctcggtttgtatggaactttttggcagacagaactaattcagcaggcaataaaagctcatgtactggaaagtgtggtgatgaaggtgaagtatgtgtaggggcagaggtggagggtggaggtagatgtgttgtatctacaaccaggtatgttcctgcttattcaactcgggtgaagtttgaggacaatgcatggcacgttcttccagcgaactcgtcagatccaatgggtgctgcagatcccgtgtggactgaaagcttctggaacactattggcctcagggtctacgccgtgcaagatccagcttacgattggcttattcttcttgccgggctcggaatcactgctgcatcttattgcgctgtacactttggcagagcatacatttcaaaggtggcgaagcttgactgaagcgtcagtgagctgccccactgataatgggtatctagagctggaaatagaactaattaggctggcaattcgtagaacattagcagcgcatgagacagggtgattaagctgcgagaaagccgcaataaattatgagaaccaagcacacccgaagcaagtcctccatcattatgcggacgtccaggtcgatgtaatattaatgaaattgtgaccgtgttacgttttgtgttgaactggtactggtaggtaggttatgacacgcctctagctctagttggtggatgtttccggtaacgtgtttttctgtttgtggatcctgcctactcagttttggttgcgtataagcctgcccctcatgaatcctatgagtttgtgaacaccaactattatactggtgacttgcattcgcatgatgattggatcttgtatcgtgtttggtttcgccgctccagttgccactgtttgggct

SEQ ID NO: 23875 - DNA, 2246 bp, Zea Mays
tcgttttctgcttctttctctctcccttcctcctctattctgttcccccctttccacctccctccctcctcgctaaccccacccaccggccaccgcccgcctccagcctcgccggtcctcgccgcccaccccgccggaaccctagctccggagagtgccccggcctccccagccgccgattggttccgggggcccggcgcccctccgcacgatcgcgcgagatccggggtcgccgccggccggggagcagaagccatatgtcgggggtcggcagcggcaggccgccggccgcccagaagatcctgcagtcgctgcgaccgccgctgtccttcgccacgccgtcgcggtcgcccttcgccgcgcccgacgactaccaccgctttccgacaccggctgcggccacggcacccgccgccacctcaggcggcgtcggtgcgggggctcctcctcgtgatactatcgaggaggggctgttcatacggactccgctgaaaaggaaagctacatctgaagaaaatgatgctgctgctgagccaagcgattgtatcattaccagtccaatgcccacttcggtctctggtaaaactgttaaagcttctaaggcaaaagctaagaacagtaaaactgggcctcagacacctacatcaaatgttggttcaccactcaatccaccaactcctgttggcacgtgccgctatgacagttcactaggacttctgacaaaaaagttcattaacttgctcaagcaagcgccagatggcattctagatttgaacaatgctgcagaaacactagaggttcaaaagcgacgcatatatgacattactaatgtccttgaaggcattggactaatagagaagacacttaagaatagaatccgttggaaggccctggatgattcaagtgttcaattagataatggtatttccgctttgcaggcagaagttgaaaatcttagtctgcaggagcaagcactagatgagcgtataagtgacatgcgtgaaaaactaagggggttaactgaagatgaaaataataaaaggtggctctatgtgactgaagacgacatcaagggattacccagctttcagaatgaaacactaattgctattaaagcacctcatggtactacacttgaagtacctgatccagatgaggcgggtgattatctccaaaggagatatagaattgtattaagaagtacgatgggaccaatagatgtttacttagttagtcaatttgatgagaaatttgaggaactgggtggtgttgcgacacccgtcaagcattccagtgtgcccagacatcaacccgcggaagatttcaatacttatgctggacaaagtagcacaccaatggacgtggcacatgatgtacagcatggccagaagattccccaggatcctagtgctttgcatgactttggagggatgacaaggattagtccttccgacgtccatacggattctgattactggctcctaacagagggggatgttagcatgactgatatgtggaaaacaggacaagaagtgcagtgggaccagatggatttcctgtcagaagatgttgtcacccctcgagcccataatcagcagccggtcacagttgacgggccacatatggaggttccaagcatggacccataagacattaatggctcaacaaaactgacatctggagcggtgagttctcgtgtgacagcaaatgtttattgcaacagaagggccagacggtttcatgagcgtatgtcatctggagtgtagtcagggcagagcagtccacaacttcagattggtgcacgcccggcacctctgttgtgaagactgacgagctcaactgactaagttaacagtctactgcctgattagtaagcgcagcactttagcttagcagacactgaagcgccagtttcttcgtgactggtgctgtgcacttgctctcatattcaccaccgctccattcgcttaccaagctaacattatcataccagatcagtggacctccactgaaaaatgctgcaaaatgtataaaacatcaggacaaaacagtgcacagtgcaaggggtgttggcgttacaggatgagctatcgattgaaggcaggaaattctttgtacaattgtttgatgccccaaaacagaacaaagcagagctgttcgcttgtaaacaaatgtttctatgcatgtatttaagaggagactccatttttttacatcaatttgatccatacagtcaaacgtataca

SEQ ID NO: 23876 - DNA, 4729 bp, Zea Mays
atgaaaaaacgcaacgaaaccaacgaagcacaaataataggattttcaaaaaggaaaaagattagcaggaggactggaggagcgcctccgcacgggcacgggccggcagcccggcacgaagcggaaaacttgaaaactagccgagcgaactgccgtctcaattcaaaatcccgtcaactctcacccccatatccctccccgtcttccttccccccatttctcccacagacttcggcctcccgaatctcgaaccctaacctcatcggcgacgaggggagccccgcctccgcctcctgcttctctgttatgaacaacttccatgtctacgaggccattggccgcggcaagcactcgacggtgtataaggggcggaagaagaagaccatcgagtacttcgctgttaagagcgttgacaagtcgcagcgctccaaggtcctcaacgaggttcgaatgctccattccttagaccatgccaatgtcctgaaattttactcttggtatgagacctccgcacatttctggttagtgttggagtattgcgttggtggagacctgaagggcttgcttgaacaggataagaagcttcctgaaaattctatacatgacctggcttacaatcttgtcaaagctcttcagttcttgcattcccaaggaattatatattgcgatctgaagccatcaaatattctgcttgatgaatttggatgcatgaagctttgtgattttggattagcaaggcgcttaaaagacatcgagaaaactaatcctggagatgtgccacaacccatgaggggaacaccatgctatatggctcctgagttatttcgagaggcaggagtccactcatatgcttctgatttctgggcacttgggtgtgttttgtatgaatgctatacaggaaggcccccttttgtaggcagagaatttacacagttggtcaaatctataattttggatcctacaccgcctttatctgataattcatcaaggtccttccaaaatctgattgattgtttactcatgaaagatccagcagaaagattacagtggtctgaattgtgtgaccacaacttctggaaaaccagtatcccaatgatttctttacctcctcagcctgcttttgacaacatgattgaactttctgctacaccatatctagctgagagaaatggtgacaaaccttccagacagctgacaccacccaagcaccgtgaatatagtggccttcggaggaaggatgaaaattctactaagccatccatgacacctgttaaaaatgtgcaaagtgtcaagaaaaattgtggaaaaccaaaagctgagggtttcaaaggtgtaaatatcctcagaatgtctcgcattgctaaattgaatttgcaaagggaaagggacaaggagaactacaggcgtcctcccacagaaacaactgagaatgagactgaagttaatatagataataatgacatggaacttgattttggtgaaaatccagaggctgatgcacctgatgacacatatggatcggataatcctggatctgcaggaaatgaaaagcctcaaagcactgatgctaatgaagagaattgtatggcaaatcaggttgatatgcttacagatgagggttcagttaagcctgatatcatggtgaaaactgagcagaattcttgttcagataacctggatgtggaggctactccacctagtagcacgcgaaaagcacaacgtgcaaaggtaactccatgtcctggaactggttctgagccatctaacatctttgaagcattctggcatccaacagatcttgcagttaaaccagttatgcctagtaggaaagcagataaagctgtggacatggtccccacacttccttttgaagcacttacagcaagtgattatattaagttaccactggaacagatgaatgcattcaacagtcagatacttcagagtttaagtggaacctatcaggtttcagaaaaacaaaatactatcagatacctggagatgttaagcatgaattcagatgctgcgaacaaaataactaatggaccaattatgctgctactaataaaaatgcttcgactgtcaaaaacttcagtcttgcgtgtccaaattgcctcacttatggggttgctgatacgatattccactgctcttgatgtggagctggcaagttcaggaatttttaatgcactatcagatgggttaagggataaacatgataaactcaggcgattctgtatggcaacactaggagagttattattctatatttctacccagtctgatcaagataccaaggaaataaatacccaagaataccctttgaaggataacaggtctgcaacatcttggcaggttcctagtgctgtaattgcactggtgtcatctatcttgcgaaagggagaagatgatctagctcagctatatgccttacggacagtcgataatatatgtagccaaggaactgaatggacatcccgttttgcatctcaggatgcgattggacatctgtgctacatctataaagcaactggaaagcaggagagtacgaggctcattgcaggatcttgtttggcccgtctctctcgcttcagtccatcatgcattcatttaatattggaaaagatatcattcaaggatatagcatgcacacttatcaagggaaatacacgtgaacagcagattagtcttaatattctcaattcggcattagttaatagtcacactgtgacaagcatgaaccggtatattctttcattatcagatgacaaacaattggtccccgggctcatttctctaatagaacagggaactgatgttctacgtgggaagacccttttgtttgttgctctgctttgcaagaatagtcgaaggtggcttcctcatttcttttgcaatgcaaaattaatctcagctgttgatagactgggaaaagagaaggagggttttattcatcaatgtacagaagcatttgtgcagttggttgcttccttggtccctggtattcttgacactgtctccagtgatatacaacaggttatggttggcaaacgccatggacctgttactgctttagctgggcgagctcatccaaagagcacaattcatctgttccctgttattcttcatcttctgggaagtgcatccttcaagcatagagttgtgacaggccatgtattgcttcagttggcaaatcttattaagattttggaggcaccgtttcaggctagggatgatttccaaatgacattgttgcgagttcttgaggctgctacagaggagccttctgttatacttaatgaacacacagtattcatgagtcgtatcattccaagcttatctgtcttatacaagggcaataaagatggtgatgccagatttctttgtttgaagatactcgcagatgttatgattgtgatcttcagtgattcttcattaacttctgacgaacaaacaataactgatctgaaatcaatctctcagaggcattttctaccactgtacccttcttttgcagaggatgaagatcccatacccatatatgcacaaaaactgctagtaatgctaatggaacatggttgtgtaaaagtctctgatattctgcacaaagcaacagtatcccagtgctttgaatttttgctaggagatctttcaaatgcaaatgtaagcaatgtcaagctttgctttgccctggtatctgcacctgagatggacacctatattctttctcagcttcaagttgttagaagaatagggaacctactcgagtttgttgctgcaaaagacatggacgattttcttgaaccaaccctggaactttgcagagcttttattattcgtggcactggcagcaacagaagtgtcgccctctccaaaaacccggcacttcttcttgacagtgccttcagcatgagtattgctgttgatcaacaaacttgtgtcatggatatatgtgacttcggtggcaacatgggtatttttcttgagctagttggcaattcagatccgcagataagtgatttagcatcagattgtgtagtgttgttgctcaaggcagcacctcgagaggctacagtgggcttgttgacaagtcttcctaaattaagcactgtcatggacttgctgaagcatgacagccaccgatgtctgattcgcttattatatggcctagccttctcatgcagacaatacttagcccagggaatgatcctgtcaatatcagtgccagctttgatgcgagttgaagcacttgtttcagttttcaagggctccaatgatagccttcttgctgatgctgcttcttatttgagcgccgaactgcagcgcttacctcgctgtggttgaaggtgcaacttggccaaggaggcaggttggctgctattgttcaaggatgcgcatgtattccttcatccttcgtgcaccatgtacatgatgagctgagcaagtgagcaggacgtcatcaagtgaaggtactttacatcagtggctgatctcagttgcctcaatggccaagtgacactttccgctcgtagatgtgcagggtgcgagggtgttttatgctatcatttatgtgcatttcggggctgctgtatatggcgcttttgaacaataccttgaaggtggctagaagcaaaagaacacttcgttcccccgccaattttgatttacttttctctgcatgcgtgtccactcctaactggcagaagaaggcatcgcaccaatggtcaat

SEQ ID NO: 23877 - DNA, 228 bp, Zea Mays
gagctcgcaggccgttgcggcgcagcgccccgaggggtgcgccagaggcgcgcggataccgtccgtgccgacgacggctgccgggggcgcctagggctcccgggctttggccgccggcgcgggcgacaatggtccacgccccgagccgatcggcggaccagcaggagccgttccgcatgcggccggtgcgcgtcgccagcccccatccgcttccctcccggcaatttc

SEQ ID NO: 23878 - DNA, 1585 bp, Zea Mays
ctgccctcctctttataaacagcgcgcaacgagggagccccggcacttgcttcaatactagctcgctcaccactcaccagtcaccagtctagcaagcaacaacaaaggcgtaggaggaagcttgttttggaccgagcaagcgagccagccgagcgtgggagagagagaaagaggaattaattgatgggcgaggaggccagctgcgacgccgtcagcctgacggaggccggcaccaacgccaagccggtgggcaaggaggtcggccgcgagccggctgcagcccccgccgccgcggccgacccccggctgcagggcatttccgacgccatccgcgtcgtgccgcacttccccaagcaaggcatcatgttcaacgacatcaccacgctgctgctgcgccccagggtgttcaaggacgccgtcgacctgttcgtcgagcggtaccgcgggatgggcatcgacgccgtcgccgggattgaggccaggggcttcgtgttcggcccggcgatcgcgctggctattggcgctaagttcatacctctgcgcaagccaaggaagctcccaggtgagagattccatgaccatgcatgttctgtttttcttcttcttcttaacccatctccacactctgcactgtacccagctgttgcttttgtcgatctagtgcccagcctgtggcgacaccctgatcaagtatatgtttagcgaggagggttcttgcttagcccataatctctgacaccgccagagttgtttgtctggcctgcatgcagttgcagtcccgtgaatgggatattaaaagaaaaatgcaacagacggtttatacgagaccgatcattcattcattccccacttctgtccacaatgttgtagaatcatgtgctgacaccggctctcggaaacaattattattattattattggaaggtgaggtgatctccgagaagtacgttctcgagtacgggactgattgcctggagatgcgtgtcggggccatcgagcgatccggcgagcgggtgctggtcatcgacgacctggttgcgaccggagggacactctgtgctgcgatcaggcttctagaacgtgctggagccgatgtggtcgagtgcgcgtgtgtcattgggctcccgaaattcaaggtgtcagagtgatcagggatattggctgtttactccttgctactgcgattgaacagtggagggacgacatggacaaggacaagtatattcggtgcatcactaagtcttggtgaggggagagattgtagtgttttaggctgagtagtgaagagcctgtagttctgcacggaacatgatggttattagttgatgcaacagcgttgctgttctattattgtttgttgaattttgtggctttggtttgaagcctagcctgggctcaaacagggatatgcatggcgcttgagtgaacaacttcgacagcaacacacacatgcttaatgtcagggaagtagctaggaacctgctacttgttacccgtacgtagtgtcatggaactcataaggtttagtggcaaaattcataaaaatgacacgggaaacgaacacagcacgcgtagcaggggaaaa

SEQ ID NO: 23879 - DNA, 218 bp, Zea Mays
cttcaaagtgggaaatggtcaagctaccagattctggaaggacaaatgggtaaccagtcgacctcttagttattttcagatgtactcactggttaagattctggagaccgctacaaaaggaggaatcgcaacaacaaattctcgttgcttcgcacgttttggaagtggtggcgatggaagtcttcgcaaaccatggatggcgctcaaatacaagaatt

SEQ ID NO: 23880 - DNA, 3165 bp, Zea Mays
ctccctctcccgtagccatgtcagacttgacggcaaaaggaccctttgaatcaaagagaagttcgtcactgaggctgaagaaaatctggatgtgtttacctttcagggcttactaattttgagaggtgtctgacatagactaaaaaaaaatcagcgccagggctcagggagcgacctaccccaaggtggggagttggttccttttccagtaataatgagggcaaattcatatcccatcatgatggaagaggacatggaaaatggaaggtcgtatcaagaaagaccaagggctttttcaacagtacgaagcaaatcatctgtaccgctggccttccgtttgttgatgaggtctattcttctctgtctaccttacaaagtgggttcttgctaaggacgaaggacctccagaaatgtccgagatatctgatgccataagagatggcgctgaaggtttttttaggacacaatatggaactatttctaaaatggcatttattctggcctttgtcatccttggcatttatattttccgcactaccaccccacagcaggaggcatctggcttgggaagggcaacattagcctatattacagttgcctcttttctccttggagcgttatgttctggaatagctggttttgttggaatgtgggtgtccgtacgtgcaaatgtacgagtttcaagtgctgctcgtcgctctgcaagggaatcattgcagattgccgtccgtgctggtggtttctcagccattgtggttgtttgcatggctgtatttggcgtggcaatactgtactcaacattttatgtttggcttggagtagattcacctgggtcaatgaaggttaccgacttgcctcttctccttgtgggatatggttttggtgcctcttttgttgccctttttgctcagttgggtggtggaatatacacgaaagctgctgatgttggagctgatctggttggaaaagttgagcagggaataccagaagatgatcctcgtaacccagctgtcattgctgacttggttggtgacaatgttggagattgtgctgcccgaggcgctgatctttttgagagcatagcagcagaaattatcagtgcaatgatacttggaggaacaatggcacagcgctgtaaaattgaggatccgtctggctttattttgtttcctcttgttgtgcattcatttgatttggtggtgtcatcagtcggaattctctcaatcagaggaacacgtgactctgggctcatttcccctatcgaagatcccatggcaattatgcaaaaaggctactctgttactattatgcttgctgttcttacatttggagtgtctactcgttggctcctgtacacggaacaagcaccttctgcatggctaaattttgcattgtgtggcttggtggggatcatcacagcatatgcttttgtttggatttcgaagtattacacggattataaacacgagccggtccgccttttagctctttcaagttctacaggacatggaactaatattattgctggagtaagtttggggatggaatcaacagccctaccagttctagtgataagtgttgccattatatcatcctattggctggggcagacctctggcttggtggacgagtctggcaacccaactggtggtctttttgggacagctgtagcgacaatggggatgcttagcacagcagggtatgttctcaccatggacatgtttggtcctatagctgacaatgctggtggtattgttgagatgagccagcagcatgaaagtgtgagagaaatcacagatgttctagatgctgtgggcaacacaactaaagctactacaaaaggatttgccataggatcagcagcactggcatcattcctcctgtttagtgcatacatggacgaagtagcttcttttgctcaaatgccgttcaaggaggttgacatagcagtcccggagatttttgttggtggtttattaggctcgatgcttatattcctgtttagtgcatgggcttgttcagcagttggcaaaactgcacaggaagttgttaatgaggtcaggagacaatttatcgagaggcctggtattatggactacaaagagaagcccgattatggacgctgtgtcgcaattgtggcctctgcatccttaagagaaatgataaaacctggggctctagcaattatatcacccatggccgttggcgttgtcttccggattttgggccactccactggtcagcctcttcttggagctaaagttgtagcctccatgcttatgtttgcgacggttgctggtattcttatggcactcttcttgaacactgctggcggcgcctgggataatgcaaagaagtacattgagactggtgcccttggtggcaaaggcagtgagtcccataaggctgcggttacaggcgacacggttggagacccattcaaagacactgcaggaccatcgctgcacgttcttatcaagatgctcgccacgatcacactggtcatggctcccatattcttgtgattaaccaaccagatttatcaagcttgccattaaccctgcggagatgtatctatgcgacttgtagatgaggtgtttacctgcatgtgatgtaatgatccaatcggttttagtgtgactacatgttgtacccaaagaaagaaagaaagaaagcagcgatctgtacccaggttttaatggtccaatcggttttagtgtgactatatgttgtacccaaagaaagaaagaaatcagcgatctgtacccaggtttgacggtagatattattctgaatttctgacgggtagtgatggtgcaaatgccatattttgtgacggacgtcactgaactagtagcccaagtgttttgtatttgtttattgctgggaacattatgacatccgttgagcttagctgtaagaaaggaacgatccacgatggattttaggatcgtgactgggtctacaccttacctttgactcttcacattaacaaagaaactgatgttatgtaatggtgttaatatgaccgattgtgagcacttctaagaggattaatatttaatagcttccagcacagaaaacatgcgcagataacaaaagaaacttcatatcaatctcaacagaagctgcatccttaaccatcctgcatttgtggtgcttgtt

SEQ ID NO: 23881 - DNA, 1289 bp, Zea Mays
gaatgcaagcttagttaatcaagcagaatttggaaaacagttaccaattgggaagaccagcagtataaattgaagctagatgtgatgatgagaaatcacttcgtatgtctcaaatgagcttggcgaagagatttggctaatccagatcttttgttgcctccactctgatggaatatggttttggatcctgaaggagaaagcgggtcctaagggaggaagcagagcaattggagctcgaactggagatgcatagagagttaagggagtagatgctgcaactcttgtggcctacgctcgagctgaagccagattagtgatgaggggggcagttgtccttgctgctaagcatgcaaaaacaatggtcgggaagccattgttgtatggaataggtaccctgttggtcatgtcgctgaggacactgtatggagtgggttgtgtttttggcgcacggtggttcctctacatgacaagcgtatctccatcgctgcaaattgagtttgtaagtggtccgaaacaactaggtagctactagctattgagtatttaggagtcaatgcttaatgatatttacttaatgcttaattgcttatcgaagtaagaaccctgttttttgtattgacatggtggtgctctttaggagagaagccaggggtaaaaaacaattagttctgcagattttattttatttcgatcagttgtgagagtttcttacaattggatgacattgctttgtagaaagaaaatacaaggtattttttagtaggaaagagttgcattttctgtgctcatatacagctttgccgttcgttttctaaaatgttgaaaaggatcatgtcattggtgtaacactcctgtttgtcttaattgaagaagtggtaccaacgagatgtcatttcctatcataattttatctgatgcatatgttgtagtagagctctcagcaattgattcctctcataaattggtggctagagctcgtgtggccctctcatcggatttggtgtctgagccctcgctagatctcgcaccctcatcgaagccctcattggattcgacaccctcactggaggttgcaccgcaatgggatctaggaaccgtagacagcctcgaccacccacgtggattgttgcctctgtggatgagacgcagcgccaaggggccagaggaaactacgtgatgaacctcacatcacagctcatgtcatggttctgagacaacccgtggccgccggcgcgccaccgccgggacgtgagttcgtcggagcgtcagcgagtcgctacaacccaggt

SEQ ID NO: 23882 - DNA, 1258 bp, Zea Mays
gttctttgcaatcttacccgtcggagttcgtctcatatttcaactattgtcgctccctgcgatttgaagacaggccagactactcttttctgaagaaactgtttcgtgatgtatttatccgggaaggataccagtttgattacgtatttgactggactgtactcaagcaccctcaaatcggttccaacaacaagcttgttcaatgggacaagaggcccgggacagattcacgggtgctgttgaggcattcgccagaagaaatccaggctctggtcgccatggagatcattccaggcaccaaagccttgcagattcctttggcacatccaacgaagcataaacatgaatggagatatacactttttaaacgaaaaatatgcactaaattgaaaatgagtgcagtaaatggaaaaggagtccttagtattgtgctggaaatctttctgctaacccaggttgccgactcagagaaaacgcacatcttgtcctggggagggagctcgtcgaaaatgcccgcggcttcgtccagccggccgacctcctcgggggactgcagtgaccagaaccaccggtgggtttctggcagtagtggcggcagcgggcggccgtccacagtgcagaggcaccaccactcggcaggcgccgagaacagcaggtcgtccacgcgctcccccgtggcccggaacgcggccgagagaggaggctccggctcgcgggacagcacgacgttccggagcctcgagcgcctctccatcaccaccagcaggaggaagtgagctgccgaggaccacgccgacgatttctgtgagtgaaaggcggttactaggccgacatcttttgcgggatcgttgctctctgcagctgaagcaaatcggcaaatggatggacgggattgcagcgcaatgacctcgaggatggcctcctttacaagaactgccatgaaaatgctttctccaaaccgtaacgtataacgcttcccccaaccaaccagagggaagacaactccaaagtacaatgcaatcctgtttcacggcaagctttcactgttcacttgttttgccgttctggcactagtttctaaagtctccagcaatgtaatctatattcatcttctatgcctgtactttatagtctcatctaaaagattctctcttctatatctttctaatctgcagcagcgtcctctatatctcgtcctttatacatactagtcggttgcctatgcgttgtgacggctcacaataatacccacgtaaac

SEQ ID NO: 23883 - DNA, 1658 bp, Zea Mays
gtggagttgatcctttcattaaatttgtgaggtacattcaaagaacattttgggaagtatggggatataattgatgctgtcataatgaaggaccgctacacacaaaagcccagaggctttggctttattacttttgctgatcccactgttgttgacagagtgattgaggatgaacatgttatcaatggaaaaccggttgaaattaagagaacgatccctaagggagctgctcctttgaaagatttcaagacgaagaagatttttgttggtggattaccctcagctctaaaagaagatgaattcaaggaattcttttccaagtttgggaaggttgtggagcatgaaatcatccgtgaccatgcaaccaaccggtcacgtggatttggttttatagtctttgatgcagaaaaagcagtagatgatttattacataagaagggcaatatgattgatctaaatggttctcaggtggagatcaagaaggcagaaccaaagaaaccctctaaccaaccacctcgttcacttgatagtgagcctaggggccgtccatatgcagacagttatgatggatttggcagctcttacaattatggtggtagttttggtccctatagatcacctcgaagttttggcgctaggcctagcagctacagtagtgcttatggtcctggtgattatggtagtggctatgctacttatggtggagcattagtaggataccgtgaaccttccctttattctagtcgctatggtagcacttatggaggcagccttggtggtgggtatggtggtgttagttatgatggtggattagctggtgcatatgagcgtgatgctgggggctatggtggttctagctatggtcgtagttatgactcttcctgggctaatactggtgatgggtttggcaccggtggactctatggtgctaggacaggctatggtggcagtggcggcagtggtgctgctggtcgttaccatccatatggaagatagaaaatctccagtgctgctgtttgctagagaagcttgcagaagatgaattctagatgtgtgctcaagagatcatctgcatctaaaagatgcactgaagttcaatatgctcagttttctgtattaggaagtactgttagatcaacttgtagaaatttaaacctttgttttggtatttggaattggaatttaagcatatttgataagcgtatgcacttttatagatagaaaatctagtgacccgtcaaaactagctgctagtacaagcatgagttattctttgttagtatagtttgctttgtctttacgaatattatggagtggtcaaagttaacctaagggccgaacgcagtttctttacatgtagttacagaagtgttatcttgtttctttatcttgttccgcgtaggttttgtttggagttcgatggattaagttgtacttagaactagattggtctttttatagtggttcgcatgctttcaccgtttaacatgccgatgttgttttccccattcattatgtaatcggtgatcttgatatcatcacgctggtaattacatcttaattacatttgggtagcatcatcgttctacatcagttcaggcagctctgagggctcatttggccatcttccgctaagaggcactgtgcgatactgtaac

SEQ ID NO: 23884 - DNA, 6764 bp, Zea Mays
agaaaatacaggtagcactaatggagcccatgagaagagtgaagacaacatgactgcacatggtgttgctattgatgatgtcatcaggaggatttcagaatatattgaatccaacagtaaaatctctggtgatgtggctttgcaagtgagggcacttaatgattgtgaaacatgggtaactactcaattttcagcaaatcaattcagtgctcttggccatgggacattccttgagtttttggacaaacattgtcaccagttccgaactgctttgagtagtttctttaaggagggtccttctaattcttcatctctggaagtttctgtactgcagcagcaaattgaatttttactctgtcaagctgagagtaattggctggaagatagtgacttttcagaggatagttttgttatgcttcttaaaaagcaatttccaacaataagctttaatattgtgcaagacaaatctgatggtggagtttctggctttattgaggggcagaagaaagacatacggacatatagtttaaaattttccatctctttgttggagaaacgatggtctggaactttgccaagtagacatgggaatgttgatgaactggggaacattgtcgctgaacaatcttgttaccataccacagtttgctcacgagaggcaattaattgtttactgagggctcctatgctgtctgatctgcatctttggtcccattgggattcgctatttgctcctacactgggctcctttgtacattggttgctgaatactggtccaattcaagagctcgcatgcattgcgaccacagatggtaggtttattagagtagattcatcagccacagttgaccagtttctggaagctattatccatcgatcaccacttcaagtggcagtgaaactgctttcacttctatacatttacaatggttctatgaacaccccaatgtcattgctaaaatgttatgcacagcgagcaataaagctcatagtagataacaacaatgatttgatgaatgctaaatctgaaaacaaaatatttatgcctgatgagccccaaaacctaagtagtgaaagctctacttgttttgctgatcagtgtcaagaaagctctcaggcgtctcctggaaggttgatcaggtctgatagcttgccaaacattaataacactgttcatttgatcacaaaatttgtacttgattgtcttgatcatctaccttcagaattccgtagtcttgcagcagacatactattggcaggatttcgggttgttactaagaactggcatgcagttatgttgcatgaagccactgaaaacgggcagctttgcatgcttcatgatattggtttgtcacttggagttgtagaatgggttgaagattgccataggttgtgtttaactgatgaagttcatgtgcagacagaaatgcattcttctgccaagcttgcaacacctgcctctgtgggagccacccatgaagattctaacatgcatatttctagtgatgttaatatgatggataagagaaaacaattgtttcctgtcataaatgatcgggctggtatagataaggaagacaataagatgttaaatcctgctggaactgaggcagatgttgcagaactacatactaccagcagatcttctatgatggaagaaacaagtcttgaggaagcatctcttgttattgagactatacgccgtgaagagtttggtctggatcaggcactaagtgacactgagaatagcttgttaaagaagcagcatgctcgacttggcagagcattgcattgcctttcacaagaattatattcccaggattctcatctacttcttgagctggtacagaatgctgacgacaatacatatcctgaggatgttgaagcaacattagcattcattctccaagaggatggtattgctgttctaaacaatgagaggggcttctctgctgagaacattagagcactctgtgatattggtaactcgacaaagaaaggatcaaaccagggttatattggaaataaaggcattggatttaaatcagttttccgggtaactgatgctccggagatccattcaaatggtttccatgtgaaatttgatatcacagatggccagattggttttgtgttgccaactgcagttccaccttacagtaccacttcttttagtagaatgttatccgttgaagatgacaaggatgcccattcattgtggaacacttgcattttacttcccttcagatcaaaatttagggagtgcactggtatgtgctccattgtgtctttgttttcagatctgcacccatctctactgctgttccttcatcgactaaaatgtatcaagtttaagaatttgtttgatgacacacttctgattatgagaagggagattcttggtgatggtattgtgagaatctcgcatgggattgagacaatgagttggttggtggtcagtaagaggctacaaggtaccattgtgcggcatgatgtgtgcaccacagagatagctgtggcgtttactttgcagcagactgaggaaggagattatgaaccttatttgaagcagcaacctgtgtttgcttttcttcctctaaggaattacggtcttaaattcattcttcaaggagattttgttttaccatcttccagagaggaagtggatgcggatagtgcatggaatcagtggttgttgtctgaattcccttctttgtttgtaagtgcccaagaatctttttgtgctcttccctgttttcagaggtgccctggaaaagctgtcacagccttcttgagttttattcctctagcaggagaggttcatggattcttcagccagcttccacacttgatcctttccaagttgcgtctgacccgctgcatgtttttggatggctctactgtgcaatgggtctatccatgcaacacacttaggggttgggatgaacaaactaaaatgttattttcagaaggcttacttcatgaacatcttggtcttggttacctctcaaaaaatattgttatatctgataagttatcaagagccctaggtattcatgactatggaccaaacattttgctagatgccatctcatctatttgccgaattgatggttgtattgagtcattgggcctggaatggctttgtgcttggtttgttaacctttatctgacattgctgtctcattcttctcaaaatgtttcctcagcaagaaacctcgaagacattcttttggataaagttaggaaaataccatgcatcccactttcagatggttcatttacctctatttcagatggtcgtatatggttgccatatgatgttgccagttccattcctgaatgcagtagcattccgaattttccagctctatatggtaatcttcgaactgtagtgaaagttgaaaaaactttatcccaagttgattctattctagcaggaggactttctctagctgatgtatctacaaaacaatgtacagtgtatgactgggagtcaccagaattatctagaattttatcaatattttcttcaaaaagatgcaaggaaaattgtgtatatcttctggaagttcttgatagattctgggatgatcattatagtgcaaaatctaggatcttcacagatgctacacattgtggtgaaaacagagcagttgaatcatcatttatgaagtgcattcaaagcttcaaatggatagcatcaagaatggatgaggatcttcattatgcaacagatttattctatgattgtgaaaatgtccgctctctttttggtagtgtggctccatatgctgtaccgcaggtatctagcagttcacttaagaaggccattggattcaaaacagaggtatcttactgtgatgcattgatggtcctgaagtcttggataacgtcaaaggttccctttagagcaagtatgagccagatgtgcaaattctataccttcttgtctgaaggcgtggcagacgcaaagattgacattaaacgggagttcatgtcgtctccttctatatttacaccactacagcgtcctcgggcaagtgaggttattcctggaaggtttttggcgccagaagacctctattggcatgacccaacaggatgttctgaaataacagaggatttcgttgcaacgaaaaacagaagtatgttcccaagaaaaatgctgtctgcagcctatccaaacctttatgaattatttactctgacatgcggtgtaccaaaggccccaacaacatcaaattatgttgagatgctgctacggttgtcaaccattgcattgccttcacaggcaggaaaccatgtcttttgtgtatttgtgagatgggccaagtgtatgcattctgaaagtgacaagatgaatgatatattgtacttgaaagaatcccttcagaaattagaaacaacaatattgcccacctcagccgataaatgggtctctctacatccttcttttggccttgtttgctgggtagatgatgatgagctaaagcaacagtttgttaactctaatgatgtttacttcatacaatttggcgacctttcttctgaggataagcaaatgttgtatggaagagttgctgctttaatgaaaagcttaggcatccaagcactttcaaaggttgtgtatcgtgaagcaatattttatggtacatcagagaacagagaaaaggtttccttgatttgttggctgttgccatacatgcaacgttacatctataagatgcatagagatacttatatcaacttccagaaaaacgacatcatgaagattagcaacctgcaagtagtagttgttgacaagttattccacaagtatgtactgaggggactcgagagttcttctaagaaaagattccaatgtcattgtcttttgcagggagatactctatatgcaacacaagaggctgactcacattcagtatttttggagctttctagaattttctttgatggatcccatgatcttcattttgcaaattttctacacatgatcaaaaccatggccgaatctggcactcatgctgagcaaatagagacttttatcgttaataatcagaatgtgcctgagttacctgagcatgaagctatctggtccttctcttccttgtctgcagccaaacatggttcagcgaaccaaggtggtgctgatacccagggggttgatttccaacctgtccatgaatttagtattcccaatcatcagaaggcacaggtgatggtttctagttggcctctaaactattggagaacagcacccgtcttcagaacacctctcataaaccagcatgcaagcatgcaagaggcaaaggtgaatgatgctggaccttcatcaaacttaaacatgcctgctatgtatggacacaccgaagatagtttgctttctgctgatcttgaaagggattggattatagaagagaatccaagaactgaaactacattgtttggagatagttcatcggaaatccttgatgagcctcagatggtgatgtctgctgaacctttccatgcacctgcttatttgaacttggaggctggaaattcaagcccaacggttcatgtcgagctaacaaattccgatgagaaactggccaatcttgcagaagacaagaatcagcgactttcagatgcaaaccagttaagaacagggaggcttggtgaagaactggtcgagaaatatttggccaaacagctaggttccaacaatgttaggtgggtgaacaacagaattgaaaccggactgccttatgatattgttataacacacccagagggtttcacagagtatgtggaggttaaaacaactgtatcttcaagaaaagattggtttgacgtctcagcaagggaatggcagtttgccttggagaaaggggattcatttagcattgctcgtgtcatcttaggtacaaagaaagcaagtatagaaatgttgaaaaacccacacaagctttgtaagcagaaagcattgcggcttgctctcctgatatccagatcggcagcaacctagactaaaatgtcggttttgttgaggctagcaccgatcatccttctgcagattgttatgattactctgactaataatcaacatgaactggagtgagcatctgcatcttgataggtatttgctgatccaagttagcagattcttctttttggagagagatggggtaccgggtacggcatgagtgcaagacaacatacagttgagccgctctatagtaggctcctctttctattattctaactcgggtaatcttctccaatggcggctctctaccatgtctcttgttacatacaacttacgctctgcctttgtaacccattctggtattttgttgcataatgtatgtgattttgtcattagatttgtttttcaatttctgccctagacatcgtcccataggttgattgtgtaactaaacatgaaactgtacataaatggatggaatttgattttaccatgtacatgaaatttgattttgcgtgcggcggctgcctggtctgtgcgttctggtctctgtgcgcagggcgcggcatctgcccggcagcctgctcgccggctgctcggtgagaaaattggctagttgggtactggttttttttttcaattgataaaaaaacaggatctgatggagccttttcatttttgttttactttccgtctcttttatcagcagttgaaaggcgatcacttattctcaatttggtggaatctcctttatcagtaattgatagttgaaaggtggtgacttgttttcaat

SEQ ID NO: 23885 - DNA, 1551 bp, Zea Mays
caagatggtctcatgttagcttcagaatatggtatctttcaggagggatagcaaatatcagtaaaacaaaagaaagattggcaacagtttgatgtctttctcggagtatcccttttcccatcaattagtatttgataaaaactctgctaaaactagaatatatttagcttttgtatatatgccaatccgaactttttaatttgttctgaactttcatgtgccagtctgttgtagagtaaaaactttaccaaagcatttctccgagcataagtggtcacaagagcatagctctaaatgtgtccctcatcaaatctctcaagttgcagagaactaggatatctgagacctgctttcatagaggaagagtcttacttgaggagcatgtttcatggtgacaatggtggttattcatctgactggaaagtaaatgaaaccgatgaatacaacagagaaactcggccagtttctggaaccaatcgcctcattgatgatgataaatcaagatttgacttcaatcatgctgaaactagaactgattcaatgatctacaagctggagataatgacaattgaactgttttccatgtatggaaagcagtttaagattgatccacaagattttcaagattcagaaccagatattcttgcaaattctgcttcatcgataatagaacggatcaaagaaaacagtgatcagtgtgccgcggctctcaggtcgctctgtcgccggaaaaagggcctcactgtcgaggaggcaagcttgattggtgttgacagccttggtattgatgtaagagccttttctggcttggaagttaagactgttcgattttcattcaatgcacaggcgctctctgaacgttcagctgaaaagaagatcaggcgaatgcttttcccccgttaccagcgtaaaaacgtgaaagcctctactgaagatgagtcttaacctatcagctgtttttcctgagaaagcatgcaaacacctggttcaaagacaaggtgtcaagggaatcaacacaatatcatcttatgcgagtttgctaggagatagcgcacaacctgtcgactatgagaatgaccaaaaacatcagagtaataaggtttgccatgcatggtctctaacatgcttccaagaatatagtttggtttctgacagataataaaaaaaaaacgaataaggtgccagttcatgtataaaagatgaactgcgactttatgctggcggaaactgattagctgaccaagctttgtcagctacaaattcccagtaataataacgagctgcgaggtgaaagggcagagtaataaggtctcgttggcctaaatcagttcttagtttcttacccacaacctgtaactaactttgttgtctcttttcatgtagacataaatgtcatgcaacgcaactgcgattatggcattgttttgttgaactatacataaaagaaaacttgataaagtttcgagtgcttttagctgtcagattctactgtgctcgattgcactactgtactcgtgtactgtaagaaaagactgaccagttattttccag

SEQ ID NO: 23886 - DNA, 1238 bp, Zea Mays
tgcctagatctaatctgtgccctccgcaatcgatccaacggttcgatgtttacccttttctggacatatcccggccacagatggttgcagcaacggtcccagagcattttctttcttccaggacgactccgggcggctcccgtagctccgccgcggcgaacacgacggcttgatcccgccaccgcgctcgactaccctattcacacccgaggtcggtgcaacgcaaggcaggaacccaaaggatcagggtcgatgtggcttaccagtgggtgaagctggggtggccctcggccaaggtgcggtgcgaacctacggcggcgccagagcccatggatggacgagtgatcgcgcccggcgcgtgagttcgtaggaggagaccagccacacctagccgaccaccagggactccgcgacaaccttgtgcagcttcatggcacgattcaggtgccgtcgggacatggccggagcacaactgcgctgcgccgagccagatcacacggaacacagtgttgccgcacgggccccgcccacggcgtgaggcagaaccgcgatggcgatccatctcagttttcatggcgacgagctcaccggcgagtggggcggcgatccataccccagcctggagcacgactgcggcgacacttacccaagccccacggcgacaacgctcaagcttcaatggagtaggagatagttgcggcgagggcgcgaggcagcgtgctgggagcaacgaacaacgcgagaggccgctggcagcttgggctagatcccggcgaggtgcggaccagagccacgaccgaagccgcgaggcggtgccccctcaaatcgagcaccagagctccactttccccctacggtttgtgctatgcagagcggaccagcaagtgaaccaaagggtcaagaagctcaccaaagttcctgccgaagcgaccttcgaccatggaggggtgcgtcttgacaattcctcaccgcttcggccccagaaccgcatggtgagggcatgataaccatccgcgtgcctttgcgaagatcactaggccacgaccctcaatcagacgctagcgaatcgcaatgaccatggtgccacggcggcggcggatgtccctgccccatagctcctgctggcgattccatcggaggcaatggcgcccatggggtggttggtccagaggaggacccggttttatatgccgggaggaagaaggctgggcacgagctcatcggatggatagggcagg

SEQ ID NO: 23887 - DNA, 854 bp, Zea Mays
tgcagagtgttgtaccgcatgaaaccaccaaacattgccaagatatggaaccagaaaagacaggtagaagttagaatgcaccttcatttttagtagtactaaagtagttggagttccatttattgaagaagattcagctattcctgcttatgtatacaagtttgactttactataaggtgcatctatctagtggaagatactacctccagtcacatacacacaaatgctacctaacactctctttctcgatttcagcataaaatgcttcgtcaaagttgaatgcgatttcccaagtttaactattcttttttatgcagctatatgattatacctgggccaattccaagccatatttctttcacacactgctgggtactttgtagcataatagtttgcatatgatctcttcttgcatcattatgattttattgctggtacatatacctcatggtcagctttcatatataactatcataactatcatctcttgtgttggttaaattttattgttatattcacatcgtggaatgtaagtgtatgtatttagttttttttatatcaagcagagggcccactgtgcaagagaaattcccactgcatcaaggatggaagtagtttgaaaattcccgaaagtaccaaaggcaaatggttagcagaggaaagttgtttggacaaaaaaaaattatataatgtcaacttgggcttgtttcatcatgactactgagaaaaaaatactttcttccaggaagatgaaattctcattaaaatggttaccaaacatgggaaaaactggcaaactgtagcatttgctatacctggccgagaagcaaaacaatgccaaatcaggtaatta

SEQ ID NO: 23888 - DNA, 3753 bp, Zea Mays
cggccgcagggctggcgggtagaagtagaatcgatggccaggtcccgccaaccaccgtcctgcttcttccgatcccattcgattccagagttcaacatccatccttttcattcgtacgccgtcgtggtcgtggtcgccacccacgactcttccacctccggcctctctgcccaattcaatctcgggctccgaccacagggaaagatcaatcgaaagcggagccgtgttgagagcaaccgaggaaccaggcgcccgggcggtgatggagaacggcaacaacggcggcaatccgccgcactacccgccgtaccaatacccgtatccgcaggcgcaggcgcaactgtatccttacgggtaccagtacccgcctgcgccgccgtcgccgtcgccgtctgccgcgccggcggggccatacctctctccgtctccatccttcccgagctatgcccccgccccgcatccgccgcagcagtttcactccggcccgctccaggcgtacccgcccccgccgcagtaccacgcctacccgccgccgccgcatccatcgccttacggccacgggtacgacccctacccatccccgtatttctcctacccgagcaccaaccctagccccagccccagcccggggctctcgcccagctccagcttccaccaccagcacgcctccgcgcccgaacccccgtcgcccgcgccctccgcaccctccgcgccgtcctatcccatcgaggatgtccttgccagcatgcgcctctccggccgtcacgattacgcgtcgtcgccctcagtgaccccgccctcgacccccttcttgggcgatgggagcagccacggcggcgggatgcagctggtgccctatggcacggccgccggagggtcgcagcacggaggcgggatgcaggtggtgccctatggtgcggccgcgggagggtcgcagcacggcggcagcttcagggcatcgcttaaggtggtgctgctccacggcagcctcgacatctgggtgcacgacgcgcgacacttgcctaacaaggatatgttctccaagagggtcggcgagctccttggcccacgcatcaccagcgctgttggcagcaagatgtccagcgcgtccatgaccagcgacccctatgtcaccgtacaggtctcctatgccaccgtcgcgcggacctatgtcatccccaactgtgagaatccagtctggtcgcagaacttcatggtgcccgtcgggcatgaggctgccgaagtccagtttgttgtcaaggacagtgatgtcttcggtgctcaaatcatcggtgttgtgtccattcccgccgagaagcttctgacaggggacaggattcagggtgtcttccccgtccttgagcccaatggcaagccttgtgctcctggagctgtactgcatttgtcaatacagttgatccccgttgctcagctcacaatgtaccaccatggcgtcattgctggtccagacagtcatggagtgcctcatacttacttcccacttaggcgtggcatgagagtgaccctgtatcaagacgcccatgtgcctgatggttgtctcccagacatatggcttagcaatgggctgcgctaccagcacgggcagtgttggcgtgacatctatgatgccatatgccaggcaaggaagttaatttacattgtggggtggtctgttttccacacaatccacctcgtgagagatggcactcaagctccatcacttggggacctgttgaagatgaagtcacaggaaggggtgcgtgtgttgctgcttgtttgggatgatcctacatcgaggagcattcttggatataagatggatggtttcatgggcacaagagatgaggagacacgcagatttttcaagcattcttcagtccaagtgttgctctgcccacgatctgctgggaaacgccacagctgggtgaaacagcaggaaacaggaaccatttttacccatcatcagaaaacagttattgtggatgctgatgctggcaactataggagaaagatagttgcttttgttggaggcctagatttatgtggcggacgatatgatacaccttggcatcctctgtttcggactcttcagaatgaacacaaagaggattattacaatccaaactttaatacagttgatgctcgtggtccaagggaaccatggcatgacttgcattctaagatcgatggtccagctgcttatgatgttctacagaactttcaggagcgttggttaaaagcggccaaacgacatgggattaaaaagttggcaaaatcctatgacgatgctctgctcactattgaaagaataccagagattataaacataaatgatgcaatatattttagtgacaatgatccagagacatggcatgttcaggtgtttcggtctattgattcaaactctgccaagggatttccaaaggatccacgagcagcaaccatgaagaatcttgtttgtggaaagaacgtacttattgacatgagcatacatacggcttatgtccatgctatccggtcagcccaacattatatttatattgagaatcagtacttcattggttcttcatttaattgggattcaaacaaggacttaggggctaacaatttaattccaattgaaattgctctcaaaattgcaaataagattaaggcaaatgaaaggttttctgcatacatagtggtacctatgtggcctgagggtaatccaactggggctgcaacacaacgaattctttactggcagaataaaaccatgcaaatgatgtacgagacaatatacaggaccttgaaagaagaaggcctggatgatatgtatgagcctcaggattatttaaacttcttctgtcttggcaaccgtgaagttgctgacagcactagcacttcaaacgcttcgaatacagcaaataatcctcaggaacaagctaggaaaaataggagattcatggtctatgtacattcaaaaggcatgattgtggatgatgagtatgttatcattggatcagctaatattaaccagagatccatggaaggaataagagacactgagattgcgatgggagcgtatcagccacaatatacatgggctaataagctttctgccccacgtggacagaatgtccttatgggctgagcatattggaagcattgaggaagacttcaactatccggagagcctggagtgcatgaggcgtgtacgtcatcttggggaagagaactggaagcagtttgttgccgatgaggtgacggagatgagaggccacctcatgaagtatccagtaagcgttgaccgtaaaggcaaggtgaaaccgctacccggatgcacaacattcccagatatgggtgggaacatctgtggctcgtttgtggccatccaggaaaacctcacaatataaactttagctgtgcaacttacataatgtctggtggcctctgcccagggggaccctagcactagcttatcctctttcttgagagcgtagatagggtgaaaattttgcaatagctacaggttgcaggcaagcaggggaaatggtaatatgggctttctccccttgacctttttttctggattcgttcagtacatatataagtagccaatcaatttatacctttattgggtacatgtatagaaaaattaaagaggttcaggaatatcacatttggaccaaggtattccaatgtagatcctggaaagtactggtaaatgttcagaatgtaaattgatcctgcagaatattttcaagtgttttt

SEQ ID NO: 23889 - DNA, 1671 bp, Zea Mays
ctcgccctcgccttgctgttgctgcctgcttcgctggtgttagttacggtatggtcatctcacgtgggagtggaagcggggcctgcgcagttatctccacccgttgatctttgctgctttgtacaagaccctggcgctactccatctggacactccgtgggttatggtgatggctccacgtctcgtgcaatctttgtttgcagcttttggagatctatacctatataaactttccaaacttattttcaatggtcaagttgctaagtggacgttattttctcagttggttaactggttcatgtttttctgtatcacacggactctatcaaacagcttggagactgttttgaccgtggctggactctattactggtttgctgcaatagagtcttccaaggcaacttcaatcgtttcaaagcagcatgcggcctgtgaacaaagtatcccatcaagaaaagtggctcttctgatagcagccttatcatgtgccattcggccaacaagtgctgtaacatggctatatgttagccttttggattttattcagatgaaatcaaaatgttgctttatccttcttgatgtcattccagtaggggcaattgtccttgctgtaacaacactccttgattggtggatgtatggttcctgggtcatagtgccgcttaattttttgaaattcaacttattgtcttccggaggagactactatggaacacatgtctttcattggtactttacacagggttttccatccatgatttggacattcttaccatttgcattgtgcggcattgtaaagtctcaggaatggaggctttcaggtctaattgcttgggtattaggggtttacagcattcttggacataaagaattcaggtttgttcttccagtgctacctttagcattgatgttctcaggttactgcttagcttccatgtcacggtccaagggcaaaaatcagcataggaaagatagtctttcaaggatgcaaccttttgttattcttctcgtcataaccaacgttcccatggctttatatatgtccttattccatcaaaggggaacagaagacgctatgtattatttgtcaaaagaagcccatgatggaagagtgaggagtgttctctttctcatgccttgtcattcaacaccttactactcaaccttacattacaatctacctatgcgttttttggactgcactcctagtgatagcaaagggaccttggatgagtcagatcgtttccttacaagtccatctgagtttgtcggcgaggtttttggaaatttatctgcattcagtcacattgtaatatttgagtcagaagaaagacatgttctccagttgcttctgcacaattcctttcttgagatgaggaggtttttccactcacatttcaaggttgacagagaccttcagtcggctgttgtggtttattcacggaggaatgtgctctgatttagtactgatgtggcagaaaatgcctgttagctcgtgtagcaatccccacacgttcatgttgtttcagcttttcacttgagaaatgagatgtaacactgccggatacttctgatgtattaaacccctttgaacgagatgttacgttacttttactcaagtgctttacaacgacaataacaattctctgcttcttctaagataaaagtctg

SEQ ID NO: 23890 - DNA, 744 bp, Zea Mays
agtacaactccaaacaaactcccgtcgtggcgtctcaccgtttccaggatacgaacatgaggtcggccaccctgcttacgatctgcaccttgtccgcgctgctgctggtggcgcgcggctcggagaagccatcggccgcgccgccgccggtggtggccgtgggcgtggcggcagccagcgacctcatccgctccggcggtcaccgctacctggacgtcagaacagaggaggaattcaggagtgggcatgtggaggattcactcaacgtgccctatcttttcttcacttcacaaggaagggagaagaaccccaagttcatcgcacaggtcgcagcgggtttcgacaaagaggacaacatagttgtgggctgcaaaagcggagtgaggtctgaattagcatgtgctgatctcatggcagctggatttagaaatgtgaagaacatagaaggtggttataccgcatgggtggaaagtggtcttgccgtgaagaaatctcaagcacaagatgaactatgatgtgccctatcctgttggttcttccttgctttgacgacaaccttcgaagaaaatagtggacaatagtcaacaacttcaaaacgacgacactccactggcagttcaaactactggctttgacattctgttcgaggaggaggaaacataagtccaatacgcgttatggaagactagggattgctaatccgcccacgcgggaagcctttccctctcaagctcaagagtcaag

SEQ ID NO: 23891 - DNA, 1208 bp, Zea Mays
ctcccctctcggaagttagctgaataccgctaacgacgttaaagtcaggctcacagacggcctgtatgacccttgcctctgcctttcccttttctcctcctatccctaacgcagccgccgccgccgctcggctctcccttgccaatgcacacatgcactcgccgccgccgctcgactctcccctcccaatggcaccccgtcgctcaccatcaaatgtttcctcccctacaagtgcaagatcgccaatgagatattgatggcgctgttggtggacccacctgacatcaagagggagatgtagatggagatgcagcccgcaccaccaccatctgctgcggcgtcggcatcgcagacggcgtggccactggattggccggtggacgggcgctcgctcaatcctccatcgccgcccactatatcagtccagtatgtgagtcatattgattttataattgattttatgcgccagttcttgcctcgactaatgggtcctcttccattttgtaatcacctctgcatgtttactgtatcactttggtaaattactattgttccatgttgtcttccacaacatactgcactagttcagtggttagtttcctattcaaccatttcgtaatgaaggaggtattggtatttaggtaaatatttatttatgattgtgctggtattatctcaataggctggaaaattttaaataacctaatatgacataaacctcaactgcccatgcactcttagttgttgttttgaaccggtctttcgttgtttttcttttcaccaaaaaataaaatcttgatgatgtgtgacacacctgtttggttatatcatgttatctatgtagttcggccaattaaactatgttatcaggtataactagatgaggcaaattatatatatatatatatatatatatatatcgaaataaattgttttatgaatatccaaataaaccatatagtgtcgaagctgggtactttccattgccatcattaatggacaacaatatgctactatctcacatatattatgaaatgtttctacacgcatggagcatttcttgcagtagagcgctaggtatgctctctatgcctacgatgatttatatgaggatgacttagataaggaggtggatcacatgtcagtttcgagcaagtggtttgtagctatctgtcattgcacactgattcaagtgacaacgatttctt

SEQ ID NO: 23892 - DNA, 2280 bp, Zea Mays
gtgggtttcgggcctcgatttgctcaattgaggacggattttgcacggggcgtcggatctatgcgtgtcctgtatgttgtacctaggattgttgccaattctcccgtcaattttgcgtgatttttctggttgtcggatgaggggttagggtttcgttcggtccagaggtgttggactcctattcgcgcattcgttagggcttcatgccgcgatatccgagcctcttgcttgaattagttattgcatgaacattgaacagaaacgttgttatgtaacttactggttatagacggcaattcatctgtgcccttcatcatggtagttgaatatggactgtaattcattattttattctaccctctcagtagtttagacaagcatgctgcatcaggagaacagtgagccgttcgtgaggcaccactctgagcagcttgcgtgtggcaacatgaggggagcagataatggtcgtccgaatttccttcctgagaagtgccagattgcagtcacaattggtgccaagtggtgtcaaggaaacaccaatagtggatcaaaacaagagacctgcatccagtgacatgcttgacatagttgaatgcaaacgtctgaagcaggaaggtcaaatcgtaactaaggaagacaaccatacatctgcagaggattttcatgagtaccccacatacacgacttgcagaagaagctttgactcaccactatctgagagcgaggatagtgaagatgaaggtgtagattcacctctccatttttcacatgctcacacctatgttgaagatgatctatggcctgccagctttcatcatgctctgggcccttttcccttgaggaaacctgttcctatcgggccaaatcatcaggctgaattacctgagtgcaggccattttgtggaagaactgaagaaggcgaaagtgtcaagtggatcagaaacggtgttgtgccaatgcctgatactggtgcatcgtctttggtgttggaacctgttcactgcaaggcagactgtgagtgtcatgatgaaggttcaatcatttgtgtgaaaaagcatgtgagggaagcaagagaaaagctgaagggttctgttggtgcagacaccttcagggagttgggtttgaatgatatgggtgaagaggttggctcaaggtggacagaagaggaggaacatttgttccagcaggttgtcttgtcaaaccctgcttctctgtgcagaaacttttgggatgaactccctcttgccttcccttccaagtccagcaaagaactagtgagctactacttcaatgtattcatgttgaggaagagggctgagcagaacagatttgacccagtgaacatcgacagtgatgatgacgaatggcaggcaggtgacgatggtgagtatccaatcacaggaagaactgatgaatacttgccaactgagtctcttactgatcaagatgatgttgcatgcaatccagttcctttagaaagggatctctatgaagattctgatgatgaggatgagctggacaatgccagtggagacaggcataatggtgcccagagggctggtatgttgtcagagggtaatcgtgtaatgtcggtcatagaacataatcaacagacgttcaagttagatgcagaggcgcaagacgactcttgcacatcatttgaggctcatcaggttggtgttgaaggtgggacacatactgatattgctgatgacaatcattacaggagtgacggctttggtggtggtgcagaacatgggttcttcggtaatcagtgtgacacaaaagagtgggacttcggtctcagtatcggttgggaaaagcatgattttttgtcaacaaacaatgtcatagaagaggtgttcgggaagtgctgtgacactgctgaccaggaccttatctgagccagacgcggaggcttcttgtcagctgcgaaaactttagggttctctgaattgtacagcagtagttggctattttgatttaatgcctcacttgttcttacaggaatctcatctctgtccttggaacatcatctgcttgtgatttcgtcacatgattaatgtaaatccgtagtctgttgatagcctgtggaatgtatgtatcatctttgttgtgacggtgtctcttgacctgagcgttttttctatgtgctagcgagggtcatgtaataaaagctgttgttgttccttgaccctgtctgcaaataaatgtaacctgccagtcaatgtattccgaaaggtcatttttatctgatctgaaatctgtagtcgtttccgc

SEQ ID NO: 23893 - DNA, 1916 bp, Zea Mays
ctgcaaggaaaatcttcaaatatgttacttttcggaaggaaaaattgttgatactttggagggagtaaacccagccagcctggccaataaggttgcaaaagtagctgggcctgctagtgttgctgagtctgctgtacctgctagccttggagtcgctgctgggcctgctgtacttgaaaacatccaaaagatggcacagcaaaatggatcctctgctgctgaaagcacaaactctggcagtactcaagatgcattgaataagcgattggagcagcttgtcaattcccatcctgtgtttttatttatgaagggaaccccagaacaaccaaggtgtggtttcagccgtaaagtggtcaacattttgaagcaagaaggggtcgaatttgggagctttgacatccttacagataatgatgttcgtgaaggtatgaagaagttctccaactggcccacttttcctcaactgtactgcaaaggcgagctgcttggtggatgtgatattgttattgctatgcatgacagtggtgaattgaaggatgtttttgaggagcacaatattcccctcaaaccacagggtagcaaaaatgaagaagcaggtcagcccgagtctgcaactgagaagggtgctgcagttgctgaaccaatggggcttactgatgctcagaaatctcgtttggaaagccttattaattccagcccagtgatggtattcatcaaaggtacaccagaggaaccaaagtgtgggttcagtgggaagttggtccacatacttaagcaagagaatattcctttctcaagttttgacatcctttcagatgatgaggttagacaggggctgaaggtgctctcaaactggcccagttaccctcaactgtacataaaaggtgagctggttggcggctcagacatagtgatggagatgcacaagagtggtgagctgaagaaggttctgtctgagaaaggggttattccaaaggaaagcctggaggacagattgaagtccctggtttcctctgcaccggtgatgcttttcatgaagggcactcccgatgctcctcgctgcggcttcagttcgaaggttgtgaacgccttgaagaaggaaggggtcagctttgggtccttcgacatcttatctgacgaggaagttaggcaaggtttgaagacgtactccaactggcctaccttcccccagctctactacaaatcggagctgattgggggatgtgatatcgttcttgagatggagaagagcggagagctgaagtcgaccctgtcagagtagacacctagcattcttgcttcgctggcgtttttaccatattgcctgcattggatcactctactctggtattcatgccattgtattcatagatccacgttggtacttgtctgcagtgccacattgctagaattgtgacacatctgcagaaggaataacttacgcttgttcggtactgattgcattgttcttatatcaccagttctatttagcgggtggaagcttttttgttcgggtattgtcacgatttatagacggataaagtaaaatatttatagagtatatgtgtacgtgtaattgtgtatttaagtcatgccattgttcttgggaagtcacatgtggaaaattgactttcacaatgaacaagcttataaatctaattagaagtggttcgtacaacatttattcacaggaacggagataaggctggctcaaggctccagcaagggcagctaatagaactatgtgaagaaatttaattaaaaaaactaaatttaatagttatagcaaataattttataattgtgccaaaatggtacgtgtaggtctatatagtgtagcaacatatcataaaagtttggttaggaaaagaaaaaataaaaaaagtttggttgagaaaagaaaaaaaataaaaata

SEQ ID NO: 23894 - DNA, 1559 bp, Zea Mays
gcgtttgcatgcaggaaaaggaacaaaaaggaagttgaggagactgacggatgtcagattgctgaaggaaatgggcatggacgcatataggttctctatctcttggcctagaatactgcctaagggaacggtcgaaggaggtattaaccaggatggcatcgattactacaaaaggctcatcaacttgttgctagagaatggcatagagccatatgtaacaattttccactgggatgtccctcaagcactagaagagaagtacggcggattcttagataagactcataagaggattgtaaatgattacaaaaacttcgctaaggtgtgcttcgacaactttggtgacaaggtgaagaattggttgacctttaatgagccccagacatttacttcattttcctatggaaccggggtctttgccccaggacgatgctcaccgggactagactgtgccatcccaactgggaattcactcgtcgaaccttacattgctggccacaacattcttctagcccacgctgaggctgttgatctttacaacaagtattacaagggcgagaacggccgcataggtcttgcatttgatgtaatgggtcgtgtgccatacggaacatcatttctagatgaacaggccaaagaaaggtccatggacattaacctaggatggttcttggagcctgtggttcgtggtgactaccccttctcaatgagatcgttagcgagggaacgactacccttcttcagtgacaaacagcaagagaagcttgtgggatcctataacatgttgggaataaactactacacctcaatattctccaaacatatcgacatctcaccaaaatactcgcctgttctcaacactgacgacgcctacgctagtcaagaaacgtatgggcctgacgggaaacccattggtcctcctatgggaaatccgtggatctacttatacccagaaggcctaaaggatatccttatgatcatgaagaacaaatatggaaacccacctatctacatcactgagaacggaatcggggatgttgatacaaaggagaaacctctacccatggaggctgccttaaatgactacaaaaggctagattacatccagcgccacatctcaactctcaaggagtcaatagacttgggagcaaatgtgcatggctacttcgcttggtctctgctggataactttgaatggtacgccggctacaccgaacgttatggcattgtctacgtcgaccgcaaaaataactacacgcgctacatgaaggagtcagccaagtggttaaaagagttcaatactgcgaagaagcctagcaagaagattattacgccagcttaaaaacatgggacctcgtgatgtgggtacggtgccacccatgaaataaaaacctagtgtgtggtttgaaacctaaatttttctttttcttttttgcaccatgagagaggtagtggagtcatattctccagcaccgtggctaataatgtattgttgcagtacaatctagcattgtcgtcatgcaataaataaagtgactggtttccctatttcaattatt

SEQ ID NO: 23895 - DNA, 3176 bp, Zea Mays
atggctgcgtccccgccaaccgccgcgtatatatatacggttgttgccgccttgcaggctccgttctgccgaccaggacggtgtgaatgaaaggggctcaggatacaaggcacaggaagaagctggacctccaggttctcgcgcccttcccaggatgcctggggaggatgatcgacatgttcgacctcagcaatggcgtggttgccaccaagatgctaactgagaaggcacatagagatgtttctccggccggaaaagaccgaagtaacactttcaagatggcaattatccccccagctcagacagaagataaacaaatagatagccagacgagaaggaattcccctactaaaagatcaaactcgcctactaaaaggagcggtgcagcgcctgttaagatgatcatggagcagggcatgtggaaagaagggatgcctgatgaggagccactgaatgttgttgcaagattaatgggactacatgatgctccagttcagcaatctaatttccatttagcgagacaattggataaggaatatcaacgtggtggttttgaagagaactaccggaatctcaagccaaataaggaaagcaaatgccatcaaaaccaaaaggcagggcacacttggaatggttctggtgaccaaccttcaagaatcaatagcagccggagcaagcatcaaggaaatgagccttgctgtgagaagaggatgtcgcttgtccgcgagaagtttgctgaagcgaagcgtctagccacggacgagaagcttcttcattcgaaggagttccaagatgcactacagtttttaagctcaaatagggacctattcttggagttccttgatgagccaaatcctctgttatcaagcaaccgttatgagttccaacctgtcgcgccaccttctcaagcgaagcagataaccatactgaagccatcagaactagcaaagagaaaaggcagcattcttgtggggagacaactgttttcagatggagatgaaaggggacttaacagatacaggcgccatcagagtttagatgtttgcccggcaaattcaaatttgtccgagccaacaaaaattgtgttactgaagccaggacgactgtcaaaacctcatgattccaggattgcaaggtcttcattatcatcagcagaaaacagtgaagatgaaagtatgacgacggttgatgaaaccgtgtgctcaagaaggttggcaaaggaggtcacttggcagacgaggatgcggctaaaagacaagcaagacgaaaagagcacgctctcatgtgaataccttgacttctatatcggagatgactccttcagtaaatcagaagttgagatttcaaaagagatgcctggtgaaacaagtgaggagttggagtttggcactccgacttctggccgttcctgggattttctgagcagaagtggaagtccttactctgcgtcatgctctagccaggcatcccatagaagggaaccgtcggtagttagggaaggcaagaagaagattttggagagatggtctatggtatcgtcaacagtcagtagcgaggaggaaatggaaggtcgcagaagtacaggcacgcttggtgacatactcacaataccgaaagtcaaggaccaggaaggaattggggcggaaacactggggagcccagcacctgagctggaacctgaggagcctttctcatgcttgccaagatctcggtctcttccactttctctgtcctgtggagtcgccgagtctaatggaggagtagcctctggtagtactcaggaagctgaaagggagaggatcaggaagtcatcatcgtttagggaaaaggtttcaagcctgttctctaaaaacaagaaaccagttagggagaaggcagatctatccgtgagcaatagactcgaggtctatggaggggctgaaactactgctgatgtgaagaagggcttgaaccgtcttgcgttagacaatcttcagaaacaaagtactagtcgtgtaaacacagacgggaagaagaacgctgcgcaaggactcgtcactagttcttgtggtactaatgatacagctaataccacccctgccaaggacaacattgcctccattccaagtcttggcgccccaggaatccttggtgaccctcaggaccagcctagtcctgtatctgtgctagatggaccgtttattatacgtgataacagcaggaatgtactgtactcatctccatccccacaggctttgtcgaggtctcccttgatcggatcgtttccacggtccctgccagtgtcgtgggaggaccccccgccggaagccacgtcgccgaattccctgagactctcgaggcttttctccaaggccgacgaggatctagactcgctgacgttcatccagaagctggtccgctcctgtggcatggaccgagcaagctgcgtgttggctggccctctggacccggacctgctcgagaaggtttcagagcacgaagacgacggaaccaggttcgggagaaggcggcttcttttcgacgccgtaaacgaagcgctcgccgagctcgcctggacggcggaactggccgcgtacccctggggcggcggcagatcacgcctggactgcaactgcaagaacggttccggtggtgactcggcggccgaggagatctggcgcgttatcaggaactggtcgacacttgacaagtaccctccctgcgaaactatcgaaggaaacgtcttgctggagatgatactcaggcgggaggcggacagcggcgagacggctcggttggaggtgtttggtctcggcgcctcggtctgcgccgtggtgttggaggagctggttgaagagacggttgtggatctcctgactgactgctagtgagtgatacttgctgctgctgttaacactgctccgttaatccacccctcaagatggaatgggtctctttgccttgttcacatctttgttttgaccggcatttgctctagccgttgactggtaatggatcatgccatttgtttcgccgtttaattacacacacgagaccaaaaaaaaaaactgtaagtagttgcatctcggagcctgtccctaccctgtccacaagatgatcttgttttaatccaagcttagagcctagtcccatgcatgccacaagtatgaaacataatacatttttttattattctg

SEQ ID NO: 23896 - DNA, 1937 bp, Zea Mays
gcccttcctcgacgtttctttctttccttccacgtctctccacctcctcctcctcctttctctctcagtctctctccagcctccgcccgcttccttcttctcctgagagtcctgttgctgtctatctcccccgcgcgctattcctccgcctcgcgatagcaatccgcgcattggacgtcgccgcctcaccggacggagccggtcgaaatggaggaggcggcgcccgcaggaactaataaggtgtactacgacgggtgccccggctgcgccatggaccggaggaaggagagccgcgccggcgtcccctacaaggagctgctgttcgtcgccgccgccaccttcgcatccgctctgccaatcacgtccctgttccccttcctctacttcatgataagggacctgcgcgtcgctgagagggaggaagacattggattctacgctggtttcctcggcgcagcatacatgatcggcagaggcgtcgcgtcggtcttctggggcgtggtggcggaccgcgttggccggaagcccgtcatcgcgttctccgtcctctcggtcgtggtgttcaacaccctgttcgggctgagcgccaagtactggatggctatcgctacgaggtttctcctgggcgccctcaacggcttccttgcgccagcgaaggcgtactccatcgaggtctgccggcctgagcagcaggctctgggtatatcggtcgtaagcacagcgtgggggatgggcgtcataatcggcccggccatcggtggctacctcgcgcagcctgccaaacagtatccgcacctgttccatgagaaatcagtgtttggaaggttcccgtacctgttgccatgcctgtgcatctcgttcttcgccgccttggttgtcataagctgcgcatggctcccggagaccctacacaagcacagaggcctggagagagcagcagctgaagtggcagaaggcacgacagcagcagcagcagctcaagaaagcaccccggagccggagccggagccacctaagagcagcctgctcaggaaccggccactcatgtcctccatcgtcacgtactgcgtcttctccctccacgacaccgcgtacgtcgagatattttctctgtggaccgtgagtggcagagatcacggcggcctcagcttcgcgtccaaggacgtcggccaagtcctcaccgtcgctggcgccagtctcctggtgtaccaaatcttcgcctaccgttgggtcaacaagatcctcggcccagtcaactcaacccgagtttcgtcggcgctatccataccgataatcgccgcttaccccttcatgacgcgcttgtcgggaataaggcttggtgtgcctctctacgtcgcggcgatgctcaaaagcgtcctcgccatcaccagagtcaccggcacatcgctcctgcagaacaacgctgtgccacaggagcagaggggcgctgcgaacgggatagctacgacggcgatgtctctgtccaaggcgttcgctccggccgtggccggcatcttgttctcgtgggcacagaagcgccagcatgccgcgttctttccaggtgaccagatggtgtttctgctcctgaatctgacggaggtcatcgggctcgtgctcaccttcaagcctttcctcgcggttccccagcagtacaaacagtgaaagcggtgctgcgtgcgtgcgtgctctgcatggatactatagagaggtagctagctgctagccagtgtgtgtgggcgagagcgagacgagggagatggacatgtcaagtagaagcagaggatatgatgtcattatacatatttactttgcgagatatgtagttcctcatgagtcttcgctgtgcggttttctaaaaaaaaattgagataaagttggtctctcaattatatggtgcattccggacatcattgttacatggaaagtgtacttcctct

SEQ ID NO: 23897 - DNA, 2057 bp, Zea Mays
gcgggaagcgccgccgccatggcgccaaacccccccagtcgctataacaccccgcccctagccctctcgccccctcgcctgcccacctccctcgccatcgctagtctcaaaccacaaccctagagaagaagaagagagagagaaagggagatggtggggctgcagtacgatctcgtcgggaacccattgggcgcggtgcgcgccaccttcgagaggacggccgccgccgctgcagcgcagtctggaggagctgaccctgtggcggcgttccgtggcaaagactggggcgccggtgacctcttccgctccttcctcttcgagcaagacggtcttggcaaggttccggtgttggattcgtcaaatcttggattgatcaaaccgaacaccctggtccggtatcggggaatggttcaggatatgcttgggaatgagtactacattggtgctttcaaggatgggtcaacttggaggacaaacaagtacactgacttctcaccgtactcaatgccgcatccttgtgattcacatctttgggagcgccatctcttccactgtgtgcctgcacctggacaaaattcttggacactggagtcttcaccaggacctgatgtctgcaggatgtcgaactgtttggcacctgaactaagagagaaaaggaagagagatggagatgacgatgccatggatgtttcagaaaatggccatggcaattcttcattctgcaagaagccggaaggtgatgttcatgtctcttccagttcaactgaagtggcaggaaccattccagagatgaatggaggcgatcatcatatacctggaagctccttttcatgtctagtgaagatctatgacatgcctgatagtcaagtgaaattaaatgatgttattgagtttattggcgtatatacatttgacccagaacttgctgctcctagtgacaacccagatgatataatgttagacctcatcgaagatgtaacagttcagttgcctccgagcaaggtgccacgtcttcactgtttggtatggagaaaattatcattccatgattttatttcaaggcctgttgttgagccttcacccagcctgttaagaggcattcggcaatctttgctctcacacctcacccttgtattaggcaatgacgagcttgcagcccagtgcttgctgttgcatcttctatccagacttcgtaatagggtggatgtggtcaccgttggcagactctccttgaatttcactggcttcaacagggaaagtgcttccatatttgggaatcagctgtattctttgatccagaaattggtgccgtattcacaagccatacctctgtcaattgagtatctcaacacagctacacttcaacctagaaaggacaacaagtcaggaaggttggtcacaggagttctgcagctacctcaaggcactcatctgatctttgatgagactcttctgcagacaggatcattgacatccaaaggtgtggagaataccatgctgctcaagaacctgatggagtcgcagaaggttgactacgattttgagtactacaagctggaaatggcagctgatgtgcagctactcactctctctgaggggaaatcaaacatccttccttcagatttggtagtgcctttccggccatcctctgttcccacagttaatgcaggtgctgaggaaactgagagctggaggtggtttttgaccacagtaaggtctcttcctcagtccactgaacctgaaacttaccagatgattcaggatgaaatggtcagtgccatgcgtgatgataggagcttgggttgttctgaacttagcagatggctaacaatggcacaaataatggcctccagctttggcgagaagagtctttctttggagcactggcagatggtgaaggagcttgagaggcttagaaagcagaggatgcaatgagaatgactcatcattagcatgtgtttttgcactctaattgtttatgttggtatgctgttatgtgtatagtactagacgtttgaatcaagacatggatctaaggcatttctgtaaccaaaaaa

SEQ ID NO: 23898 - DNA, 105 bp, Zea Mays
gtgacagtcaagacttgtgataatcacaaaattgtgccgattcagacaactaaatgcatccttccctctcaaagttatagcatgtcaagtagagcttgactgtta

SEQ ID NO: 23899 - DNA, 5013 bp, Zea Mays
tatccgaagcgaacagggctcccgcaccccaacacctaatttgtgcgcgcgcccgtgtcacaaagagagtgaagagagagcatggaaggctcacccgccgatgccgccggctccggccgccgcacgcgcacccggggcgcggaggcgtcggggcgtgccgccgtgctccaacaactccgcgccgttcgcagtggtcaaattcgtgcctccgacgccatccaggtgaaggttgacgccccgatttacgacaccgtcccggaggaggagtacaacgtgctcgtcgctcgccgccgcaaggaagcaggcgagttcatcatcgacgacgacgggctcggttacgtcgaggacggccgcgaggaggactggagccaccgcgctctcccttcctcctccgacgagggatctgaaggcgaggacggcgccccccgcaagcggaagcagacgcgccctccccaggcgaagcgccagccgcagcagtccgccaaggtggcctctctctccgccgctgccgcaaagacgggccagcagatctcctctatgttcacatcctcggtatttaagggacgcggcagcgaccgcgccaagaacttggcactggccgccgacagcatcgtggacgacgtcatcgccgagtttgcacctgacgagaacgaccgtgaggagaggcggcgacgggttgctagggtttgtgcgccgcagcctgtcccaacagtttcctacatcaagcctcaaaaggtaattctcgatgctgaaatggtcagatcggagaatgaaaatgatatggtggtggtggaattgaagaacgatactgagatggaaaccaatttggaagaaattcctggttctagtgctgaattggtggttaataagagtttggaggagccgaagcaggaggataatggggaagtaaagatagaaaaggcacaccgcctcaatgcaaagattaaggcggaggagtgcagaaataatgatgtgacgagtgcaacagaaggatggatgaagatatgtgggaatggggagaatgcagtaggtgaagaaggggtggctgttgatggtaacaccaatgtggatgaaagttcagagtttgagctgaaagatggagcactgcccttctacatactggatgcatacgaggaaccatttggtgctaattcaggcacagtgtatttgtttgggaaggttgaagttggcaagcaattccatagttgttgcgtcattgtaaaaaatattcaaagatgcatatatgctattccaaaccggtcagtgtttccaatggactccatatcagggatagaaagaaaccccactgctgaccttttgccatcacttcgagcaactctacatgagttggcatcaggattaaagagtgaaatagctgacaaattgtcagacctcaatgtgtcaaatttcataatgactccagtcaagaggaattatgcatttgagaggactgatctaccaaatggagagcagtatgtcctaaaaatcaattatccttacaaggatcctgctctaccagcagacctcaggggtgaacattttcatgcattgcttgggacaaacaatagtgctcttgaattgtttcttatcaaaaggaaggtcaagggaccttcatggctgtcggtttccaagtttgtgacacggccatccactcagcggctggtgtaaatttgaagttacagttgattgcccaaaggatatatctgttttgacaacaagtacaaatctagaagttcctactgttgtagttggagcagttaatctcaaaactatcataaatgagaaacacaatgtgcatgagattgtgtcggcatctctcatatgttgtcatcgggtgaagattgatagtccaatgcgtccagaagattggcagaaacggggaatgctcagccattttactgttgtgcgcaaacttgaaggtagcatatttcctataggtcttgctaaggaagcttctgataggaaccagaaggctggtagcaacgtgctagcactagaaagcagtgaacgtgcattattaaatcgcttgatgattgagctgagcaaacttgattgtgatgtacttgtgggacacaatatttcagggttcgacttggatgtgcttctacaccgtgctcagacatgcaaagtgccaagcagcatgtggtccaagattggtcgtctcaggcgatcattaatgcccaggcttaccaaaggaagcacactctatggttctggagcaagtccaggaattatgtcctgtgttgctggccgtcttctctgtgacacctatttatgctctcgtgaccttctgaaggaggtgagttattccttgacacaacttgcagaaacacagttaaaaaaggtcaggaaggaggtttctccacacgatatacctatgatgttccagtcttcaggcgaactgctcaaactggttgaatatggtgagacagatgcatggctttctttggagctcatgtttcatttgagtgttctcccactgacacgacaattaaccaacattagtggtaacctgtgggggaaaacactccagggtgctagggctcagagggtagaatatctactactgcattcattccatgcaagaaaatttattgcaccagataaatttgcacgcaacaaagagctgaactccacaaaaagaaaaatgaatcctgatactgggggtgcaaatgctgatgatggtgctgctgatccttccgttgatgatgaagtgcataatggtgatcaaagtaaagctagaaaaggaccttcatatgctggtggattagttttggagcctaagaagggtctatatgacaagtatgttctacttctcgacttcaacagcctttacccttcaataattcaggaattcaacatatgctttaccactgtcgagcgttcttctgatggcagtgtacctaatttgccagcatcaaaagttactggtgttttacctgagttgctgaggagtttggtggagaggagaaggatggttaaatcatggttgaagactgcttctggtcttaaaaagcagcagttcgatattcagcaacaagcattgaaacttactgcaaatagcatgtatggttgcttgggcttttccaactccaggttttatgcaaagccacttgctgagctgattacactccaaggtagagagatattgcaaaacactgtagatctggttcagaacaatttaaatttggaggttatctatggtgatacagattctatcatgatacatactggacttgatgacatctccagggcaaaagcaattgcaggaaaggttattcaggaggtgaacaaaaagtaccgttgtctggagattgatcttgatggcatatacaagagaatgttacttcttaaaaagaagaaatatgctgctattaaagtagcactggatggcagcttacgagagaacattgaacgcaaggggctcgatatggtcagacgtgattggagtttgctgtcaaaagacattggagatttttgtcttaaacaaattctgtctggagggacatgtgatgatgttgttgagtcaatacatagttcacttgtccaggtgcaagagcaaatgagaagtggtcaaatagaactcgaaaaatatgttatcacaaagagcttaacaaaagcaccagaagattatccagatgctaaaaatcagcctcatgttcaggttgctttgagactcaagcaaaatggttactctggttgctcagctggtgacacagtaccttatataatttgctctcagcaggactcagataatgcacattctgtgggaatagctcagagagctagacatcccgaggagttaaaaagagaccctgacaagtggatgattgacattgactattatttatcacaacagattcatcctgtcgtttctcgtctgtgtgcttccattcagggcactagtccagctcgtctggctgaatgtctgggccttgattcggctaagttccaaccaagattgactgagtcgagcaaccaagatacatctatgatgctgttatctgtaatcgatgacgaagatgagagatatcgtggttgtgaaccactgcgtttgtcatgcccaagctgttctggtaccttcgactgcccccctgtatctagtctgattactagtgctagtgctacaagtgtatcagatccaattgaaggaaaggatgctactgctaatttctggcgccatatgcggtgcccaagatgcctagataatactgttgagtccaaattttccccttctatgctcgccaaccagatgaaaagacaggctgataatttcattagtctatattataaaggtttgcagatgtgtgacgatgagggttgcaaatactcgactcacagcgtaaaccttagagttatgggggattctgagagaggaactgtctgtcctaactacccacgctgcaacggtcgcctagtaagacagtacaaggagtcagatctgtacaggcaactatcatacttttgttatgtacttgatgcaacccggtgtcttgaaaagctggaccagaaggcaaggctccccttcgagagagagtttgtagcagtaggccaaacaattaaattggcactgctagagatccagaaaatccgagacagatgtgcatttggatgggttcagctaaaggaccttgccgtatcaatatgatgtttttcttgtgtgaaagggctcaattagataagtttgaattaaccgtgcaagaaattcatctctctgtaggttattctagatctcgttggtaaaaggaacaggacacggcaaacggtgtatcgaaacaccagccgtctttggtatttccctgcgtgacagaccttgtatcatctatacatgtgttttagccagtggctgtattgtacaactttatgttgtgtccgtctccataggcctcggtgcatgtgccaatgtagtcttgttaatataattatacgcagcgtgtgatgagaaaaaaaaaacaagacactagattactaatgtcgcgagttgcggtagatgggaaaaatatgggagggaca

SEQ ID NO: 23900 - DNA, 2042 bp, Zea Mays
cattttgtacttgcccactaggaagctgtcaaactcatctctcaagggattcatcgcacctgaacttgggcggcttagtttcttgcaagagctgtatttggaccataacctgctctttggtacaattccaaaactaattggctcactgaagaacctgagggttctggacttgagcgtcaatcgactcactggaccgatcccttccgaattaggtggcttgagcagtaaatttccattccaatgggttgactgggaatataccgtcggagctgggaaaattacagaatctcgtcgaacttaggttggataggaatagattgaagggatcaattccaggaagcaatactgccagtttttctcctgcttcaaatattggatccacagctcacaatggactatgcccttcttcccgattatatgttgcggatttttcttacaactttcttgtcggaaaaattccatcctgcttgaaatatcttccaaggtcaagtttccaagggaactgcttccaggatgagtactctgtccaacaacgacctttgcaaatttgtacaagtggttctactggccagcaaggtgtcatatacggatccaaacatcctggccataaacatgaaaaaatggagcaaccaatttggcttcttgctttagaaatcgcaactggtgttcttctggttgtttttgtgattactggtatagttactgcttccagaagttgcaagctgaagccttctataagaatatcatcatggaatcgatcgaaaagttggagcgacgagataacagtgttgattgattctgatatgctgaaaagtctaccaaaattaagtcgccaggagcttgaagtggcctgtgaggattttagcaacatcattggctcaactccagagacggtagtctacaaaggaaccatgaaggatggacctgaagtttctgtgatatcgttgtgcgccttcgaaggtcattggactagccaccatgaactcttttaccaaaacaaggtcattgatctggcaagattgaatcatgagaacatagcaaagttcttagggtactgcagggagagtgatccattctctcggatgctagtcttcgagtacgcaccaaatgggacgttatttgagcatctacattatggagagggaggccaattttcttggctcaggcgaatgaagatagccattggaattgcccaggggttaagatacctgcacacggagctgcagcccccatttgctatatctgagctgaattcgaactccgtgtatgttacggaagattttactccaaagctggtggattttgaatgctggaaaatgatgttctcgagacactccatctcgagagacgagaaggctcgtgggcacttgaacagcaaatcctcttttcccggccacggggattctgcagcggatagacaagccgatgatatccaggccaacaccttcgctttcggagtgattttactggagatcatcagcgggcggcttccatactgcaaggataaaggctatttggtcgactgggcgagcaagtacctccagcaggcagaggagatcgggaagctggtggacccggagctgggcagcgtgcggagcgaggacctggcggtgctgtgcagcgtggtgagccggtgcatcgacccggacccgtcgaagcggccgtcgatgcagatcatcacgggcgtgctggagaacgggatcgacctgtcggcggccgccatcctcaaggagtcgtcgctggcgtgggccgagctcgccctcgccttgtgacacgctctactcccaccacctttgtgaatccatacggctgctgattgatttccttgactggcgtagggtttgctgccggtctcaactgagcagccgtttcgtatgaatgaatgaaacctgaaaggccatatgtatgttcttttcatccatccgttcgttctacacatccatcccgcacagatcatttgttttttttttttttgctccaatctattttaggttcagaaaacagtgtcggcaaaagaattatccggtaaaacgacagacgcc

SEQ ID NO: 23901 - DNA, 288 bp, Zea Mays
cgacgcggggctggaactcagtggatcgtggcagcaaggccactctgccacttacaatgccccgtcgcgtttaagtcgtctgcaaaggattcagcacgccgcccgttgggaaggagcttcgaggcggcccgccgcggcgcgtcggccgggcgggctgagccaatggaacgggcccttggggcgcgaacgccctaacgtgggtcggggcgggcggggagcagaacgcccgttggtagcttggattctgactaaagcgttcagtcatatccggcacaacggtagcttcgc

SEQ ID NO: 23902 - DNA, 1636 bp, Zea Mays
ccattctcttgattagatgggaaaaccatatctagaggatggccgtcagtggacagcacgagacataggtctcagtcacagaacttgtgcgtggatgactcatggatttatgagtgttaatacaaatattggagctggaagggccttcttaagatctctttatcgacaatatgctgattggggtgttgattttggtcgattgtatcttcggcacagattatagcccagaagaaatcatcactatttcagaggataactggagatgattgggacaactggaaggatgtgagctcgcattttggtgtatcaagttccttcgctactgctaagaagattggggccactgggttgcgaggaagatcttggccagacttagacatgcttccatttggatggcttactgatccaaaccctatttcttttgttaatgcaggtgtaaatcagggccctcacaggaaatgtaaccttactcttgatgaacagaaagcacaggttgttgatgatcacttcaaatttgagtgttctgtatcttttttgtatagtaatgaactcttttttctttgacatgaccttacagatggcactttggtcaatgactaaatcacctctcatgtatggaggagatttgaggaatcttgacgatagtacattaaacataattaccaattctggtttgttgaagataaaccactatagtagaaataacatggagttccattatgtgcacagtgaaaggacatcaaatggagaacattctggtcactttaggtctccttatcctgttcgtgttaccaagaatgatggcatatttgtcagtctcactgcttgcagcgacgatgcagctaaaggatggtatatgtttccacaagatgggaaaccagatcatatatgcaggaactatgaaatactgaatgataaaaatgtctcattttgcctcggaaaaacaaaacgttttcttgcatcggatgtccttaccatggacaccaaggaacaccaatcaaagtttcatatttcagttacaaacactgatgatacttgtttggatgcatctgctggtcgaaggcagactgcctcagagatcaggcttcctatgttctctgcatgcaggtggcatgcaaaacagatgtgggagttaaatgcgaatggaaatcttgtgagcagctattcaaggttatgtgccacagtggaatcaagggacgaaggaggtatatattacataacttttttattttgaactaagtgacatcactatattttcctatgaaatataggtaccagtggaggtcgggcatggattgcaactggaagtgaaggagaaatctatctcgcattcttcaatctcgactccatgagcaggaagatgaccgttcaaatatcagaccttggaaaggttctcggaagaaaccttttggagaaaaacccatgtagctacactgaagtttggagcgggaagaatttcggcccggtgaaggaagagatttcagcggtggttcattcgcatggctccatggtgttcgaaatcatatgttgagattgcagtactgggcaagttgttcgagaagtttgcagtgataatttagttgagatgaatgccgtagccagtctttcgcgcagaacagtgcctccaaggtttcag

SEQ ID NO: 23903 - DNA, 2165 bp, Zea Mays
cgctcccccagcaacgccggcttccatccacccccgcgcaccgctccccctttccccctttccttgcgcgatgcgagcccacaaatcacgccaatccatggcagcccgcgtgccccgctcccccgcagcgcctggctcccctttccttgcgcgacgcgagatcggcgagattgccctcaacgcgctcgcgtcgcgccgcggatcccccaccctcctcccctctgcacgccgccatcaactcgcaccggccctcgcccgtgatccatcctctcccccgcggcaatgatatggcgtcccccctcaaccgaccattcccgcagcggatccgcaccaacccgttcgcgccggcctctggaagaagaatccaccgaaggcgaaaacgacgacggaggtccggctgactcgtctgggtctttgcaatagcggcaagcgggttggagctccgcttcgggcaggggagaaccacgtggagacctggagtcacgctgcctagactcgccgctgggtggattcgtcgcgatggaggtcggattgtgaacacgccgtccagttaggacgctgtcgtcttcagatccaggggatggggttgctcggcatggcggccaagggcccctcgcccacgcgtcgcctaatgccacagccgcacttggccgtctcctcgctggcggcctccgtggctctgatccactgcttcctcaacacccggagatggttgacgtcgccttcgtcgtctcctcgccagtggcctccaccagccccgcagtccaagacaaagccacgacatgagtcaacccaagtccggtcgcacctacaccgatggccgtacccaacaagttgagctttaagaggaacgtggtgtcattgtcatctgagctcaagggtgtgaggagcaagcttgcttcctaggagcagctgtttgtaagggaatctcaaactagaaaggttagtatgtaactggtaccttcgaggttgttggtggggtttgtgccgacaaggaaaaaaatttagcagcttgcggagacaaaaacaaggagcatggaagaggaagtaatcaagctgcagaaatgcttacaggacaaggatgggcaactgtgttcatccacaagtagcacggaacaggagaagcaggtgttgcatcagctaagttagctcggatgtagtgcatgtcattgctgaaagagctgaatgagaaggacaactcactcaaagaccatagacttcgagtgaacaatctaggtgagcagcttgatcttctccagaaggatgtacaagcaagggaggtcacacaaatgcaacttaaagatatagttataaggatcgagaccaacatcatggatgaagttgccaaagcttttgaaattgcgatgttgagaggggaaatcagaatattgtctactcactggacgaacaaaaccaagaaccttgaatcacagttaaaaaagcaccagagaactgatcaggagctgaagaagagggttctgaagcttgaattttgtctctggtcctgtcatccactggtgcgttcgccaccgcacctaccgctgttactagctcccttgctcttctcttgctgcgactgggatatagcatcgtggatcttgaacctaggccagaatttaggcaggtctagaaccaccatgatgcctggaacatactcctattttatccatgtatgagccttatgggaactctgcaattactatggatcctcttatacattatgttcgacatggagacaaggtatggtgcataaaaaagtaggaaccacaatgagattgtaatgctgcacatggcacatcaaggtgcgcaagatatgtaccgtagaaattatcgtaaagtgcacacagctgtatgtatagatgtttagaagtggtcgaagttaggcttgctcaaccggggcaatgatttacttagcctgctgaaatgtactataggtagcattcaagtttgtgaccatcatgcaagtacatgtgggtttgttgaaattgagtggtcatcggagaagtagcaaaatgttccctatcgagagctcgtgtactatatttgttttatgaacttaatttttattacaacataacatgtggtcatacatatgttattgctacaatattttttccgttgcaacgcacgggtatttacctagtacccaaaatatataaagtgat

SEQ ID NO: 23904 - DNA, 2388 bp, Zea Mays
agggaacgttgaagagtcccgtcccgtcgtgcaccaacatgccgccgcagctgctcgccagctccattattgcctctactccgccatctccttcctaatcgctcgcctcgtttcatcacctgagctctcctaatctcattcaccgttgcttgctctttgaattgcctttgcccccatttgctttcctgtttcttccatcccatccgtaccagctgacggtgcccgggttccatgcccagcggccagcgccttgtgacctgatccgcggctcgtccattcctccctccgtgaatggctcctccagcagggtctggggcagcgacggagggagggccggcacggcggcgcggcaccggcaccggtaccagccccggccgcaccaaagtgtgggtcgagccgccgggcaagagccaccaccagaccccggcgcggtcgctgcccccgccctcgcccccggccccgtcggtggcggccaagagggtgtccgtggtgtactacctttgccgcaaccgccatctggagcacccgcacttaatcgaggtgccgctcgccgccccggaggaaggtctctacctgcgagatgtgattaaccgcctcaacgtgctgcgcgggaagggcatgtcctccaagtattcctggtcttgcaagaggagctacaagaacggcttcgtgtggcacgatctgtccgacgacgacctggtgctccccgcgcagggcaacgagtacatcctcaagggctccgagcttcttgaccgctcgccgccgctagatcggcagcagaatggcgttagcaacccaaaggtggagggcctcaagccatgcaaggaagagtcccctcagtcgcggggctcgcaagaaggatgctcgtcgtcatcgtcttcgtctgcccttggcaaggagatctcacctccacctgccactcgacggccacagcagcaggcgcaatcagcagtgctgccatcgtcgtcggcttccaccaaccatgaagatgacctgtgcccgaccgcgcattcaggctcgtccggcaaccagtcccctgaacctgcaggaagaaatgctccattgtcagaggctagctccccgggaccttccgaatacagggtctgcagacccatcggagctcaggatgccgcgacacaaacagatgacagtgagagggatgttgctaaaacccatacttgcgtggtcggagtgtccatggatacgacgttagatgctgagattcaggaatgtcatcaaaggagctcactgctgtcaccaaaggtacccaagattgttcaggaatcaccggccctgtgttcctctgatgcttcaccgggtgtcagagttgagaccttggagtccctaataagagcagaagcctgtaggagaagtagctttagaacactagaggaggaacacatgcttggcccaattggtgtgaaactgaagccagccaatttgctaatgcagcttatcacttgtggatctatatctgttaaagaacaccgaggctttgggttcatcccaacgtacaggcctcggtttacacaagttgagttcccttcgtcagtgttctccactcctgtggcattgcgacaccttgacaaaatcccctgcaatacaagaacaatcgggacgagagctccagagtctgaacgtttcagtgggagcttggttgagaccaagatgcaggacgagtcaaggagaggaatcagctcactcaaacgctcatcatcttatgacgaggatagagtttatagagcagcacattccaaaagtgatacagaaaactcttgtgagtcaggtagtttcaggtgtcttccgcagactatcagaatcatatcatgtaagcaatcgagaaatggaacaatactctcccctttctctgatgtgagaaacagctctagtcaacaagaatatagtactagatcctcaccactgggttcatcaaagagtgcaagcaataggatgactgatccatcactgggtaaagtagattcattccacaaggaaaaggacatgatcaagatcgaagaaagcttccttctggagctcgggttataatccaatctgcacctttgtgtgaagatagtgatggcagcaatgaatcactgtagcatggttacttgaacgcccttccttccttgagagagggatcgaatggcccaggttctgtgagggagggtgtatgcagctatgggcagtggatctgatccgataatgctgcgccatggagagcgacgtgccctcagggcaacgccagatgcacatgtatttgtggaactgtgaagcaggaatacaagctgtgtttggctctgaattatttgatcctcagtggcatgtttctgaagtctgaacgtgaaacgatagtatctggctctgaattttcttgtctttcgattcgga

SEQ ID NO: 23905 - DNA, 608 bp, Zea Mays
gcgagagccacttttgcggccaggaccaggaggacgtgagcgattcagagccgtaggccccagatcttcgcgctaatctacaagtacactagtgcaccgcctgccgtcaaatacatgcattcgcctgctcgatcatcagtcactaccgtatgaggtccatcaagcatgaaacatcgggttaggttaggtcccgtccatgcggccgaccatcatcatcatgcaatgcacggggggcaccgtaggcaacagacagagccatgcatgcagaacggattatcgctgctgagctagctccctgcctgccttcccgagccagacgcgcacgcaacaggcacgggagggaaaatggtccggccgtgcaggattgaccctcaggtccccgactccggaccaagctggcaagctttagcttacggtgcacccccaacgcggcacggcgaggagtctggatggatggtgtctgccatcgtctgctcattcatttctgcctcgccgccactcgccagtgcgtcagggtgaaccgctcagcccgatccgatctgatcttcggcgggcgggcgggcggcaaccagagcccctggtacgggcacgtcaggttcaaggctaaa

SEQ ID NO: 23906 - DNA, 157 bp, Zea Mays
ttggagtccaaaaaattcgaaaaaaattacaaaaaatcacaaatttcatccccaatctctctatatatacccctacccgggtggagctcattccacacaccattccatcttatttttctcttctaaactcccctttcttcacacaatgtcgggttgg

SEQ ID NO: 23907 - DNA, 1829 bp, Zea Mays
aacccccccgcgcgcttgtctccttcccccggccatctccggcaccggatttttcgtcgccgccttgtcctggccccttccgcgaagacccattcccacacaccctttatgccaacttgccgcccccgcggattcgcgcgcaccgcggtcggtgtctaggcttgattggccctggcccaggagcacggcgaaaggcggcgtcttggtgtgaagcggccgcgctggattggttgccgccggtggtgctgatcgttgggcgtgtttgagagcgcgccgaaggctctgccttgtggggagcggtcgacaggttagggataggcggggggagtggggtcgtcgtgaaggaggcagcagcggttcgcgtggatcgaggaagggattttattgcgttgggatttggtaggtggtggcgctgctcttgccgttcttggcatgagcgttggagatggggacggactactacaatgtgctcaaggtgaaccggaacgccacggaggaggacctcaagaagtcgtaccgccggctggccatgaggtggcaccccgacaagaaccctggcgacgtcaagaaggaagccgaggccaaattcaagaagatctccgaggcctacgaggttctgagtgatccgcagaagagggcggcgtacgatcagtacggcgaggaaggcctgaaggcctccgcagacggcggtggtggtggtggtggttccacgtccacgaacggggccgccaaccaacgcttcaaccctcgcaacgccgaagacgtgttcgccgagttctttggcagcaacaagccgttcgagaacatggggcgagccaagtcaatgaggttccagacagaaggcgctggcaccttcggtgggttcggtgggaacgagagcaagttcagaccatacaacaacgattcggccggcaccggctccagtcaggctcggaagccgccgcccgtggagaccaaactgccctgcacgctcgaagagctgtacgcaggctcagcacgcaagatgaagatctccaggaacgttgtgaagccgaatgggcaactagggaccgaatcggagattctaacgatcgatataaagcccggctggaagaaggggaccaagatcacgttcccggacaagggcaacgagcagccgaaccaactccccgccgacctcgtcttcgtcatcgacgagaaaccccatgacctgtacacgagagagggcaacgacctcctggtccaccggaagatcgatctggtggacgcgttggcaggaacgacggtcagcctgaagacgctcgacgggcgtgacctggtgattaggctcacggacgtggtgacacctgggtacgagcttgtggtcgccaaggaggggatgcctatcgtcaaggagaacgggaggagaggcaacctgaggatcaagttcgacgtcggtttccctaagaggttgtcgtcggagcagcggcacaccattcggaaggttcttggaggccagcctcagcagcagtgagcacaggcgttcgaaacaagattgtctgccccttattggctacccatgcaatgcagatttgcagactagttcagatgttcttctctttcttcggctggcttgtactgtatgtttagttgttttttcctttgtggtgttttctgatcttcttctcccttgttggaaaaaatggtggtattgaagaccacaggtgtaatacaagaatgctgtctttgtgtcttcatttacatgtttcagatatcgtttggttcacatatttgtaagtaacagataacattagatcatgtttgtttagctctaatcgtaatgagatgccacactagaaattaataccaac

SEQ ID NO: 23908 - DNA, 1482 bp, Zea Mays
aagaagctagctaagctactacacgagctagctagcagcagtcgggcacgcagcatctatcaggcagcaggcagcaccacaaggaaattcaggttagggaagcagccgcacaaggagttcaacgagcactcggttaaggacgcggccgcagcaatggagatgcaacggaacgccgcctcttcttcaggcatgatgggaagaagcatgaacgaccgcagcgtgcacatgaacgaggctatcaggatgcaaatggaagtccagagaaggctacatgaacagctagaggtgcaaaggcatctccagatgaggatcgaagcccagggcaagtacatgcagtccatcctggagaaagcctaccagaccatcgccaccggcgacctggctgcgtgcagcccggtggctgcagggtacaaatccctgctaggtaacccgcaggcgatgctggacgtctgctcgctcaaggacatggccccgtccatgggcttcccttcgctgcaagacctgcacatgtacggcggcggcggcggccactgcctggacctgcagcagcagatggagcggccgatggaggccttcttcgccagctgcgacatcgggtcgctggccaagaagaggcccgtcagcccttacgccgacgacgacggcggcaagagcccgatgctgtggggcgaggacgacgagggcaagggcatcgtcgaccatttccagatggcgccgccgatgatggacgccgccggcatcgacgtcatggactccatcgccgacgtgtacggcgacgccaagcacatgaccatgtccagcgactccacggggagcaagggcggcggcttcgacgtcaggctcgagcggccatcgctgcggcggccgcacatgggcggcagcccgtcggtgctcggcggaggccagacgaggaacctgtcctacgggtaactagctcgtcgctctgatgatgattaaccatccgatccggcgtgcttaattaattaactcgcagtgaaactaaaattaattaaagcaggcgattattattaaccggtgcaaaacggctacaaataaataagtaaagctagcgctggagcaggcatgcataatataatggcggagatacatatatatatttatagcataagtgtcattaattcatgatcacgagattgatgatcttaccgtggcgcatcacttgctggatgatgctccaagataatctattttgagcgagaggagatgtatgttccatgtaattgtagtgctgttgatgggtgtaaatgcatgtgcaacttattaattggtaattttgcatgctgaggaaacaatctttctttggtctgaggcatcatatatatatatatatatatatatatttgcattgtatggagctagctagctgatgaggaacatgcatgctaataatggattaactgtctgataccttaagcttctttgtattattgtactgatgattagttctttttggtttatctg

SEQ ID NO: 23909 - DNA, 673 bp, Zea Mays
caatatccccttccactcccgattcgttctggcgcgtggtggtctcccgactcccccattggcccaatccctcatgccctgcctctacctccagtccatgtctcttccctcctagacctaggtgccagtggcggcgcctccgcactacggcctccagtctatgcctccacctccatgctccactgcacggatccggatccggcaacgacgacctccctgcggtcagcggtctgcgacctccattgattcgcaccacatcgttcgccccttcctagcagtataatgaagggttgaccatgtacaccttcgatcggaaataatactcgagcagtgcaagcatgaaaacgaagctgagaagcttcagttccgtgttttggacacgcaacgaaggatcagtaagaggaagcgataagatcttagaggcttggacaacatgtctaatgatggaaaaaacttttatacccttaaaatatcttgtagtttgtgtgcataggactgagtgcatgattgtaatttttacaacactataaatagagatacaatgtcatgcacaggggacactttgtataagatcttcaaggcttcatgattctgtgaattctgtgatgtatatgtgatgattatgtgatatatgttctgtttgtttggatggaataacaaaaacaaataaaat

SEQ ID NO: 23910 - DNA, 479 bp, Zea Mays
ggagtactcttgggggagataggcgttcgcttcatgcttatccaacagattggtgacacttttgttactgaggacactacaaatgtgatgtttcctcgggaagtaacagttccaggctatacacacccattggttgcagttggcacagattactcacttcgccttgatactgagcaatggaaagcaaagactggtattgagagctttgacagttcctctgttttcgactccatttttaaggcaccggttgtgaaatcattgagtataattcttgttagagccgttgatggcaagacctttgtgaatgctctaaatgatgtcattgcccgccaaataaaaaacccaaacgccgaggaagaatcttccctgtcaaccttgcagaatacctttcttgggcgcaatctcaaacagggaacaagcatatacttaacttggcttgaacccaaaagaatgctgaccttaaagctttagttgaggtt

SEQ ID NO: 23911 - DNA, 1529 bp, Zea Mays
gcagcacatacgagcccatgacgcaaacgagttggccgaaatagatgattctgctggtgccataggtgtgaagtacttagtggggactggggagtgggcggacaagattttcattatagccatataaaatggagtgttccaattcaactagttcccaagggcatcatgtaggaaagtggaatcaagtgcaaatcattgatccttccattgttgaaatgggaccaagtcaccttccactgagtttcatgagaagatgccgtggagtattgtgtttggtgattatgatattaacagcatttatgatgatggtatacctgtcccctgttactactttccttgtgaggttgttcagtgtgcattacagcagaaagtctacatgcttcctgtttgggatgtggttagccatgtggccttttttgtttgagaagattaacaagaccaggtttgttttctctggtgaaagtgtgccagcaaaagagcgtgttctgttatttgctaaccacaggaccgaggttgactggatgtacttatgggattttgcattgaggaaaggccgcttgcagtgcatcaagtatatccttaagaaaagtttgatgaagttacctgttttcaactgggcatttcacattattgagtttattccggtagagagaaagtgggagattgatgaagcaataatccgaagcaggctttctgaatttaagaacccaaaggatcccctttggctggcagttttcccagaaggcactgattatactgagaagaagtgtatcaaaagtcaagaatatgcagcagagcatggtttgcctgttctgaaaaacgtactccttcccaagacaaagggtttcaattgctgtttgcaagtgctgaggagtaccatagatgctgtgtacgacatcacgatcgcctacaaacaccggccgccgacatttctggacaacgtctacggcgtgggtccttcggaagtccacatccacatcagcagcatccaggtctccgacataccggcgtccgaagacggggtggctggctggctggtggagcggttcaggctcaaggacgagctgctgtccggcttctccgcgctgggccacttccccgacgaagggaccgccgagggggacctgtcgacggccgagtgcctcgcgaacttcgcggccgtggtcgccgtcacgggcctgctcgcgtacctgaccctgttctcgtccgtgtggttcaagctcttcgtggcgttcagctgctcgtctctcacgctcgctacgtgctactctgtacatctgccccagatggtaggttttggctcaggtacccctgcgagcatccacgcgaaggaggcttgagcgtagtagcgttgtgactgtaactgagagctgtatgtatgtcagcagagaatttggtactgctacctggacgcggcttttgtatcaccacgttgctgtgtgtagtatatgtgttggtcaatgtgtttttgctaccgccatcttttatctggttcaagtaattgggcgtattcgttgcctaaggttttg

SEQ ID NO: 23912 - DNA, 3296 bp, Zea Mays
cgcgcactttccccgctttcctccgccctgctctcacgtgttcatcgttggttctcactccccttctcgcccccttcaacactccgcgcttctgcgcgtcattgccagcggaggcgcgtcgctatcgcctgggaacaataagagtttgcgcgtctcgcgactgatcggtggcgactgccactcggcggcgacttggactcgacttccgggcaacagggcgaggagtcggccggccagtccactgggttcaaatcggcctcggcaccgcggcgcccccccgcgagttcttgctggattcgctcggagcacggcgcgggcttgtcggcacggcgccatgcagcagcagcagcaaggcttagacataggcaagctacaagaggtagtgaagacccgctggctaaagcctcaagaagttctcaagatactgcagaatcatgagctgttcacgatttcgcataagccccctcagaagccacagagtggttcttggtttcttttcaaccgtagagtactccggtacttccgaaatgatggatttgaatggcaaaagaagagaaatgggaagaccattaatgaagcccatgagcgccttaaggttgataatgtggatgcactgaattgctactatgctcgtggagacaaaaatccaacatttcagaggcggatatattggatgcttgatccggcttatgaacacattgtccttgtccactatagggatgttctagagggcagcatttcagtatctgcacgaaatgattcttcaacattgaatcagaatggcagtgctagcagagctgaagtacatagttcacctggttggacaagcgagttaattgcacattgtactaattcgtgcagtccgggatctgctgaagaagtcagttcccaaattagtgcaagtgaatctgatttgattcaacataaggcagccttgcggaagcttaaaatgcagctgagtctggaagacaaagaagattgtgatgttaatgccgaggatgttccagcagataatgagcctattattttacctgtgattcagaatgaggagccaggcacttctagaaatcatgatgatatctttgatgtgctggactttagtgaagatcatatcaacggaactggaacccatccatgtcacagtgctattgacgtgctaaaaaattcagacacatggttagaggatgatcaacttgaggcaattctgcatccagcgtgtatgacattgactgaaaatcaatggttcaggatacatgaggtttctccagaatcagcgttttcttatgaaagtacaaaggtatgtgtggaaattatccagcaaggtgtcatccgttgccatactccatgccttgatgctggaaaagtgagaatgtgcttgcttgatgggaatgggaagtcctgcagtgaagcacgagaatttgaattccttgaaaagcctaccaaatgcatgattgatggaaacacgaacccctgcaatgaagcacaagatgtcaaactgcatcagatacctaccaaaagtagtgaggagctgtcactgttactacattatgtgcatacactttttgatggtcatgctagtgggctattttcaaattttagcttgccactccaaaatcttggctgtggaatccaaagcaatcaaatggatgttatgaagaaggcgtataagcagctggaccctgagaatgtggtaagtagtgtcatggaagtattgcttaatgacaagtttaagcaatggttgtcatccaaatgtgaacagaatattgatggagaccatttgcttcctaagcaataccgcaatattatacatacggttgcagccttgggatatgatttggctttgaagccactgcttagttcaggagtgcctataaactaccgtgatgcaaatggatggactgctctacattgggctgcaaggtttggcagagaagatatggtggtggctcttcttactgctggtgctgcagctggtgcactttcacatccgacatcagaggatcctgctgccaaaacacctgcttcaatagctttagcatatggtttcaagggcctatccgcgttcctttcagaagcacaattaacaactcatcttgattctatcgagtcaaaagaaaatggaaaacttgattctagggaagaggggatatgtcgtgctgtggacagaatatcagacaaaagcagccacgtgcatggtggaactgatgatcagcttgcgcttaaggattccctgggagctgtccggaatgcagttcaggctgcagggcgcatacaagctgcattccgaattttttcctttaagaagaagaaagagatggctcttgggaacagaaatagctgctgcttgtccattagtgaggcaggagcagtttcacatgatatgctggagaaagctgtattatctatccagaagaacttcaggtgctggaaaaaacgtaaagaattcctgaagatgcgaaataatgttgtcaggatacaggcccgggtgcgagctcatcaagaaagaaacaagtacaaggaattgatttcaagtgtcggaatccttgagaaggtgatgatacggtggtaccataaaggtgttggtctgcgtggattcaattctggggcaatgacaatcgatgaagaggtggacgaagacgttgccaaggtcttccggaagctcagagtggaaacagccatcgatgaagctgtttcaagggtatcatgtatcattggtagccctaaagcaatgcatcagtaccgaaggatgctcaataggtaccaacaaacaaaggatgatcaggagaagtaatgcttgtgttaaaccaacagtgatggagcaaacagcaaagcacaagccacccactatttatttatctcccttactgaagcacaagccttggtgactgaatggacagtggatcccgagtaaaactgaaaatttcttgggtgaactagaaccagctccaattcatgctggacgctgtttgagtgtacacagcaacgtcatgtgcaatagctgacttctggctgaaagttggtaaaggcgatgacttagtggtatatgcagaagcttccaaaagcctgatgagcaaggtagatgagttaatacgttcgccgcagtcctctattggcagtgacattccaacagttgaacgccagctgtttcatgcctttggcatcagctttcaaatggagcagcgatcaaagaaagcctcgtagcattaaacttctctctcggtagtctcgtgatcagaattcagatggctcaagcaactgccaacagaataaacaatcaggcagggtgcgagccactg

SEQ ID NO: 23913 - DNA, 6418 bp, Zea Mays
cctgtctcctcccctcccctccctcctttctcacacgcgtacagtgaacttctcctcgtgttctccgaggcggagcaaaaccctcccttccccgcgctagggttttagcgcggccgcgacgggaggatcacggcggcccaaggagacggctagacggtcggtggacgccgccgagacgtggggcggcgccgtcgcgtattgaaatggaggaggatcactcggtgatactaatatctgaaggtgctattaaaagcatcaaacttagcctctctaccggagaagagatatgcacatactccataaacgagtgcccagtgacccatcctagccagcttggaaatccgttccttgggttgccacttgaagctgggaagtgtgaatcctgtggtgcctctgaaaatgacaaatgcgaaggccattttgggtacattgaactacctgtacccatataccatccatgtcatgtcactgaactgaggcaactattgagcttgatatgtctgaagtgccttcgaatcaagaaagggaaggtgaaacaaagtaatggaaaaggaaacgcggcaccaactttgtgctcttattgcagggatattccagccctgtctttgaaggaaatcaagacaacagatggtgcaattcgtttagagttgagagcacctcataataaacacatgacagaacgttcatggaactttcttgataaatatggatttcatcatggtggatgttctcaccataggacactgcttccagaagaggctctaaatatattgaagaaggttcctgatgatactaggagaaagctagctgcacggggatacattgttcagactgggtatgtgatgaagtaccttccagtacctccgaactgtctatatattccagagttcaccgatgggcagagcattatgtcatatgacatttcaatagctctgttgaagaaggttcttcagaaaatagaacagattaaaagatcaagatctggttccccaaactttgaatcacatgatgctgaatcatgtgatttgcagcttgcgattggccagtacatacgtctaaggggcactacaaggggccctcaagacaacaccaagcggtttactgttggcagtgctgattcagctgcattgtcaacaaaacagtggttagaaaagatgcggacactgtttatcagcaaagggtcaggtttttcatctcgcagcgttctgacaggagatccatatattgggctaggtgttgtagggcttccttctgaagttgcaaagagaatgacattcgaagagcaggtaactgacataaacattaacagattgcaagacgtggtagacaagggactctgtttgacctacagagatggtcaagctacatatgccatcactgttggatcaaaagggtacacaacacttaaagttggtcagactatcagtcggaggatagttgatggggatgttgtgtttcttaacaggccacccagcacacataagcattctctccaagctttctacgcatatgtgcatgatgaccatacagtcaaaatcaatcctctcatgtgtggccccttttctgctgactttgacggggattgcgtacacatatattatccacaatcgcttgctgcaaaagctgaagccttggagctttttagtgttgagaggcaactcattagttcgcacagtgggaaggttaatctccagctaggtaacgactccttggtagctatgaaggctatgtctcatacaaccatgttacacaaggaattagcaaaccagttggcaatgtttgtgccattttcacttcttgctcctgctgtaatcaagccagttccatcttggacaatatcacagatagtgcaaggtgcatttccagctaacctgacttgccaaggggacacacacttggttagggacagcacaatcataaggctggaccttggcaaagaatctgttcaggactcattccctgatttggtgtcctccatccttcgtgagaagggtccaaaagaagctctgcaatttctgaatgtgttggagccattgttgatggagtttttacttcttgacggtttgagtataagtctgcgggattttaatgttcccaaggctttattggaggaagcacaaaaggacattcgaaatcagtcccttattcttgagcagtctaggtgctctacaagtcaattcgtagaattccgagtcgaaaacaatttgaaaaatgtcaaacagcagatttcagattctgttgggaaattctctgaccttggtctgctgattgatccgaaaaaggaagcctcaatgtcaaaagtagttcaacaagttggttttgttggcttgcaactgtatcgtgaaggcaagttgtattcaagacgcttggtagaggactgcttcacaaactttgttaataaacacttggccattggagatgagtatcctccagaagcgtatggtcttgtccaaagttcatattttcatggtctcaatccttatgaagagttgatacatgctatatccactagagaagctatgatccgctcctctagaggtctgtcagaacctggaactttgttcaagaatttaatggccatcttgagggatgtagttatatgttatgatggaactgtgagaaacatttgtagcaattctatcattcaacttaagtatggggaagatgatgaaactgattcttcaagtgttgtacctcctggtgaacctgtgggtgtcttagccgccacagctatctcgaaccctgcatacaaggctgtcttggattcctcccaaagtaacaatgcttcatgggagtcaatgaaggaaattcttcagacaagaacttcctataaaaatgatgtgaaagatcggaaagtggtcctattcctgaatgattgctcttgcgcaaaaaaattctgcaaggaaagggctgcacttgcagtacaaagttgtcttaagagagtcacacttggggattgtgctactgatatctgcattgagcatcagaagcaaataaatttagatggaacatctgaagctgccccaactcttgtaggacatattcaccttgacaagtgattgttcattcactcagatgccaatcgatggaaagctacataaggttccatgtgtgcagtttgctttttctgatgacattgtactatccgagtctattgagagagcagtgaatgtgatagctgactctgtctgctcagtgcttttagatacaattattaaaggtgatcctcgaattcaagcggcaaaagttatctgggttgaatcagatgcagcatcttgggtaaaacacacacggaaggtatcaaagggcgagtcagcattagaaatcattgttgaaaaagatgatgctgtaagcaatggtgatgcctggagaacagcaattgatgcctgcttacctgtacttaacctcattgacacacggaggtctattccatatggcattcaacaagtgagggaacttattggcatctcatgtgccttcgatcaagtggtgcagcggctttcaacgactgtaaaaatggttaataaaggagttcttaaagaccatttgatacttgtggcaaacagcatgacatgcactggaaatttgattgggttcaacattgctggctacaaggcaactttccgttcattaaaagttcaagtgcctttcaccgagtccactttgtttacccctatgaaatgctttgagaaggctgcagaaaaatgtgattctgattcattgggatgtgtggtctcatcgtccgcatggggcaagcatgcagcagttggtactgggtcatcttttcaaattctctggaatgaaaatcagctgaaaagcaacaaggagtatggggatgggttgtacgatttcttagcattggtcaggactgaccaagaaaagacagactacatgttcttggacgatgttgactatcttgtagaggagaatgcagcagatgacatgtgcttatctcctgagccagatgggacccttggtaagcctacctttgaggataattttgaagagcaaaatattcagaaaggcagctcatgggaaattggcataacaacgaactcaagttgggaacagaatgctagtgttgcgaatgattctggtgactggggaggctggagtagtggaggtggagctgctgcaaagccagcagatcaagataattcatgggaagtgcatgctaaggtgcaggacaattccaccactgattggggaggctggagcgttgagaagccaacaggtgaggcaactgtatctggagaaccagctgaaacagatacttgggctgataagggtgctaaaatggaatcagatgcaggtgatggtaattgggaaaagtccagcactcctgaggcatcaaagaaaaatgactcatcagaaaatacatgggacaaaagaaaaggagatggaggtgatggtgcgtgggggaacaggtctgatgatggccatggcaattgggagcatcccagcaattggaatgggcagagtttggatgtagatcaggacacatggggaaacgccaggggaaaaaagaaggcagatggtaactactgtcaatgggaggagcagccaagcaattacaaacagaagaagacaaatgctgatcatgattcctcctataacaatgtgatgccgtcatcagaaattgcttggaatgctggagatggaactggaagaccaaatgccaagtctaatgcagaatccagttggggtgaggaagataagatggagtctgacgatcatccgaaagtcccaaaagaatcagacacatggaatacagggagatcaaatgaaagtccatgggataacactgatgcactgcaggattcctgggttaagagcgcagctcgcaataacaacactcaggatggttcatgggataaagtagtatctatgaaggatcttgattcactccaagattcatggagtaaggcgacaatccagacgaatgatgcacagaatgattcttgggacaatgtggcaaaaaatgccccggattctgccgcagaagactcctggggggctgcaacaccagcggagacaactgattctggtaacaaggagtggaaatcagatggatggggggcaaagtctggtaactggagcagccaaagaaataatcctgggagacccccaaggagaccagatgagaggggtccacctccaccaagacaacggttcgaactaacagttgcggagaagaacattcttctagaagttgaacctattaaattacgtgtgagaagcatcttccgtgaagcatgtgacggtgttagacttaatccagaagacgagaagtttatcctggagaaagttcttgagcaccacccggaaaagcaatccaaggtgtctggtgaaatcgactacctaacggtcaacaagcaccagactttccaggacactcggtgctttttcgtggtctccacagatggatcccaggcagatttctcctacctgaagtgcctggagaactttgtgaggaagagctacacggaggacgccgacacattctgcatgaagtacttaaggccccgtcgcaggcaggcaccaccagctgatgttgggacagcatcaggcgccccggatgaggttccaccgtcaaccgcagctgagacagagcaaggcactcctccagcccctcaggcagaggttccacaagagacttggggttctcccgcagtgcctctggaaggaggaactcacatcgccggaccagactcaacaggcgacgctgtgatcctaggggagcagcacgatctgactccggcttctccagctgtggcaccacaagtggcttctgagccagacacaaccgacggcacggggcttctaggaaaggctccgcaagctgactggggacccagattcgacgctgactgatatttaggctgtgtgaagctgccgcatgtaaaagccagacctgtgctctgagcaagggagcattcccttgctaagtcgtcagttaactccccttgacttcatctggagaggtggacaggtagtagcggcaaacattctagcccttagcggccgcttgctcgtcctcgtccgtttcgtctcgccctgatgggaaccatgtaaatccttgggaacaaagctaccccctgctgcctttaccgtatctagttggaccttccccactgttggaatctgtgagtccgtctgctgttaaatttttgatggtttctgggctgtggcttgccagcggtgatgccaaactctggaaacctagggatttgtttggtgcggtcgtttggttgtcaggtcgatcagcaaatgtatgcctttgtcctccagatatgtgcttgttgagctagtagatagtgttacattgcgtgcctttgttcaatggaagcccagtttgagatggagcacgtgttcgaaaatactcggtatcacttatgagcgtaaatgcgaaataaac

SEQ ID NO: 23914 - DNA, 1394 bp, Zea Mays
acttacatggtaaagtcggaacataaagctacaatggtcgacagacaaaagttacaatgctatctatagtcagttgtcatgccagatctgtgcctcttcccacatggttccatacccacaaatccaaaatcctcaaggatggatggcgatcctccggccaccgccgccaaagctctgtggctccccaggtggccctcctctgacatctcccaggatcaagctcagggacggaaggtaccttgcgtacaaagaggatggagtacagagagacaaggccaggtacaagatcatcacagtgcacgcatttgatagcaccaaggacttcccctcgcctgtttctaaggagctcgtggaaggactgggaatttacctccttgcttatgacagagctggatatggggaaagtgaccccaatcccaaccggcatgtcaagagcgaggcgctagatatcgaggagcttgccgaccagctgggccttggccacaagttctatgtgctaggggcctcaatgggaggatactcggtttggggatgcctccagtatatacctcacaggcttgcaggagctgcgctggttgtgccaattatcaactactggtggccttcgttcccagctgaattatccaagcaggccttcaacagactgattgtgccagagcagagaactctttggattgcacacaacataccttccttgctttacctgtggatgacccagaggtggttcccttcttctgcagcagccatgcaccaccctgaaatatttagcaagcatgacatggaggttcttcagaagatgatggcaatgccaagaaccattgagaacaaatcaaggcagcaaggcatttatgaatcgatccaccgtgatttacttgtcgcttttggaacttgggagttcgatccaatgaatgtcaccaatccatttcctcaaaatgagggctctgtgcacatctggcaaggacgcgaagataggttggtgcttgttgagctgcagaggtacattgccaagaagcttccgtggatcaagtatcatgaagtcccagaaggtggacacatgttcgtgatggtagatggatggacagaccgaattctcaaggcactcttgttaggagaagagcccctagatgtgtgacagtagttccattttcaaaatgtcaaaaactgcagctgccagctgttattttacttaattttattcccaatttgtacacttgtattcctacaacaccaagactagtctaattcataatccgatagactttccatcatgtcaactcattacaacagcagtgataccattgtactcatcccatacgcatatgcctttggtccaaaattgatgtcaacccagaaagcacgtagtcaaaacattcaaattggagagaggggtgttt

SEQ ID NO: 23915 - DNA, 1418 bp, Zea Mays
caccattcaatttattgtggaaaagcgaatgtttggtgtgaggaagttatgggatgttaaagacaatcaagcttgggtgcatgacagatttgaggagatgaacttgcatgatgatttctatgaagaccagcggatgtcaagaggtcgtggtggtcgaggtaaagcaagaggtggtggccgtggtttttccagaggtggaaagcagcgtaattaccatgaagatagcaacaacacccaaaatcgcaccccaaaggtagtgagagggcgaggacctcgacgttatgaagctgctgcaaggaacaacagagaggttgttggatcccaacgaaaacaagcagctagatttcgagaatctgctccaaatgctgtagcagccagagattccgggcaagtttcacatgcacagccagaggctgcccctcccaaaaggaatgtcatgagttcaagcctaaattctgcgtccccacctttttatccctccagtgcatctactcaagattttccggtagcagctcaaacgagggacatacaagcaggaggttctaataagatccctccatcttccatgaagatggatgataactcaaagctacaatctggttcaatggttagagggagaatagccatggattatggtgggcgtgataagttacttgctgatggtcctattaggtcatcccaaggaagggcaccaacggcgtcactgaattcaggattcacatcatcatctgttaatcctggccaatcccctattgcgagggcttcagggggcaattcaaacatcggaatatcttcaaataatcagccacaaagtcatggatcagtgatgcaccaaaagttagggcaagtgcagaatcagtctgcaacaagaatcccaactcagcaattgagtcatcggactagtaatttgtcaccagtggctcagcatctacctggtaaatcaggagaaagtggcgagaatggttcataccctactctgaatgattcaaagacagcttctgcggtggtaaaagtcaatagccaggaaactgggatgagttcatttatgtatggtggcacccaggttattggggctgcgggcctttcccagggcgatcaaaattttcctggcactccagctctgctgccagtgatgcaatttgggagtcagcatcctggtggtcttggagttcctactgttggtatggccctccctggctatgtagctcaacagcagatgggaatgggaaacaacgaaatgacatggttgccattattggctggtgcagcaggtgcttttggaggatcatatccaccctatatagcccttgatccgagcttttactctagatcttcaggacagacatcatcatcagttccatccaggtctatttctggaccatgtcaatcattatggtgcaccacttaacaagtttagg

SEQ ID NO: 23916 - DNA, 190 bp, Zea Mays
gaacttgtgagtctgagagtctaagtgagcttgagcctaagttgggtctccttttgtaacgtcgtgtgccctcccttttatagctcaaggggggcacgtacaagggtgctgagccccgacatatgggcccaggggcaaaacggagggaatacatatagaagtatccaatgccagtgtcgcccagaagatc

SEQ ID NO: 23917 - DNA, 522 bp, Zea Mays
ctgggcagacttcatggacaggaagccgttctggctggcgcactggacagagggcgacgcgcagaaggctcaggtggaagaggccaagcagaagctggcgctcatggaggcgcagctcgacgggaggaggttcttcgggggcgacaccgtcggctacgtcgacatcgcagcctgcgtgctagctccttggctcagcgtcgtagaggaggtgactggagtggccgtggttgacgaaggtgagttccctgctctgcgccgttggtccagagagtacagctcctgcgaagctctcaagcagtgcgtcccggacagggaccagctcgtcgccttctatactgaaaggaaggaggcgtacaaagtgttcgctaatgcatggttgcagcagtagtttggttttgtgtgtggaataataatgtatggatcacagattgtctgtgctgaaataacagtaatgagcctagctagataagtaaataaccatatgcatgtctcagaaaagtttagatgagttgaccatcgaaa

SEQ ID NO: 23918 - DNA, 751 bp, Zea Mays
cacacacacacaccaccaccaccaccagtttggaactttgcatgcatccatgcatgagcgagtagcacggatctacctccaacgtacagcagggactgctatctcgtagccgtagagcagttcaggaccgctggaccccgcgccaccgcacgccctgaccaaccaggcggccgcgtccacctcgcagcagcaagcaagcgcgaccaaatggcgcctctaggagacggcggagctgctgccgcggcggcgtccaacaacctggtggtgtcgttcggcgagatgctgatcgacttcgtccccaacgtcgcctgcgccatcgccaagctcggcggatcctccgccttcgtaggcaaggtacgtcccgtttccatctccgtctccgtctccgtctccgtctcgtagatccgcttgatctgctcgtttgggcggcgtgctctcgaccgggatgcgggatctggccatccgatctccgccggcgtcgcctcggctgggatccgcgtgccactgccagcacgggccgcggccgttgacctctgccttcctaaagttccgtccgttcatatttgaccccgatgcttcggcgacgttgttctctcttttttttcctgggcggcaaaaacattgttgtgctgcagctagatgtgtctttgtcgttggacagatgccattgtatagatcttgacgtattctatgcgtcccgaaaaaaagttatatcccggaatttatttattttttcttcaaaagaaaatac

SEQ ID NO: 23919 - DNA, 2206 bp, Zea Mays
cttcagccttcagccgcttctgctctgcattagataaggtgttccggccattgctgaacattccggtggagttcactgcagaggagctggaggacgcgatcataacacccaatggaacgttggatgacgttcatatgcctttattaaagtcaattcctccagtaactcgaatggccatgggacgtggaacatggatagcggtgttatgtaaaaaattgaagcactggtggcattgggttgcagaaggcgatataccgattgtagcctcacatggagcggaaactgagctttacaaggcacttgagccaggaattcgattagtgatcctgaaagccatatgtgatatacgcagtgagcaagaggacgttcggaacttcattgatagttctttgaagcatggttatcatctttccatcttccgtaaagaaaggattggaggagattcacatggaatctcatactggtatgaagatgacccaatccttgggcatcggttgtatcgtgaaattagacgagtggagcatgcgaaggactcaacaaaaaaatctaaaggaaagggagtttctactgttccggttatctcctataactgggaggctgtagcatccaactttgatgagtttaaagtagctgcagagaaactcttttcaagcaggaacaggacagaagtctctcttggcaagaagctgaagttcacttatcttccagagattgaaaagattcacaagaagaaggagaagttgctaaaaaagcaacaaagagaagccatcctccttgacagctgcttgacagtgaatggattgacatctggccgctctcgacgtgaaagaaaacatgtgacttatacttttgatgattatgagcgttcaataaatgaagccataaaaacaataaggaaaaatgagaatgctgttgaggttggcccctccccattatgcaaaggattttatggagaaactccagagaagttgtattacaaagcaaaaacagatgaaggaaaggctgaaactctccatcgcaggcagagaaaaagatcccaaaggtacacaaaggactatgttgaggccatatcagatattgacctagattttgacagcgatgatgatatcatgggtgaagcagtctatgatgaggaatatcttagaagaaggaaacgatacaaggcaagcctttctgaaaatgatgatgagtttcagttggatcaagtcgccaatgatggtgatgatgaagtgggtacttctttgaatgttaatgaagacacaaaagatctccaatggtacaaaagatttccacttctcacccctcaagggaccaagttgaaatctattgatgaaatccaaactggcatccgacgcagtaagcgctccacccgttcccgtattaactatcgacagcttgatacttttggcgcaaatacaaaatatggaaagtcagagaaatgcaatgcatcagatccggatgctagttctgatgcactaaatgatacggagctctcaacaagtcaagatcgagaggaagaagacggagtaaacaaagcacaacagcagtacacagagaaaccaatcgttcctgtcaaggagagtagaagtgtccggagaaaattcctcgtcctaaatgagcttgtgcctatagctggttttgatgatgcttcagtcttagtgaaagataagcacgtgaataacaacggaggaaaatgttctgcagcacattagggcgttggggaagctctttttttttggtcacatgggtagcaaatactgggtagaactgctcgcttaagcatggaccaacgagaatccaatgagatggtgatgcaacattggtcttgtttgggcagactgctgcttactacttccagtgtcatgccagcgaggagatgagatggtccatgggtgctgtgtggctgaattcccagcccataaagccaagtccctctctgatacttggaggtcttgctgagatgtgcactaggcacaccgcgtcgattggcgctgtacaattgtcacagctgtacgtgtatctcctccatgtatatacagtgattgggagcaatagcgtcttctggtttcaggatgcctatgggtagttgtctcttcttccttttcccctcttctgagcatctgaagttcggcaataaactcgattcaactgtggcatttacttatttctgtatgcggtaattaatatcgctcgatcttacactact

SEQ ID NO: 23920 - DNA, 2396 bp, Zea Mays
ccaagatgaagtccgttgtcgtagcgtcctcggatccacgtccaccgcgtcgcagaccaaggccgaccgggccaagctcgacgtacgagtgcatcctctgcgcctgctgctccacctcctgcccgtcctactggtggaacccggaggagtacctcggcctggccgcgctgctccacgccaacaggtgaacagggcttcagcagggacgctggtttagcaatggaggcgatccattccttatctgcttcaaaatcaagttatccaatggttgatctcacccaactcttcatgacagctacccaggaaaggaaaagattagaatcgcaaggccagattctcagggtgatatgcacttccatgggcacccgacgacattaaattcacaagaataagaaaccccctccaccttaagggttcaagtaggagccaacgaagaagcaagccccatcgtcatcatggaaggaggaggccatcccacccacgctgacgaggagccaccgaaggagaaggccccaccacccaaggagaaagccgcccaaggaaaccttttcatttcaggtgtttagtgatgctacttgccctgaaacctttcgattctcgttgtcctctgtggaaaaaatgggttgtttgcgtctgatattttacctaggttgtttagatctactagagcttaatttagtcagactagagacagttcgccatatgttgatgatcaccgtgacactgtcgaagaagcctctggatacatcatctccagggtaagtcaaaaacctatcctatcgctacaaacacagaagaatttcagagttgatcacctttcttttcctaattcgtaaattgttgttcattgttttcagctttcctgcttatccctactactctataagcacggtgtgtaggcgtccacaccgtgcaccatgttcttagttttggtagaattctttgtcttaaagctgactggaaatctcagcttaggggccctgatgctcggggaatcaaggaaatatggcacaactattgtccctggtctgtatgcaccagttcatctacatttctttgttgctcgtatggacatggctgttgattgcaaattgaatgaggttcataaccaggtgggggttgccatctatttgcaccttttttaattgatcagattgcccactaaaatttgtttgcaatctaaatgggaccacaacgaaacgaattctaactgggtttattaggtggttcgagtagcactcaagttttgagtttgattgcctataggagcgaatttcaggttgatccctttcttataccccattgtgtgggagcttccagcaaagggtatgatctttacatcaaatcaaataaaataaatcaaaatgatgttatacctgctaatgttacataaactacttagatgaaatctacttcaggctaccaaaaaagtgtttattcaaccatgcaattttaatagaagtataaacttctgaggccttaagtctgtaaaagtaaaatcattgtgcctttatccagtggactatctctgtaaatccattatattaaagtcactatgattgattgtttgatcatttctcgtgcaggtggttgaggttaatgttaaggtggaaagtgcaggcacacataacatgcacaataatgatttctatgctaaagagaagttgctcaaatcaatgcgtgattgtgatccttcgtctttgcgccattggattttccaggccccattgcagcactacactgcgctaatggaccttcaggactattctgagaatggaactgtaaccgtggtatatcgagtgatacttaaaggaactgatggagagagatgccacgggcacaacacagttccatgaggggcgcagggaagatgctgttgcagccgcagaggaagctgcattcagcaaagcttgcgcatggttcggttttggcctgtatctgtaccaccaggatgaatctcattacgacgaccacttccattgaggctcaatctgcaaaagagttgatcataagttgtaacatgcgttggatatgcccctagaaaacttcgtatctagaatcaatttttggtctttgcgtagtatcatactcataacacaaagaagtgaacctatgtagatgctatttgaaacctttttattaatattataattcttattaatattattgtataattactttttgagtggagagaaggaaggccttttgcagctaccaagtgacaaaggccttttgcaactaccaaatgacaaagccctcctctcttatccatcattctgcccacttgttgacaaatatgtagcggtatatatatctttgatccttgtcatttgttcggggtcgatttatgttaacctgggtggctgtaataaatatttgtcggccttgtgttttgt

SEQ ID NO: 23921 - DNA, 540 bp, Zea Mays
tggaggatgctgcgatgtgttcgtgagaggtctaggtcgtcgtctcccagtcaactttgggtttatggacctttgtctccttataaagtaattatttattttgtacagaactccaattatatagttaagatgtgacattcgatcctgtgccatgattcatcatatgtgtgagacttggtcccagcacacctggtgattatgttcgcgcccgggtcttggtgccccgaaacccgggtgtgacatatagctcccgagagtccacttgcagggctctctgcgtaggctatccgtgcacactagacagtccggtggcctcacaccggacagtctggtgcgccactagagcgctggctgactccccacttcttggatttcttcactatttccttgggcttcttttggtcttgagtcttagacgtgtgtttgacatttattgatcttctaggcatcttttaggtcttatttgaggcgttgcatcctcaaagcctcaatccaatcctttttgcatcatgtgaactacaaatacaaacactatcaaac

SEQ ID NO: 23922 - DNA, 1824 bp, Zea Mays
tccatgactgttctggaagctccaagcgttggcgaaaaaagtaagatatttctgcgaggcaaggaatccctcccccgcttctactctttcggttcgccggttcgccgtctcgcacacccacttcctacaccgccaccgagcactcgctcagtttcatacccatcctcgaagtcgcctctgtctagttcctgctcttccaccaccgcctgtgatgtatccccgaggcccggatgggggacgagatgcctcgtctcgccctatgcttgccactcccgccggcaacgacacgcgcgaggaggatgagatcaccaccgcggaggctcatgtggagaaagacgccgcgcggatggacgctgccctcctcatgcggactacgcccaagatggacgagtttcacaccgggggcgatctggactcaagtggaagtggaagcggcatctcggggccaagcgcctccaaaagacagctacaaagaaggggatcgtggcggcaacgagtcagcagcaacagagaagaatgtggtcgtggctgtaatgggtcagcaggtacaccatccacgctcatcatttcctttgtgtttctgtttgatctatttttttaaaatttctttatcagtttgattagcatccacttgcatccgctcatagtttgattcgtgttcgttggatgggcctcaaaattaccagttgcttcgactacactctctgaatttcgcagatcaagataaaacccgacacaaaggaatgaatagcacacaaaaaatcacagtattatttagtcatattggacacgaataagttaaatttcttaaattttagatccacatttttgtattttggtctagactatcaaaaaaatcctagaaatgtccctctgcctctcgcgcgtgaattctcctctgccgaagggaagacactcaaaggcgagctactgatcttcaactgcttttctggattctctttgcaatatgctttgttggggctagatctgaaatcaatgtttttaataatctagcacaaataggaaatgttgcatgtgttgccgacagaaccatctcactctctctttagtttctgcaattttttggacgaccgagaggtgctgccgtttatgagtaactttccagtgggaaaacagtatgccacaacatcatggtcagagtttggacattgcatgaagcacttgctggacaattgagaagaactcatgcctacttgcaggagggttgttgtacacgtgagtggaggtcgaacccttcttgtagggctcttaatgtatgaagtacgccatgctagctattgaatcaagttcaatgggattcgttaaaatataaggagggttgttgtacaagtgagacaaggtcagcccttcttgcagggctcttaatataagctcagcctgtactacacgttcatccacgtcgagctcgtcggctcccaacgcaaccccttcttctctcacgagatcagtggtgaggacgacactggggatagagacctagggttctccaagtgggcctagaaactccatggcaacgtctcaggtttcatgcagttctctaaatttattttgctcgattgtaagggaactgtgtcctctataagctcgcgctcgtgctgtaccgggagtaccccttcttcctgcaagtctggttcaattaaaaaattttgttctgtcgtgttgtaaagtacttggcgagctatgatatgtcattaccttagtgagaagactgcttctaatatattagtaatttttagctgtgcagatcatgtcatcatataaatgttgcaaacattataaaatagaggatccatttgaactctt

SEQ ID NO: 23923 - DNA, 1074 bp, Zea Mays
ataaattatcataataataattatctatattaactgactatacaagagtgtcgtataaaattatcataaaaactaaacaccttgtatacaggaaaaacgataaacaaaagagtaaaaaaccaaaaaacaaaaacaaagtaccatcgcccttccggttttctccccagcccccgccccggtcgcggagccgtcgttctcgtctttcggtactcgcgcgcgccagctcacttctctacttcccttccccagatctacctccattcttccctcaaaatcacagatctctctcggccccgtgcccagcgctccgaaaccctagcgccgccgcgggtgccaggccgcgagcgtcgccatgggcatcgtgtttacgcggctcttctcgtcggtcttcggtaaccgcgaggctcgcatcctcgtcctcggcctggacaatgctggcaagaccaccatactctatagactgcaaatgggagaggtcgtctccacgatcccgacaattggattcaacgttgagacggtgcagtacaacaacatcaagttccaagtatgggatcttggtggtcaaacaagcatcaggccatactggcggtgctactttccaaacacccaggctatcatatatgttgttgattcaagcgatacagataggcttgtaacagcaaaagaagaattccatgccatccttgaggaggatgaacttaaaggtgcagttgtccttgtgtatgcaaataagcaggatcttccaggtgcactcgatgatgctgccattacagagtcattagaactacacaaaattaagagccgccaatgggcgattttcaaaacatctgcaataaagggagaggggctcttcgaaggtttggactggctcagtaacacgctcaaatctggaagcagctaaggagcctccgcctcgtcatgaatcatttgctggatggaaaaagatttgccggtaggcccgggcgtccactccaggctggccttagcacgaaccagctcacagctccgcctgacaaaacggcctgcgaattgacgtcagcaaggatgtcacctgaaagcaaaggtttgcgctgt

SEQ ID NO: 23924 - DNA, 2397 bp, Zea Mays
tttggcttctgggagagacccacgacgctccattcccccacgaaatgagactccgcgcgcaaaagccccgtttctcgccgcgcgcgagaaaaccctaccttttcccgccacccgcgcgcatttagtcgagcacatagtccgcaccccacatcaccaccgccaccatcagaacctctacgcaccgggtatcgaacgcatctacgatggagggcgacgacttcacgccggagggcggcaagctccccgagttcaagctagatgcgagacaagcgcagggtttcatctccttcttcaagaagctgccgcaggatccccgggccgttcgtctcttcgatcgcaggtcctgtagcagaatcccatacatcaagggcattcttcagcaatataatggccaattttcaacattgataaggtcaaagtttcttgaaccgttagaagaatggatggcaaagaatcgatttggtcggttttcttctcttgttgagacagctattgatcttgctcagctggagaatggagagtacagaatatctcctctatattcttctgacttgggtgtactaaaggatgagctttctgtggttgaaaaccacataaacaatctgcacgtggatacagctagtgatctggatctttctgttgataagcaactgaagctagaaaaaggatcccttggacatgtgttcagaatgtcaaagaaagaggaacagaaagtcaggaagaaactcactggcagctacttaatcatagaaactcgtaaagatggtgtaaagttcacaaattctaagctgaaaaatctaagtgatcaataccaggcattgtttggtgagtacacaagttgtcagaaaaaggtggttggtgatgtagtgagggtttcaggcacattctcagaggtatttgaaaattttgctgcagttctgtcggagttggatgttttacaaagttttgctgatttggcaactagttgcccagttccttatgttaggccagacatcactgcgtcggatgaaggagatattgttctactgggtagcagacatccttgtctagaggcacaagatggtgttaactttatacccaatgattgcactctggtgagagggaaaagttggtttcagatcatcactggaccaaacatgggaggaaaatccacatttataagacaggttggtgtaaatgtattgatggcacaagttggttcctttgtaccttgtgatcaagcaagcattagtgtgagggattgtatttttgctcgtgttggcgctggtgattgccaacttcatggtgtatcaacttttatgcaagaaatgcttgaaacagcatccatcctaaaaggcgcctctgataagtctcttataattattgatgagctggggcgtggaacttccacatatgatggatttggtcttgcatgggctatctgtgagcatcttatggaagtgactcgagcgcctaccttgtttgcaacccatttccatgaactaactgcattagcacatagaaatgatgatgagcaccaacacatttcagacatcggagttgcaaattatcacgtgggtgctcacatagacccattaagtaggaagttaactatgctttacaaggttgaacctggtgcatgcgaccaaagttttggtattcatgttgcagaatttgctaattttccagaagctgttgttgcccttgcgaaaagcaaagcagcagagttagaagacttttctactacacctaccttttccgatgatttgaaagacgaggttggatcaaagcgcaagagggtatttagcccagatgacatcaccagaggagctgcacgggctcggcttttccttgaggaattcgccgcattgcctatggatgagatggatgggagcaagatcttggagatggccaccaagatgaaagctgacttgcagaaagatgcagctgacaatccttggctccagcagttcttctgaagctaattaatccccgcgtgtatggaggcaagaccatgagagaacctcgctgatgctaggatctcctgatccattttgttaatacgcatcagcagatgtactctagtctttaggcttagccgacagtgcaacagggaaaaccatgtgcatatttaacgcggcggtagtgctgctactcctgcataccgttcgggtgcagctactctgctctgccgttctgccccgtctgtgattgcacgccgtcctttacagccgtgaagtctgctgtgccagtctcgtcgaagcttgaagtttctgcacgtctattggctattgctgtgctgcttgtctagcaaaattctttcagtgcaagtagggattgatagtttgtagagattgttgggattttgtcgaggatggcctcacaacgacctttaatcagcttttcaacccagccata

SEQ ID NO: 23925 - DNA, 1465 bp, Zea Mays
agagccgagtgccccgacgatcgaccgaccgacggttgagctcctcgcgctgctgtgcctcgcgggcaccctgggcgcgcaggccaccgccggcccccgccccgatgcgagggtcggcgtgtacgagctcaagctgggggatttctccgtcaaggtcaccaactggggcgcccgattaatgtccgtcgtccttcccgactgcaaagggaacttggctgatatcgtcctgggcagagataccgtcgctgaatactttaacgacacttcttactttggaccgataaccggccgcgtggctcagcggatatcgaggggccggttcgtcctcgacgggaaagtctaccacctgcaacgaaacgacggcaggaacacgattcacggtggtggcacagcgttcagcaaaagcgtctggacggtgaaggagtatgtcggcggcggcgactccccatacgtcaccctgtactaccacagcttcgacggagagcaaggtttccccgggaacctcgacgcgtacgtgacgtaccgggtgtcgggcccgtacacgctgggcgtgcacatgagcgcgacggcgctggacagggcgacgccggtgaacctgctgctgcacgcgtactggaacctgggcgggcagggcagcggggacgtcctgggccacgagctccggctgcacgcgtcgcggtacgccgtgctggacgaggagctcctgccttcgtcggggcgcgtcgcgcccgtcgccggcacgccgctggacttccggacgcccacgcccatcggcgcgcgcatccgccaggtcacgggcgggaaggtcgtcgggtacgacgccaactacgtcgtcgacggggaagggatgcggcccgtggcgcaggtccgggacggcgcgtccggcagggcggtggagctgtgggcgaaccaggccaccgtgcagctctacaccgggaactggctcaaccacacccaggggaagggcggcggggtgtacgaccagtacgccgggttcacgctggagaccatggggtacgtggacgcagtgaaccaccccgagttcccgtctcagaccctgttgcccggacaggagtacaagcacgacatggtcttcaagttctcgttctagcaggtgcatggtttggtttgatgtacaacgttcgttattggtgtttgagacgtacctaggcgaatactgagggtttgatcagctgccctgcaacaacagagtcagtggatttttttaaaacacacaaactatgcattaatcaatgacgcaacagatcactgtccaaaatatttttcgtttcctgaaaattttcaccaagagaaacaaccaaaggaatcaaaaagaaaagaaaaaaagggtaaaggtacaaacgttagccctcctgtcctgcgacacctcaggtacaaacatgtatgtaccacctccctagcgtgtgctgtatataccatgccatgcatgcggtctttagaactt

SEQ ID NO: 23926 - DNA, 767 bp, Zea Mays
gtgccttttgtttttggatatatattgtatgactcgtggtccccagcaatgactgtcagttctatctgtatcagcatattatctatgctgtccagctcaccagcaaaggttacatatttcctctacatatccttgttcaatcggtgggtcttgctttctgactgcaatacatacatgtaccgattgcagcaacgcccagccgataacgatcgctatgtcaggaactgtcgcaatgggaggtcaccaaaggagaccacgtggtggttccatgacgacactgtgtgatgggtggttccggctgttgtcctgcccgcattttagttgccagactacatgggagatgatctaggcatatttcaagcgacccatttgaccagaaactaacacgctcttctggtttgtaaatgagtgtgcatcagcgtcaggtctctgtacttgttgatccttacaccgtctatagtatgtagaataatgtttgtatctttgtcaatttacggaacagacatgaaatgcaggtcactgttgacttgcaagatttctgaatccttctagttgaaagttgaaacgagggttatatatgcttggtagtctgctccagatgcagcagctttagctctagttccacttaactctagctcaaactatggcagagctcttttgggagtggctgtgtgatcgtgtaataatatatctgttgtgtgagtattgcaaaattctgtaattgttctattctgctgctctgatgaatctcagtgatctacactacc

SEQ ID NO: 23927 - DNA, 1258 bp, Zea Mays
agtgcctgatttagtagagcgcactagcgaaaacccctctcgtatgtcgcatcgcgtctaaacccttctctccttcagtccttctcatccccacctccctcgcggatcactcgccgcctccgccgccgccgccggccgcagccgccgccgtgattctgtccctccaacttccttaaatcctagagccagcagcaggcaaccagcgccgacgaggaggaggagcgcggagtagaggggctccggcgaccgcgtcggagatggcggcaagccacggcgcggggacgctcaagtccacctccatcaacggggtcaagctctactcgctcaacggcggccgctatgtcgccccctgggtcgtcgcgaagaagaagcgcgccctccgcaaggacaaagagtatcagcggaggctggatttgatccacgacctgaggttcgagaccgccaccaccaagatcaagctgacgcccgatgaccagtacctgatcgcctcaggtatttaccccccgcaagttaaagtctacgagttgaaggaattgtcgatgaagttcgagcggcacatgatctcagaaattgtagatttccagatccttggtgatgactattccaaactcgcgtttttgtgtgctgatcgttctgtaaatttgcacgctaagtatggaagccattatagcttgagaattccaagagtgggaagggacatggcctacgattgctggtcctgcgacttgctatgtgctgcttcatcaccagatctgtacaggataaacctagagcagggacgattccttgcttctctttcctccgaatcaccagcaataaatgcggttacacgaagtaagatccatgggcttgttgcttgcggtggtgaggatggtgcggttgagtgttttgatatgaggaaaaaaacttctgttggcagaattaatattccagctgttagttctgaagattattctcaggaggtcacgtctttgcaatttgatgaagatcaaggatactttatggcagtggggaccagtacaggaaagatatcaatatatgatttacgcatgtcttctcctctgagagttaaggatcacatgtatggtagcccaatattaaatatcaaatggcaccagacacttaattgtactgaacctaaactgatcactgctgataagcacatagtgagaatctgggatcctaatacattcaaggacatgggagctcttatgcatttacagtgcgtttggtttgtggaatcaccccatgcttcctg

SEQ ID NO: 23928 - DNA, 685 bp, Zea Mays
atgaagaactcaaattttaacatctatctggtaaatacatccattttccattcattgcacgctttaaataagcttccatattctaagctagactctaaaacctttgggatcacagatggagttgtttttgtaacttatagcagcttgatagcatcctctgagaaccgttcccgtttgcaacagttggtacagtggtgcgggtctgagtttgatggtcttctggtgttcgacgagtgccacaaggccaaaaatctgattcctgaggcagggagccagcccacccgcactggtaaagctgttcttgagattcaggatatgttacctcaagcacgggttgtttattgttcagcgactggtgcatctgagcctcgaaatttaggttatatggttcggcttggtctctggggagatggaacatcgtttgagaatttcaaccaatttttaggtgctcttgagaaaggaggtgtgggtgctcttgaacttgttgctatggacatgaaagccaggggaatgtatgtttgccgtactctaagttacaagggtgctaactttgatatcctagaatcacttctggaggaaagaatgatggatatttttgttagtatgattgctcattgacatgaagtagtattcttttaaatttaattaacttggcgagaacaaagtggtagaaactgaaaggaga

SEQ ID NO: 23929 - DNA, 3974 bp, Zea Mays
ccctaatccgccgcgctactaaaaaccctacttttttcatccctctgcccctcctactgcccatccaaacactccttgcgccgccatggccacctcgctctacaccccgtcccagctccgcccctcccactcccaggcccgccgcctcggctcgcacccgcgcgtctgctccgcgcgctgccccgcccgccgccgccgcgccgccgccatctccgtgcgcgcttccaccgatggcgacgccgccgtcacggtgcgccgcttcccggccgcgccgaccaaggccgggggcctctcgggcgtaaagaagatcatgatcctcggcgcggggcccatcgtcatcgggcaggcgtgcgagttcgactactccggcacgcaggcgtgcaaggcgctggtggaggagggctacgaggtggtgctcgtcaactccaacccggccaccatcatgaccgacccggggctcgcccaccgcacctacatagggcccatgacgccgacgctcgtcgagcgcatcatcgacgccgagcgccccgacgcgctgctccccaccatgggcggccagaccgcgctcaacctagcggtctcgcttgccgactcgggcgcgctcgaccgcctcggggtgcgccttatcggggcctccctccccgccatccgcgccgccgaggacaggcagctcttcaagcaggccatggaccgcatcggcctccagacgccgccctccggcatcggcaccacgctggaggagtgcctcaccatcgctgaggacatcggggagttcccgctcattgttcgtccggccttcactctcggtggcacgggcggaggcatcgcctacaacagggccgagtttgaggacatatgcagggccggccttaccgcgtcgcacactcagcaggtgctcgtcgagaagtcgctgctcggctggaaggagtacgagctggaagtcatgcgcgacatggctgacaatgtcgtcatcatctgctccatcgagaacattgatcccatgggcgtgcacacgggggactccatcaccgtcgcgcctgcgcagacactcacggacaaggagtaccagaggcttagggactactcggtggccatcatccgtgagattggtgtggagtgtggtggttccaatgtgcaattcgcggtcaatcctgcagatggggaggtgatggtcatcgagatgaatcccagggtgtccaggtcgtccgcacttgcctcaaaggcgacagggtttcccatagccaagatggctgcaaagctgtcagtaggctacactctggaccagattcccaatgatattaccaagaagactcctgctagcttcgagccttccattgattatgtggtcacaaagataccacgctttgcttttgagaaattccctggctctgagccaatattaaccacacagatgaagtctgttggtgaggcgatggcactggggcgtaccttccaggagtccttccagaaagctgtccgctcactggagactggttttgcgggatggggttgtggccctatcaaggaacttgactgggactgggaacagataaaatatagcttgcgggtacctaatccagatcgtatccatgctatctatgcagctttcaagaaaggcatgagggtcgaagatatccacgaaattagcttcattgacaaatggtttcttacagagctcagggaactagtggatgttgagcagttccttttatcaagaagcctagatcaattgtcaaaggatgacttttatcaagtgaagaggaggggattcagtgacaagcagattgcatttgcaacttcctcatcagaaagtgatgtgagatcaagacgtttggcattaggcgtcactccgtcatataaacgtgttgatacttgcgctgctgagtttgaagccaacacgccctacatgtattcttcctatgagtacgaatgtgaatcagctccaaccaataagaagaaggtgctgatattgggtggtgggccaaatcgcataggccagggcattgagtttgattactgctgttgccatgcatcatttgcacttcgagaggctggatacgagactattatgatgaactccaatcctgagacagtctctactgactatgataccagtgatcgtttgtactttgagccactgacagttgaggatgtattaaatgtccttgatttagagcgcccagatggtataattgtgcaatttggagggcagactccattaaagcttgcgctgcctatccaacagtacatagaggagaacaaaatggtttctgcttcaggcactggtaatgtgaagatatggggaacatcaccagattccattgatgctgctgaggacagaaaaagatttaatgcaattcttgaggagcttggaattgaacagccaaagggagggattgcaagaagtgagtctgatgcattggcaattgcctcagaaataggctaccctgttgtggtccgtccgtcatatgttcttggtggacgggcaatggagattgtgtacaacgatgaaaagctgatcaagtaccttgcgactgcagtgcaagtagatccagaaaggcctgttttagtggacaaatatctgattgatgcagttgaaattgatgttgatgcattggctgacacagctgggaatgttgtgattggtggaattatggagcatatcgagcaagctggcatacattcaggcgattcagcatgttctcttcccactagaacagtctcagccaagtgcctagaagtcatccgttcatggaccaccaagctagcaaagtgtctgaatgtgtgcggactaatgaactgtcagtatgctatatccacttctggtgatgtgttcttacttgaggcaaaccctcgtgcatcacgcacagtcccttttgtatccaaggcgatcggccatccgctagccaagtatgcatcactggtgatgtctggtgtgaccctgccagagcttgggttcactgaagaagtgattcctaagcacgtgtctgttaaggaggctgttcttccgttcgagaaatttcaagggtgtgacattctcctcggaccagagatgcgcagcaccggggaggtgatgggcatcgactacgagttctccggtgcctttgcaaaggcgcagattgctgcgggacagaagctccccctaagcggcaccgtgttccttagcctgaatgatctgacgaaacggcaccttgctgagatcgggcgtgggttccgggagcttggcttcagcatcgtcgccacgtctggaacagccaaagtgctccagctcgagggcgtcccggtggagccggtactaaaaatccatgaggggcggccaaatgccagagatatgctgaagaatggccagatacagatcatggtgataacaagctcgggcgacgctctcgactccaaagacggcctccagcttcgtcggcttgccctcgcttacaaggtgccgatcaccacgaccgtggacggtgcacgggcctccatcgatgccatcaagagcttgaagaacaagtcgatcgagatcctcgccttgcaagattacttccagactgctgatgcttcggaggatttacaggcggtggcacgaaccgccccttagtggtgtctcttcttttcccatatataatgtgagcctagctcaaagccaaaaccacatcccaaatgaaaattttgtttatggttgcacctgcagcatgcatgcgcaaagacaggcatccagattgtatcggtcacaggcatggctggacagaatcggtgttgggcgaacgtagttgtagtttgtcatgttagaagggtgatagcatccatggaaataaggcttcttcccaactgcggttttgatgacgagtaccataccatatcatatcccttgtggaggtttatttacattgtatcattgtctcacaaaaacgaaaatgtgcgacgtacatgtattgttatgcttatgcatgttataatcagattctttgatgaaaaaaaat

SEQ ID NO: 23930 - DNA, 3436 bp, Zea Mays
atgactaacatggtggatttgtttgctcgtttggttgtgcttctgcataatccacttgctaggggtcaactggccacccagatcctgacggttctgtgctacttgggtccacttttccccagaaacctttctttattttggcaagatgaggtccctaagatgaaagcttacatcagtgatcctgaagacctaaagcaagatagcacataccaggaaaaatgggatgacatgataataaattttttggcagaatgtttggatgttgtgaatgatactgagtgggtcatttctttgggtgatgcatttgcacggcagtatgatctgtattctatatctgacggacacgctgctttgctgcacagatgcttgggaatgcttcttcagaaggttgatgataggatttatgtcagcgagaagattgattggatgtgtagacactcaagtatgtctattcctattaatcgccttggacttgctcaaggcatcgggctggttgcggcttctcatttagatacagtgttggagaaactgaagaacatactagatagtgcagagcaaagtgctttccagaggttcctctcatttttctcattcggcccaaaagtggaagatgttgatgacacatatgcagcattggcgttgatgtatggttatgccgcaagatatgctccatcaactgttattgaagccagaattaatgcacttgtggggagtaatatgcttggaaggttgcttcatgttcagcatcctactgcaaagcaagctgtgattactgcaatcgaccttttaggtcgagctgttattagtgctgctgaaatgggaatctcattcccactgaaacgaagagatcagttactggagtacgttttaactctaatgggtagggatcaaagtaatgatctcactgatttcaacactgagcttttgcacacacagagccttgctttaagtgcctgtactactcttgtctcgctagaaccaagattgccaatggaaacaagaaaccgtgtcatgaaggcaacattaggtttttttgctttgccaacagagccctcaagcattgttgagagtctcgtaacaaacctaattattctgttaggtgccatcctgcttacaagtggtgaagatggtcgaagtcgagcagagcagttgctgcatattcttaggcagcttgatccatatgtatcatcatctctggaacaccaaagaagaagaggatgtgttgctgtacaggaggtgttaataaagtttcgcaatctttgttctggtggattcggtgcattgggctcctatccaactttcacaatgaataaacaaatcgatcgagggactaggagcttgtcaagtttgccatctgcatttgtgttgcctagtcgagattctttaagcttgggagagaggacaatggcataccttcctcgttgtgctgatacagacacggaagttaggaaagttgcaattcagatcattgcacttttcttcgacatttcattgtcacttccaaagcagaaggcatatcctaatgatattgatctggaatcctcgtatagtgctttgtcctcccttgaggagttagtctctattgtcagaagggaggcatctgttgatcaaactgaactatttcagagggttgtatcctcagtgtgtattctattatcaaaggatgagctggtcgtcttgctacactcttgtacgttggcaacatgtgataagataaaacagtcagcagatgcttcaattcaagctattatcatgtttattatcagaagaggcaaggagctacgtgaagctgatgtctcgaggacaactcaatctttgctctcatctgctatttctcttactgacacacactcacgccaagaggttctgaatgctatatcatgcctagcagaaaacaccaatcacgttgtggtctttgatgaggttctatctgtggctggaaaagatatctgtacaaaagacataccaaggattcgtggaggctgggccatacaggatgttttttatctattagctcgagatggggaacaaactgagaaggacaaatggatcgagcttgttcaggaaatcgcatgcagttcctcagtaaaacgaccaaaagatgttctgccaacttgtgttatcttgtgtaatgctctcaaccgaaatcagagggctgaaagggaggctgctgctgctgcactatcagaatttatccaccacattgaaaaagaacctacattgcttgaacaaatggttgaggaaatgtgtcaacatgtttctgatgattcaccaactgtcaggagcctctgtttgcgtggacttgtgcaggctcctgagagccacatgcttaaatacatccagcaagtgttaggagtaatattagcacttcttgaagaccccaacgagtctgttcaattaactgctgtccaatgcttgttaaatgtccttaatttgtcagaacaagatgctgttggtccaatcttaataaatctcttagtaaggctgcgaaatcttcaggtctcaatgaatacgaaaatgaggtccaatgcgtttgcagcttatggtgctttaagtgcatatggtgttggtttgcagcgcactgcttttattgagcagatacatgctacccttccccgtctgatcctccatcttcacgatgatgacctaagtgttcgtcttgcctgtcggaacacattccagctccttgcgacattgatggaagtagagggcttgtctgtgctcctcagcaagcagtattttgcttctgatcgccgttctgactatgaggacttcattagagacttaacaagacaactttgtcggttgtctcccgccagagtcgacagctacctagaatcggctatccaggcattcgatgcaccttggccagtcataagagcaaacgcagtttgtttggtgagttgcatgctatcctttttggatgatcagcgattcattgctccttatttctcccaggtatttgctacgttggttggtagaatgagccaatcgccagacgcaattgttcgagcatcagcatcgtctgcgctgggcattctgatcaagagatctaacatgctgaggtcactggtttcacgatatgatcgagcagattcatcacgcaattcccagagcggtgattctaacaccaagacaccatcagagtttcaagaacaggcagaaggaaatccgaatgatggcgcaagtggagcggcaataaaggggactgaagccgatcactgatgtaaatttactcgtatatacgtatagtgttctagctatgcatgcttgtgtatatgctgtacttccctcgcaaataggaacaggagagcaaatttatgctgccatgtcaatagatcttcagtacacctgtaaagcaaccactcacagttagatgattatttattgaatcaaatattatttatatattgaattgaattttcttcgatgcagt

SEQ ID NO: 23931 - DNA, 2893 bp, Zea Mays
cggacaacagcgcgcaggcctgtgaattgcttccctctccacgcgcaccttcccgcctccgcgcccagcccaaccccaccgttgccacgcccacctccggcgtccacctcgcggttctccgctgcacaatcctccggaagacttccccagtgcccctgcgacccgtctgcacacctccgcggctgctcgccctcctctacccaaaccctaaccctaggtccgcgcgccggtgaggggaacctctggcttaggctggaggtgatgaccccgtgcttcatttttagtctcttcggtgtccatgggatgctccatctctcagctgcggtccttcgcgctggaaggatacatctgtttgctggtgccatcagaatgaactgccgctttcagtgacatgcatgcgatgcatgcttttgcttttcttcaatggtgaatgctgagccatgctcgatgggtggaattatggattacggtgttggtgtgggcaccaaatcttcaccacgcagtatggccattgagaaagctcaggaggagctcaggcaggagtctgatgttcgcgatgaatggaggagagaattggaatttctagagaaagtatgcccgcaccaggttatctcttagattatatttctgccttcactgtacctacttactcctatttattgcagggaggcaacccattggatttcaattttgcacatctggaaacggtcggtgtacactctgcttctctcacaaatcaagtagaagcacaaactgtgataagtgacgcgaaaggtagtttttctgcatcacctcttggagattcggtcgagagtaccgacaaaccaggaggttccatgtgccgcgaaaccaacacagcagacaatcttatgcttttgggtggaggtaaaaatgacattgcagaagaaaaggttgtaaaaagaggaaccaaaagattaaatgcagcacaacccaaacattcattgcccagtgacggtcacaaaaacacaaaaaagcctgctgcttctggtttgtcacacctcggtgtcaaaagccaggcatatgttcggcgcaacaggtcaaagccaagtagggagagcgggaatgtcacatctattagatcttctatgatccctgctaaagtctatgagccaaatgatgaaaaggttacagcacagaaaaacaatgcagacgatcatggtgtattgtccgtttctagtataaaacagtctggacctaaccgtgacattgcaccaaagagtatagcttctgatgaccatgcagcaatggagctggatggcattcaaacaattctcgaaagtgaatgtgtggtgaacgacaaagtaaacaaagctggcaataataacaaagctaaacagttgtcatcaaatgacacaaatcatgatcgtttccttgttgggtgtggtgagatagctgctgaagtttcatctgcggaaacccctgatgccaatttaaaagttgttataaagccatgttattctagtgcatctacatatgatgagaaagagtcatgtgctgttcacgaaaaggctgatgatggacacctggatgaatgtatggcccatatccgtgaaggggaacttggtcacagcaggacacttccttgtgttgtagaagcttctacttcacacaatgatgtagtgggcccatcttgtgaaggcactgtgaatattgttgatgaacatgcagatggggacatcaatactgttgcagggaagattgattctcatgaagacctagatagtagtagacattctaacatgattctcaaggtaagtggcacatcgatagatttcagcaggcctgcttctttgaaggaaagttctgatcttgtacgacctgaagccagtaatatttctcatgtgaaagatgaaattgaagtttgtaacagtgcaatagttgcacagaaagacacagagtgcttgtcttctggccgcagcatgaacattgaggaaagtccagtttcggttaggaaaaatagctatgttgggaattcaaactctgcacatcctatatccgtaggcatcgatttgtctgatgccttgtctccaccaaaaaatgatgaatctaacgtggagagtgagattaaaaaatatgagaacctgaataagatggaaaagaaggcctatgaagattctattcttaaaaatgctcgcgttatagaggcaaatattaaaaaggctggtcaacgatctccctgtaacattgctttagagaagaggagaaagagtcactgggattttgtccttgaggagatgacttggatggctaatgatttcatgcaggaacgactttggaaaagtgtggctgcagctcaggtgtgccattggattgcctctgatgcccacgccaagtttgaaaaagcaagcattctgaaaaagcagaaagctgttataaagatcattgcaaagggtatcatgagtttctggcgttcagctgaggctttacagactgctgacaggacagctaaagtgatgccacacaattcaactatgctggaggagatagatccttcgggagtcaaagcaggaaaagaacagggtcacaattcactggaagcgaaagaatccagccagcaacggtcacagattcatgattatgcagttcgatttcttgaatataatagaacagctgatttgcacgtgttgcctgaagctccaccaactcctgacaggctgaatgactttggagtcttgaaagtgtctgatcatctctcagaagaaagtctcttttatacagtagcagcacctggtgcagtgctggcatacagggactctctggaatctcttttcatgtatcacaaggctcgcctccgcaagaagagaaattttatctccaaattggaggatgagggaaggattgtcaccaaccatgagcaaatgcaggaagtttt

SEQ ID NO: 23932 - DNA, 672 bp, Zea Mays
cgcgcacggccgttccacatacgccgagactccgacagactcagctcccagggttctgttcctttcccccacaatcgtacgcttccgctcgaagcttccgccatgagcgaggacgaggctgagagctcgagctccggcgcggccgcgagcgaacccaaggatccgagaacgatcgctcgcaaatatcagctggatctttgcaagagggcagtcgatgagaacatcatagtgtatcttggaacgggatgtgggaagacacacattgccgtgttactcatgtatgagcttggtcacctcatccgcaaacccagccgcgaggtctgcgtcttcctcgcaccgaccataccccttgtccgtcagcaagcaatggtgattgcagattccacaaattttaaagttcaacgttactatggaagtggtaaacactctagagatcaccaggcatgggagaaagagatgggagaatatgaggtccttgtaatgacccctcaaatattattgcacaatttgcggcattgtttcatcaggatggacttaattgcactattgatatttgatgaatgtcatcatgcacaagcacaaaaaaggcatccatatgcacaaattatgaagcagcagtagccgccaagggacgccggtgtggggcggcgacatgtacgcgtggtcgagact

SEQ ID NO: 23933 - DNA, 3118 bp, Zea Mays
cccgcatacgcccacagccgccccacgcgcgcatcccgcagccgcgcgatccgtccgcttcctcctccccgcgcccgcagcccccgccgccgatgccagccgccgcgcccgcgcaagggaagttgcttcccaaatcccgcagacaagatttaatcccgtgattcttcccatccatggcagccgtgcccgcaaaccgcgcctccccacgactcccacttccatggcgtcgcccccttccatccatggcagtcacgctccctctgcgcccttccatccatggctgcggctccctccgcgccgcaattcttcccatcctctccttccgcgcggtttgcggctaccaatcctctccctctgcgtcgtgttcttcccatcctctccctccgcgccggatctcgccccatgtccaccaacgccggtgtccgtgatggcgcgctcggggcagcggtggacgcagcctttgccaggcgtgtgctccaggccgaggccctcctcgggtacctctccgcgctggccaccagcccgcgtgccgagggcgacagggtggaccccgccgtcgccgcggcgcagctcggggcgctcggccggtggaagggctcggcgaggggccttcccgagtacacggtcgtccacggcatcgatggtgccgtcgtcgccgcccctgggagagccaaagccaagcagaggaggccgcagtcgaccggatttgggaatcctgctcctgccaaacgggatgaacggaaggaagcaaaatctttctggggttgatttggcttgaaggaagcgggatctttctggacaatggctgtctagcttcatccattctggtacagagggatggagtcttgtaagaaggtagctgcaagcttgaagtcgtgtgagccatgggggaacagggcatcctggacaaacgccgttgggccaggttggaagttgagctttgctgttgagccatggactaagggctttagcgcgtcgtgtgcggcgccatattctgctggagccacagagcatcaattatcgctcgatgagaaggtggataactccaccgttgcatctggttttgatgggtaaagttatctatcagctagattcatggcaggaaaggttttttctattgtcggtatccagcacctaatggcaattctgtgaagcccaaaggttccaagtcaccatgaaaaaattgaaatgacgagatctcttaatctaattgttgcaccttggaaggtctgaaccatcatagtttaattgtatcacccatttacacaagttcctaccatcagagttcaactgtatcacccatccataagcaattccttttgttgaaatttatgagaagacatatgcctctgttaagtctcaggaacttttttgctgggaagccaattccttactgatctgagggacaacatttttgtttgcctgatataaggtgatgaaggtggctggataacacgattatgggtaaagtgtgaaagggaaacgcgaaaagaaacgtgtcctggtcccaagtcacctgccatactgaacacgattgatcgcagaaagaaacacgttctggtctagactgacagttttggagctggagccggccatgcgctcgatcagagttccgctgcagccacgacctctctcccgaacgcgcacgaggagaccaggtggaacatatgcaagcaggttctagagcaataaccccatgaatccagatcgggggtctgcatctacacgggcgtgtactccgcaccgctcccctccggccccgaccgccgtgtgctcgttgtagccggggtcgacctcaaccacgacgacgatgcggtctcctcgccccaggctcgacctcctcgctgacctcgccctgctccacctcaactcgcgatgaggattgtcggcacgttcacaccgcgccgttgcagaacgttggagcctctcagaactctagaagctgcctaccaccacgcaccctaagataggggcatatctgtgttagtcgcctgcacacatactgaaatatgggcatatccaccatgtattcttctcttagttatgttagataagacttttactctgtcatttactgatctggtctgtttttagctccattagcttgttcacaagcttatgttagagaaggcgttatggcttttctcaagattataacatttctgaataactgttctgcgtaggcatggtaccatcttcatcatgtagctgggatgagctggcaccatgaaagaattcaagtggttaaatcatgcatctgcagaaatattgtactctcaaatggtgggttgctgcgtcatgggagtttgggtgaaggcctgaaggatgtgatgcaaaacgtcgatgcaggtctgggatgtccgcctcattatggatcaaaattcatgacgttctaaaggtgtcggatgagtacctatatactccctcccagaaaacaaggcgcctcattacactattggaagctggacgacatggatgactctggcaagatgcggtgggagcacgacgacatggatgactccgaccatgagttcgacaggaagcctagcaacagtacgcagtagcaaggttgaccagaggggcagtggagactaacccaacaccccctcctccgaccgtcatagcgcttctttcctctggcttcatttcttacctatgtatggatggtcttcaccactggttacatctagcaagtcctcctagggtgacatgaaggagattgtcatgctgccaaagcacatcaaggacaatgcaaacaaggacagaggaagaccggacatgccatttccaggtggtgacatttctattctcacgcgcccacccaacatttttgcttttactaaatgactatgtgcgcgaatgctttgtggatgttgagagggattatctgtgcttgacaaaacagtatcccagacttgcaattactccagaattttctaaggttgggcattttgtacattgaacttttgttgctgatcgatattcaatgtggcttttggcattctctgtcactctagctaggtccttggatgagccacactattgacatgggtttagagaacttctcaagggcccgctgtattatgcctgtgctataactctgacaacaatagttttc

SEQ ID NO: 23934 - DNA, 379 bp, Zea Mays
cgaacttcatgaagaacatctcaccaatgataatggcgtagagaaccccgacgacgtgatgcgtggctccacggcagggatgactcggcggcgagcaatcccccccacaacgtggctccccgcgtccgattctcccccgggacacgatccacaccaccgtcgaggtgtccgggagcgcaccacgagtgctaagcggggacggcggcggcagacggctatggtggcgctcccatatctaaaggcatgctcacgaggcgtgtattctagggcgaggacgaagcggacgggactgaggatcgatgcgggttaatatgatggctgagcgcggactcaaggggttgaggttgggaacggattcccgacgcatgcgaggaggccg

SEQ ID NO: 23935 - DNA, 2677 bp, Zea Mays
cgtgtgcgcagccaactctacctatccccgcccccgggatgggcgatggcaactatcctatcgcaacaatatcctggggtgggggctataaaacggagcggcccgcgtggggcgcgcctccatcagccgcagtcgcgtcgcgtcgcgtcgcgtccagtccaatcctcggagcctcacacgggcggacgagcgggagcttctcccaatctcccctgccctgccctgccctgccgccgcgcttagcttcgcatcttcccctcctcctcctcctccttcctcggccaagcgaggagcgaggcgcgggcgcgagcgcgtcgttgagatggattcggaggcggtgcagcacggctgcgcgcattacagccgtgggtgcagcgtcgtggcgccctgctgcggccaggccttcggctgccgccattgccacaacgacgccaagaactcgctggaggtcgacccgcgcgaccggcacgagatcccccgccacgaaataaagaaggtcagcgttccctccctctgctcaaagagcaatctcctgcctgtttcaaccattgcctatctcgtgttcgtctttgttattaccgtgagcaaagaaaggaagaaacaaacaagagcgccgccttctctcttctccttctccatgtaatggagcatttgttccgccgcgtagtcgagtgcaagcagcggttttcctcttttggaaacccacccccacgcacggttccgttccaatctcgcccttccaattgaccaacacaaacctttcctaagatttcttgtcctccttacccttctacagacaagtacgaaacgcaatcgcacaaggttatactactactagcttttagtgttctagcgaccttagatttttttttttggttaggcatccctgatttttctcacacttaaaagcttcttcagataaggccatatcagctcagctcagtgctctgggagccgttctgcacttcacttgcgtgtcactaaaaacttgactgctttccgcgatgtgctccgcaccaagtggccggcactgcgtggtccacaggatttttcaagagaaagccggggtcacgggtgccacttgaagccaaggacaggcgtctgggattggagaatatatgagaaagggataccgtcagaggcacatctcaccgtcaaactgaacagggtctaactgcttccagctgatttgattgagtttgagtgctgcatagttgaggacctggatatagtgacgtgtcctgacaggtgtctttggacctattagcagtgaatctgacgtcgatcggctaaagcaatcatgttcgattcttatccttttttttttgagagtatatgcctgattcgataaacgttcctatcctgtttcctgatgatgcatatatgttgtttcgattcatatagaatcataccatccatctattttgtttaaaaaaaaaatttctgggtggccatgggcacagcatgcctgttcttaagataacgattccagtaactgttcccttctgtcactgaactcatatgaatcgagacttaactggagctgttgcgcaggtgatctgttctctctgctccaaggaacaggacgtgcaacagaactgctccagctgtggggcctgcatgggcaagtacttctgtaaagtatgcaagttcttcgatgatgatgtctcaaagggccagtaccactgtgacggatgtggaatatgtagaaccggcggcgtggagaactttttccactgtgataaatgtgggtgttgctacagcaatgtcttgaaggattcccaccactgcgtcgaaagagcaatgcatcacaactgccccgtctgctttgagtatctgttcgactccacgaaggacatcagcgtgctgcaatgtgggcataccatccatttggagtgcatgaacgagatgagagcacaccatcacttctcatgcccagtgtgctcgaggtccgcctgcgacatgtcggccacatggcggaagctcgacgaggaggtcgcggccacgccgatgcctgacatctaccagaagcacatggtgtggatcctgtgcaacgactgcagcgcgacctcgagcgtgcggttccacgtgctggggcacaagtgccccgcgtgcagctcgtacaacacccgggagacgagggctgcgtgccccaggatctgaggcgaaccagaggccatgtcacaaaatgccagggagatgccgtccaacgatcatctgtctgcaggacgttgctgcgcttaaggttaaaggctagcgcgagaccaggcctggtagtccagtcttgagtttggtgctggagcatttgtaatgttccggtaaaatgtaatgcgtccatgagtgctgtccaggcagtaagcacacctgtggatcggggccggcgcaaggtccctaggcaagctgcaggattagtggggctattcatgtttagggcgcgaatgcaacgaaattacccgtgggccgtgggctcggtatgtaacagaaccgattatttctattacaataataacatgcagttctattgggccgagcctaatcaggcaccacgaatgtgaataattgcacatggcgcatatatggcgggcagtagatacatataaaatggagaaaatccgtttattgccatcaaaacttatactgatcactacaataccatctaaaatgatgtgctcccttc

SEQ ID NO: 23936 - DNA, 771 bp, Zea Mays
cgtcgctctcttctccaactcgaagatgtcggccgccaccgccctgcttcatcgaggcccaagacccgatctctgtttttgataaagaaaccaaacaacaacctagcagtcttccttcacttctctgcttccgacctcgtagcgaatcagatcggggggctagggttccggtgcgcctctacaactggacgcgaggctaggctgggcatggagggaatcgtcacggcctgaaagaggtcccggccggagacgacgaacggggttgcagccgccgggaagcgctacaaagacacagagtcatttcaaactggtctatcaagcaaatcgaagccttgcaccaagtttttcagggtggggtcaacactaagcagagttacaggcgtcaagctatccatccgcgaccacgagtctaaccccaacctaaagaacatcgagctggaaggcaattttgaccagatcaagcaagccagcgacttgttgcgtgatctcatcgcaaccatcagcgcaagcatgccagcgaaaaatccatcttctgctgtggcgccagcaggaggaggccaaggcagtggtccggggggcacgagcagcaactacaagacaaagctgtgcgagaacttcttgaagctatgcgagaacttccaacacgactatgtatgagatattatctcttattatgactggatgagatgtgtcttatggctatagatgagacttttgtggtgtaattgatgagactatagatttaaatgttgttatgtgattgtgtgtgag

SEQ ID NO: 23937 - DNA, 2655 bp, Zea Mays
cggagatcggatcgaactgcctgtgcagtctccctccctccctccctccctccctccctcatgtccatatataccaaaaaatctccgccgcgccgccattagctagctctcgtcgtcttcgttcctccgcaaataatttgttactcaagccgaaggaggacgagggcgacgggattggctaatcaaatcgaccgatctagtggctggtgcccaggagaagggacgcgggcagtgcggctcgtcgtggtcagcagcttgtggcgaccggtcgccagggaatcaatcaattcaatcagaaagttgcaattttgattgagctcgattcgtcatccacaagacattagggaatcgaaccaccacaaagcaagaaggcagtccagtgcagagagagagagagagagaccaagaagagaaagagaaagggaaagagaagcaaagcaatggatgccgcctccgcttcgtcgtcttggcaagacctgcccccgcgcctgcaatcctacgacaacagggcgccgctcctcctgcccgtcaagatcatggacgccgccgccgacgacaagccggaaatctccgacgatacggcccaccagattagcgttgatccttggtatcaagttggcttcgtcctcacaaccggggtcaacagcgcatacgttctaggatactctggatcaatcatggtccctctaggctggatcggcggcacatgcggcctcctcctagctgccgccatatccatgtacgctaatgctcttcttgcacggcttcatgaagtcggtggcaaacgccatatcagatacagagaccttgctggacacatatatggaccgaaaatttacgggcttacatgggctctgcagtacattaaccttttcatgatcaacactggctttatcatcttagctggacaagctctcaaggccacgtatggactgttcagtgatgatggagttctgaaactcccttactgcattgcgatatcaggattcgtctgtgctcttttcgccattggaatcccttatttatctgccctcaggatttggttggggttctccacgcttttcagcctcatgtatattgtgatagcagttgtgctgtcgtcgagagatgggataaccgcacctgcaagggattacagcatccccaaatcatcgcagtcaactcgagtcttcactacgataggttccatagcagaccttgtgtttgcttacaacaccggcatgctgccagaaattcaggcaaccatcaggcctcctgtggtgaagaacatggagaaagctctatggttccagttcaccattggctccttgcctctctatgctgtagtttttgtgggttactgggcttatgggtcctcaacatcaggctacctcctcaacagtgtcacaggcccagtctgggtgaaagcggttgcaaatctgtcggcattttttcagacagtcatagcgctgcacatctttgctagccccatgtatgaattcctggacacaaaatatggaagtgggcgtggtggcccttttgagatccacaacgtggcgttcagagtagcagtcagaggaggctacctgacggtgaacacgctggtggccgcggtgctcccattcctcggcgacttcatgagcctgacgggcgccctcagcaccttcccgctgacgtttgtgctcgcaaatcacatgtacctgatggtgaaggggcctaagctgggtgccatccagaaatcatggcactggctcaatgttcttgggttcactgcgctggctgttgcagcggcggtctccgcaataaggctcatcatgcgtgattccagcacctaccacttcttcgctgatctttgagatcgatcgttttcttttctttttgttggaatgctgagccagagctagtattttttcattttcagagaattattatccatgtatgtaaggatgacgcatatatatattgaatagatgatttaatatcaggtcagagcagacaaggaggtatggtgtcgatgcacgacttgtagaggatgcggaggtagtcgagcagggcatcctggttggcgtcgtccaccggctccatctcgaagctccacaccaccagcgttgcgcctccgccgtagtccaggaggctgatggtgttgcgggagccggcgaggccgacgttgccgtcctccatgaggtaggtgtaggagcgggcggtgtggtccatggccaccagcctctccctcacccacgacgacccctgctgctgctgggggaacatgaggccgccgcgcacgaggcgcacgtagcccggcacgtcctcgtcaccggccaccgcggtgcacgactccaccatgggcatccactcgcgcagccgagacgtggaggacaccagctcccacacgcgggccacgggcgcgctcaccacgccgctcgctgcgccgcgccacgccttggacgccgcttcatctgactgtccgtgcccatccatggccaagaaccgtcagctccggggccagcggatatagcaagggggtcgctggaaagtcaagctacatggctgcaaaaccaaagctcacctaaaaataaggacaaacataagaaccagattttaaaatccacctgcctaccaatattttatataggtgataatcaccttaaaaaaagatgtggacgacacacacgctag

SEQ ID NO: 23938 - DNA, 592 bp, Zea Mays
cggaaggccggggcgcctctggtttcgtcgtctccgcccgtttgttcccccctcttccatggcgtggcaggcagggtcatctcggcacctggctggctataagtagctcacctggctgcatccatcactggcacgcatccgcgaaatccaagagcagcagcagcagcagaccaagatcgagggagggaggaagacagacagacagacagagagatggagcggatgagctcgtcggtgcagtcctgggtggaggaacacaagctctcgtccatcggagccgtgtgggcgacggcggtgggcgcgtccgtggcgtacagccggcggagggcgccggcgcgggccacgagcctgcgcctcatccacgccaggatgcacgcccaggcgctcacgctcgccgtgctcgggggagccgcgctcgcgcaccgctattacggcagcagcgagaggaggcagaggcaggaggacctggactacggcttcaaatcccagctgccgccggccaccgacgccgagggcaacgagaacgagcgctggagctggtagtggcagggcagactagcagttgcaaagtccctctcaagcctcaacctac

SEQ ID NO: 23939 - DNA, 1918 bp, Zea Mays
acagccgatagacgcaagttgctactactaaaagacaaatgcctcacagcacagttaccacattgctggagtggaggtatggcgtattctggacaaaggcatgctggtgttgggagctcctcgaggccagctaatggattcaagggggcagccaactcggtggagttcctgggtagggagatgctgggaatgcgactgagggatgccaagcccgacacagatgatgaaagggagatgtggtcaagttcagatgtgactgatagttctagtaatgaagctggtcatgtaatagcgactactgttcacgggcgcaacggcctgcctaaacagtctgtcacatacatcgctgaacatgtggttggaactggttcttttggggttgtgtatcaggcaaaatgccgagaaacaggggaaattgttgccataaaaaaggtccttcaagataagcgttataagaacagagagctgcaaatcatgcatatgcttgaccatcctaacatcatcggtcttaagcattacttcttttcaacaactgaaagggatgagctttatctcaaccttgttcttgagtttgttccagagacagtaaacaggattgcaaggcagtacaatcgaatgaatcagcggatgcccctcatttatgtcaaactgtacacgtatcagatatgccgagcgcttgcttatatacataactgcattggcatctgccaccgtgatatcaaaccgcagaatgttcttgttaacccacatacacaccaactcaaaatttgcgatttcggaagtgctaaagtattggtcagaggagagccaaacatctcctacatatgctcaaggtattatcgagcaccagagctcatatttggtgcaacggaatatactactgctattgatttgtggtcaacaggctgtgtcatggcagagctgcttctaggacaggctctgtttcctggagaaagtggagtcgaccaactagttgagatcatcaaggttttgggtactccaacaagggaagagatcaagtgcatgaacccaaactatacggagttcaagttcccacaaattaaagctcatccgtggcacaaggtttttcaaagaaggcttccacctgaagcagtggaccttgttagcaggtttctacaatactcaccaaatctacggtgcactgctttggaggcctgtatgcaccctttcttcgatgagctgagagacccaaacactcgtctacccaatggtcggcctctgccgcctctcttcaacttcagatctcaagagctaaaaggcgttcccccagaagtcatcgatcgccttgtcccagagcactcaagaaggcagagtttgttcatggcgctaaggacctagtttttgccgttctttttgcccccttttttcccaccgtttgccaccttgagggaagcttgtaaagctatagcttctcctttcccctcgtccttactttcctcccctctctttcttccgagctttgtgtggatgagagatccttgagatacactgctagagctgtgagttccaggatgtgaggttcgagtgtgtgtgatgtgcagttgtcgcctttgaggtcggagatttcagttgcagtgttgtgagaggcttgtgaagcttttttgtctacttttcagtgcttctctggcttgaagttttccttcaattcttgtgaactggcttcaagatttggcttcgtgaaccctgtgtgcgtgtaaaagtactggttggatgctgctgcaccaattctggaaaaaaaaagcttacaactaaacacctacttatgttttgtttagccaaattcagtgccttcctgttatgcattgcggttcaagatcagatgaatttatatagggtctgattatttagccaaattcagtgccttcctgttatccatttcaatatggaagagttcaac

SEQ ID NO: 23940 - DNA, 834 bp, Zea Mays
tccaacgctccaggctcacagtcccacggatcgaggccgaaatcacctcccgctcggcactgctcaaaacttccgcgttccctcccaaaccccaccgataaatactcctccaaccccgaatcttaaccatcgcacaaatcctcttcctcgagttctcctcaaccaaattcaaagtcacagcggcgaaactctcggcgatgtctggccgcggcaagggcgggaagggtctgggcaagggcggcccggcgatccgcaggttggcgaggaggggcggcgtcaagcgcatctccgggctcatctacgaggagacccgcggcgtgctcaagatcttcctcgagaacactgtgaccgccatggacgttgtctacgctctcaagcgccagggccgcaccctctacggtttcggcggttaggtcgcccctctcccggtggcgaattacgtggtggcggtggcggtcgtgttgtgttcttggtctagttagtctgtgttgtctttatcggtgctgttttctgtggtggttgtactgcatcgttctagtttctagtccatgtgctgtaatatctcgctgctgtaatcaatggaatgtcctcgtttcaagcctcatgacatatcgctcttttgtaaacctgcaagaattccgtgcactacgcatctgtttcgttgtgcaagagctcagatctgcttttgagacaactaatgacattagggatacgcgagtatgaaaatcggaaaacagtgacatgttttcagtaaattcaatgtatacacatcttcatagtaatagctgacagagcaaagtgttcatgtggtttgctgtgcataatgcaattttt

SEQ ID NO: 23941 - DNA, 2598 bp, Zea Mays
gctacggccctctcattcgtcttgctcggtttcaccgccgggccttctcatctgttcacttggtacttggtagctctcccatttgtagtggcagcactggactagtcgtgttcaagcgcaccacaaaaggagagcgagctcgagagtaacaagggcttgcgtgtgcatggttgataggggaaatggctaatggcagcaactggctaggcttctccctctccccgcatacggccatggaggtgccctccgtttctgaacccgcttctacccatcacgctccacctccaccttcttccagtaccacgatctcctcttccagtaccaacaacaccatcagttccaacttcctcttctcaccgatggcctctccctatcctggttactactgtgtgggcggcgcgtatggcgatggcaccagtgctgccggcgtctactactcccacttgcctgctatgcccaacaagtccgacgacggcaccctctgcaacatggaaggcatggtgccgtcgtccccaccgaagctagaggacttcttgggtggtggcaatggcggtgggcaagaaacggccacctactacagccaccagcagcagggccaggaagagggggcaagcagggattaccgccagtaccactaccaacaccagcagctcgtcccctacaacttccagcccctgacggaagcagagatgctccaagaaggcgcagcgccaatggaggaggcgatggcggcggccaagaacttcctcctggcgagctacggcgcttgctacagcaacgaggagacgcgccctctgagcctgtcgatgatgagccccgggactcagctgagcagctgcgtgagcgcggccccgcagcagcagcaccagatggccgctactgtagccaccgctgccactgcggccgcagccctggggcgcagtaatggcgatggtgagcagtgcgttgggcggaagaggagcaccgggaagggaggccacaagcagaccgtgcaccgcaagtccatcgacacgtttgggcagagaacctcccggtataggggcgtcaccaggcacaggtggactgggagatacgaagcccacctctgggacaacagctgcaggaaggatgggcagactagaaaaggcagacaagtatatctaggtggttacgacaccgaagacaaggccgcgagggcttatgatctggctgctctgaaatactggggtccagctactcacgtcaatttccccgtagaaaactaccgagatgagctcgaggagatgaaaggcatgacaaggcaagaattcgttgcgcatctgagaaggagaagcagcggattttctcgaggtgcttccatctaccgaggggtgacaaggcaccaccagcaaggaagatggcagtctcggattggaagagtcgctggaaacaaggatctatacctcggcactttcacaactcaagaagaagcagccgaggcgtacgacatagcggccatcaagttccgcggcctgaacgcggtgacgaacttcgacatagcaagatacgacgtggacaagatcatggagagcagcacgctgctggccgtggaggaagcgcgcaaggtcaaggcggtcgaggcagcgagcagtgctcctatgacgcacacgcacagcggtggcaaggagcagctcaacgctaccaccgccgaggagacaagcagcgcgggctggaggatggtactccatggttctccccaccagctggaagccgcgcgttgcccagaagcagctgatctccagagcgcaatcatgaacaacgactctcatcctcgtccatccctgcatggcatcgctggactcgacatcgagtgcgcggtgcatgatcaccacgaccacctcgacgttcctgctggcagcaggacgacggctgctgggagcatcaacttctcgaactcgtcctcgcaggtgacaagcctgggaaactccagggaggggagccccgagaggctgggcttggccatgatgtacggcaagcagccgagcagcgctgtaagcctggcggccaccatgagcccctggacgccggtggcggcgcaaacagtggcacacgtgctgaagcagcagccgaacgtcgtcgtttctcatcgacctgtctttgccgcctgggcggatgcctagctacccgagggagttggagcttagtagccgctcgatcgatcttgctcgccattgctggttttttttttggtagactggagcaagattggcagcaccaggttaggtcaactagctggaatagcaaggctcgttagttagcacgatggctggtgtaatgctatgcatgcactgcagtagaagataggccttaatcagtctacagcttatgcacaatctcagtagtgctgctgctagctggtggtagctagcgttgttttgagccccttttgggtgacagattggttagaatgtagcatggcttcctttgaagaacgttgcatgaaacaaggccgttgcgagagagagagaaggaaaaggttcacgaaatgagatggctcgtctttgtttgtacgggccattcaggtctcgtcagtgggacctgcctttggctatgcgcacagatgaagatcttttgaccgct

SEQ ID NO: 23942 - DNA, 195 bp, Zea Mays
ggacctcagaatcctggtcccagtgcacctctgaagtggatacatcattctttggcagcacttctttcagcaaaaggttcctctcatagcaattcacattcacggatgatattccttggcatcaacttttatgggaatgattttctactgtctggaggtacatataacttatctttatctttctcctcttttctt

SEQ ID NO: 23943 - DNA, 1655 bp, Zea Mays
cgaattctttgatatgattctaaaacttgtatgaaactgtaaagagatggggtgtggcccatcaatccccgacaagtacacgataggtgggaaggggcgcaagcgccggagcgtcatacaggaggttgccgtgttcgtgcccaccatccgcatcccagtggcctctgacatagctcatccgctcaggggaatagtttccaaggatcttgtcgaccgactctccacactccgtgcccatgtcgcctcgctggctgaagaaatctatcacgcggacgtatcagctgttcaagaactgcagcatgcgctagaggagtacttgccagttgttcttggtttaacaacgaaagagagccgtcttgaatcgtcagtacagttcagatggaagaccttagacgacgaccaggagtgttgtctggcgagcgcgtggtatgaggtgctctcggtggtccacatgatggccatgcttgcgttgtttgaggctaacctattgctcatcccaaagagcagccaaggtggtggtgaaaggaaggtagcagaagacgcaaagaaggatgtcgtcgattcattgctcagggcgtcgggatgcttagactactccgtgcatcgcatacttgttcagatacctgcgcaagtcaagaagggttttcccagttacttgcaggagggcatgcttgaggccatctcaattcaggcattggctcagtgtgtggaaatacagcttggcttggcttctgaatgtgagaaggcaacgctgtcagtaaagaggaggctagcttgtgagcaagtcagctatttttctcaggctcactattgtctgtcgggatgcgatacgagtgactcgtacgggaagaagcttctgctgttcctcaagtggaagtggatggaggccaaggctgtagcgtattactaccatggtctggtgctcgacaagggcggcgaaccggcaaaccatatcagtgcagtctgctgcctctctgcagctgatgacctgctctcagacagcaaaagggcttgcttgagtttttgcttggcaaatcctgtcacgagggtgcctcctccttggggtgtcatgaaaaacatgcacaaaaagatcccagatgtcgcttacaagaagttccaagcgcacgggcatctgtttgagcaaaacaagaacagcgcactccaatccgttcctgacctaccagagtttgcgctgtcgctgagaccggatggatacgagttgccaagcactgattcgatctgggataatgttgatggccaacctcagattcaaagcctcaaggagcatatgatagatgacgaagatgaagtaggcacaaaatgatagttctcacttccaaatgcttcttttcattgtaccaccaaaagtagcagagctcaaaaacgcttaatccaaaatgttttggattcagcatatggctcaactgaaaaaggaatcgcgatctctgtattattgcaagtattaccatatgatatagtaaagtcttatgtgtaatagaatcataaataatagttggtttcttgctgtaatcgcctttaattttattttcccaactggcagaatagagcatcacagaaaaaaaaaatacggcacgcatttcagtagaacaatagtctgcgtgtttggttgggtggctaagtggagaatgtagaag

SEQ ID NO: 23944 - DNA, 106 bp, Zea Mays
tcttgatataagaaaaatgttggcaattcgatgggttcggaccgtggatggatgattcccttcgtagtcagaaatatctcctcagcccatgaacctttgcttgttt

SEQ ID NO: 23945 - DNA, 3104 bp, Zea Mays
ggagaagcgtcatgcatgtcaccgtgacttgcaaagcagctagcatagggaacatcgagagagagatgagggtagcgatggtgggttccggcctaagcgggctagtggcggcgcatgagctagcgagaagtggcggcgtgcgtgtcaccgtgtacgagaaggaggaccatctcggcggcgccaagaccgttgccgtggacggcggagcagaagaaggccgtgtcctcgtcgacctcggccccgtggtcttcaacccggtgacaagcccaaacttgatggaatggtttgaaaggctaggggtggagatgtgcacatcagacatgtcattctcagcaagtatgcggctaaacaaaagtagtgaaagcttcgaatggggtagccgcagtggtatgtctggtgttctggcgcagaagagcaatttgcttagccccagattctggctcgtggtccatgagatattcaagttcaagaatcacgccctcaagtacctggaggaccacagaagtggtcctaaccgcaatgaaactttggggcaattcattctatcacatagatattcgcagctcttccaggatgcctaccttattccaatgtgtgcatgcatttggcccagtccgtcacacgaaatcctgggcttccctgctctctttgttctttcatttttccgcgacaatcagctacttgagattttgagtggctcaaaatggcttacggtcaaaggtggctcggggtcctacgtgaacaagataagggaagaattggagagtaatggttgtcagatcaagattggctgtgaagtcaactctatttcaaagtcgaacgatggataccaaattttagaggttgatggttcggtggagacgtacgataggatcataataggtattaatgcacatgatgcactaaaagtattaggagctgaagcaacaaatgaggaactgaagaatctaggagctttccattttatccggagtatcgcgtacctccactctgatgaaagtctgatgccgcgtaattcctctgcatggagcgctaggaacttcttggggacaacaagcagtggtgtctgtgttacctcctggctaaatatacttgagaacattgaatctgccgggcctctacttgtgacacttaaccctcctcgtgttcccaatcatgtattgcttaaatgtcatattagccatccaattccttccattgctgctgcaaaggctaatcttcagctcaacagcattcaaggaaagaggggcatctggttctgtggctcatatcaaggctatggataccatgaggacagtgttaaggctgggaaagcagcagctttaggattgcttggaaggaaatgtgaccttttgtctaacccaaaaccgatggtctcatcgtggacagaggcgggcgcacgtcttcttgtagcaagaagcctagaccaatacataaccattggtaacttctgtatactcgaagaaggaggcactacattcagttttggtaaagcatgcgaaaaatgtcatgtaaaatctgcgatacgcgttcacgatccccagttctattggaaggctgcaacagaaggagaccttggctttgcatctgcctacatcaatggccaaatctcatttgttgatcaccgaaaaggccttgtgaaccttgtacggatcatactggctaatagaggtgagttcaagaggttgagcagcactgctagtggcaatacaaggaaagcctggtggtcgccgttgcttggaattactggagtctcatttgcaaaatactttttgcgtcatgccttgcggaagaatagtgtatccaaagctcgtaaaaatatatctgaacactacgatctgagtaatgatttcttcgctctttatctggatccatcaatgacgtactcttctggcatttttaaggtggcggaggagagcttagaaacagcccaactacgcaaacttgacagtctcattaacaaggctaaggtggagccagggcaccatgttcttgacattggttgtggttggggcactttagcaatacggttggtgaagcaaaccggttgcaagtacacaggaatcacattatctgaggagcaactgaaatacgcgaagagaaaggtgaaagaatctgggttagaggaccgcataactttgctcctttgcgattaccgtcaactaccggcaggcgataagtttgacaggattataagctgtgaaatgattgaacatgttgggcatgagtacatggatgatttcttcgggtgctgcgagtatcatttggcagagcatggcctacttgtcctccagtccatcgcgctcccagaagaattgtatgacaaaatgaggatgcggcccgagtttctcaagacatatatcttccccggtggctgcctaccttctctaggccggattgtgtctgccatgtctaatgcatcaaggctcaacattcagcaccttgagaatattggggaccactactacactaccctaatgaactggagggacaacttcgtggccaacagagagtaaatacaatatataccaccacaaactcaagctaacgcctcatctatatataaaagcttctgcgcttggatttgacgacaaattcatccgtacctgggagtattatttaagttacgctgcggctttgttcaaatcacgcacagctatagattaccagatagtgtttgctcggccaggcgattcaaagctaccaagctatgttgccattgcataaaataaatggataggatcgagatgatgctgtgttatgcgtgtgtgtgtgtgagagagagaaatttattcagtcatgtacgtgcatgtgtgttggagagcagcagcaggccagctgctgcatgctgtgtggcttggatagatgcatgcgtgtggtatatagtactactagaagtctgcatgcatatgtctgctagcggtgctttcatttgcactcgagtcgctccacgtaagaggtgaaataatagtggttaaggcatctgatcgagtgcttggcaaaaacatgatgttaagttgacaacttgtaataatattacttaaatatgtagagaattgttcttttaaataaaaaagaagaggcgctaatgtgaagagtgatgt

SEQ ID NO: 23946 - DNA, 1388 bp, Zea Mays
ccactccaccagtccacctgcatcctccctctctctctcccgctcccgtgctctctccctctccccaggatccgaattgccagcgcaccagtcgagctcgcgggacctcgccggcgccggcgatggcctcctcccttttggccggacggggagggggccaccaccacaactggggggagacgcgcgccccgctcgagcccataccccccaaccctagtcccagccagccccacccgcgcgccgacgggtccaagtccaagccgcgggcggcggccggctacgtgaagttccgcccggcgtccctgggccaccgcgaggcccgcgcgctccgggaccgcctcgcggtggagctcggccaggtccgcgccctcctctcccgcatcgacacctggcagcagcagggcccgccgccgcgcgcggtgctccgcggggcgatgcggaagcggtgcggccagatcctcagcaggctgcgcaaggacaagcgcagcgtgtggttcaacgcgcccgtcgaggtggagcgcctcggcctccacgactaccatgccgtcatcaagcgccccatggatctcggcaccgtcaaggagggcctcgccgccgggaggagagtgaggaacctgtgaagagcactacagtggctgagcaggtggatgagtatgttgatattggggatgaaatgccagcagccacttaccaatccatggagatcgagaaggacgctgaaggtacgactggctctggtggttctggcagtggctcttcatcgtccagtggtatgatcaagctggcattgtgtagtccttcaatagttccaaaatttcttcagggtgcggactttttacatttacaggttctgagtcgaggagctcaggggacagtgcctcaggagctggcaatgctcattctttgacttaggggaggttggtaacaataggatttgaaaatctgaatgatccgagttcgtgtgcaggtaattgtaagtgtgtagctgtttctgagacatgggtgtctgcttaggctttgattacgttagtagtagataacaaactggctttgtgggtgtctgacagcagtacagcaccatgtgtatgtaagctggaggtggaaggtactggtgtgttaaaagtagctgatcgaccttctcgtatgaagggggccagggctagtgtctgtgttcttaatggtagggttgatcgaccttctcgtaattgatgctttgtgcatgacattaaagtatggttttataagtaacaatgcagtatcatttgttgggtgatgacttttgatgtaagagttatttctgcattttggataggattacgcaagataaatttcaacgaccatgcaaatttgtgttgactgttgagtttgttctggtggtgttgcttgat

SEQ ID NO: 23947 - DNA, 977 bp, Zea Mays
gtagacccgtccctgtctccaacttcagagcatccaatcgctcaacagcgccactgatgagcctctgtcgtcgtcgtcatcagtgaaccaggcgaggcgacgatcggacccgggtcgtaagcggtaagcccaccggctcaacagcaggctgcagatccccccaccccccacgcaactccatctcctctccgcctccacctgcacccatcgagcaccgaacggcggcggcatggaggctggcggcgaggagttcgcgatcggcgtggtgatctccgcgaagaccaccctgggggaggagttcgagggccagatcgtcgccttcgaccgcccctccaacctcctcgttatccaggagggcgtgggtagggcggagaggggggagcggaggaacgtgagggtcctcaaagcgaactacatccgggagttctcggtggtcagtaagggtgacgaccctctcgatcctgccagctgcatgctggacctcaactccatttatgcccgggaggatgctgcactcagagattgaagctgagagaattggtgttggtgtcaccccagaagctcaaagtatatttgatgcgctgtccaagacgcttccggttcagtgggacaagactgacattgtcgtaatgaaggaggttcgtgtacgcagtccgtacctgcctgaaaatgttaatggaggaacagctgcagcaaatgaacgcgttaagaaagtgattgactttgaaaggaaaagattacattcacgtgtacctggccaattctcttgattaaaaggcttgactattttttacattagcctcgtgttgtatttctaatactgcatccagttttcttattctcatcgatgcggttttctataaaatgtttcagcaaaaatctgtcgtaataatcacatcaactagctagatctgtactgtttggtagttattcagatttttataaaaatattttggatccaaataaatgtttaggag

SEQ ID NO: 23948 - DNA, 2754 bp, Zea Mays
cacctttaaccatttcatgcataatatgtaatcctgagggtaagtacgaagctttggataagtatggaaaggatctgacagctatggcacgtcaagggaagcttgatccagttattggaagagatgatgagattcgaagatgtatacaaattttatcacgaagaacaaagaacaatccagttctaattggtgaacctggtgtagggaaaacggctatagctgaaggactagctcagaggattgttcaaggagatgtcccacaagctctgacaaaccggcgactaattgcacttgatatgggtgcattgattgctggtgcaaaatatcgtggagagtttgaggatagacttaaggctgttctcaaagaagttacagattctgatgggcagaccattcttttcattgatgagattcacacagttgttggagcaggtgccacaaatggtgcaatggatgctggtaatcttctcaaaccaatgcttgggagaggagagctacggtgcattggtgcaacaacccttgatgaataccgcaaatatattgagaaagatccagcactagagcggcgcttccaacaagtttatgttgatcagccttcagttgaagatacaatttcaatactccgaggactaagagagagatatgagttgcaccatggtgtacgaatatctgacagtgcccttgtagctgcagctgttctttcagaccgttatatcagtggacgattcttgcctgacaaagctattgatctggttgatgaatcagccgccaaattaaaaatggagataacatcaaaacctactgctctggatgagatcgatcgtgctgtcctaaagattgaaatggagcgtctctcacttacaaatgatacagacaaagcatcaaaggacagactatcccgtcttgaagcagaactatcactcttgaaggataaacaacgtcagttgactgagaagtgggagcacgagaaatcagtgatgactaaaattcaatctatcaaagaagagattgacagggtaaatgtggagatacagcaggcagaacgtgagtacgatcttaatcgagctgctgaactgaaatatggcagcctgaatgccttgcagcgccagcttcaaacgacagagaaggagcttgatgaatatcagagttctgggaaatccatgctaagggaagaggtgacccaagacgatattgcagaaatagtgagcaggtggacaggcattccagtttctaaactaaagcaatctgacagggagaaattgctgtatctggaggaagagctgcacaagcgagttgttggtcaggatcctgctgtaaaagcagttgcagaggccattcagagatccagagctggattatctgacccaaaccgtcctattgccagtttcatgttcatgggacctacaggagttggcaagacagagttagcgaaagcccttgcttcctttatgttcaacactgaggaagctgttgtcaggattgacatgagcgagtacatggagaagcattcagtctcgaggttgattggtgctccaccaggttatgttgggtatgaagagggtggtcaactgacagaggctgttcgccgtaggccatattcggttgtcttgtttgatgagattgagaaagctcatttggatgtcttcaatgtcttccttcaaatattggacgatggtagggttactgattctcaaggccggaaagtgagcttcaccaactccatcattatcatgacgtccaacgttgggtcacagtatatactaaacatggatgaagaagatggatcatctgattcagcctatgagaacataaagaggagggtgatggatgctgcaagatcggtgttccgtccagagttcatgaatcgtgtagatgagtacattgttttcaagcctctcgagagagaacagatcaacagcattgtcaaattacagcttgcaagagtacagaagaggattgcagatcgcaaaataaagctcgatgtctcgcctggagccattgaattcttgggaagcctcgggtatgacccgaattatggcgcgaggcctgtgaagagagtgattcaacagtatgtggagaacgaactcgcaaagggcatcctcagaggtgatttcaaggacgaggacagcatcttcgtggacacccaggttacggtgccctccaatggccagcttccgctgcgaaagctagtttttcagaaagtgggtgagcaatcgaagcctgctgctgaaggcgagaagttcttgccggctgtttgattggagtacggttgcagttttgcagatcgtgagcaataaaatgtacatataagggtgacagactggtattccctttggcttagaagagcattacagccacaatttgttctacgatacacgtagcttaaggttacgtcgagcaacgaattttgattttttttttctgccgtttttttttccttttcagtggaagtgtattcgattttgatgtcctccgacgtaactgatgcaaactaacaagaaacaggtatccagttggaactccctttgccaattgatgtgagtgtttacaggcaacttgttggtgaccgtcaatcgctgacattacaatcagctgcggtggcgaaccagaatataaagaggtgactaaatagtactggctctggctcagtatacggcggcgagcgtgctcttctagttcaaacatcaagaaatatatttgattctctctatcaacactaacattattgtatcaatatatatttaaagagaaaat

SEQ ID NO: 23949 - DNA, 729 bp, Zea Mays
ccgaagcagcagcactggagccaactcaaagccctcccatctctgcagaagatggaaccgtggatggagggagcattcctgcggcggatggagcagcgggcctaactgcagagttttgaagctttgaaccccagggcggttactgttgtcgtagaccccatatagagtgtgaaggggaaagtagttattgatgtattccgcctaattaatcctcagaccatgatgcttggccaggagccacggcagacgacatcaaaggtcgggcacctaaataactcatcgattcaggctcttatccatgggctgaacagacactactaatttgcaatcaattaccgcaaaaatgagctcgagaagaaaatgttgttgaacttgcacaaaaagaaatggatagatgggctaattttgaagaggtttgacactcactcaaaaaaccaacgagcaaactgtccaggttccatccgtcttgtatgggaatgaccattgagcaagccaaaaaattacatgtgctcggattgtgctaaagaaaatggtgcaaagagaccctcaaactcatacccagtttcaccaaactctgattctaagaattggtagttttgcctgcatttccactcccaaattatatcatgagcagtgcttagttttgggcggtcgattacaagtgctctttatggaagcataggtccaaatgacttctttgttcagctgtataccatctagacattggaa

SEQ ID NO: 23950 - DNA, 642 bp, Zea Mays
ggcccggcccaaggtccaactacgagctttttaactgcaacaacttaaatatacgctattggagctggaattaccgcggctgctggcaccagacttgccctccaatggatcctcgttaagggatttagattgtactcattccaattaccagacactaacgctcccggtattgttatttattgtcactacctccccgtgtcaggattgggtaatttgcgcgcctgctgccttccttggatgtggtagccatttctcaggctccctctctggaatcgaaccctaattctccgtcacccgtcaccaccatggtaggcccctatcctaccatcgaaagttgatagggcagaaatttgaatgatgtgtcgccggcacgaaggccgtgcgatccgtcaagttatcatgaatcatcggatcggcgggcagagcccgcgtcagccttttatctaataaatgcgcccctcccggaagtcggggtttgttgcacgtattagctctagaattactacggttatccgagtagcacgtaccatcaaacaaactataactgatttaatgagccattcgcagtttcacagttcgaattagttcatacttgcacatgcatggcttaatctttgagacaagcatatgactactggcagg

SEQ ID NO: 23951 - DNA, 2295 bp, Zea Mays
aaccccgcgctccacttacgtgactcgcgcgcgacacgcgagcaggaggttgagacgaagacccgccgccaccggggatggcccaagcgccgccgcgacctagggagcgaggatgaggagctcgaggaggtgcgccgcatgcagaggattcctgcaaggaggagaacatggaggtggtgcccgtagtagtaggggaaccgatcaagagcactggcgaggggaagaaatagaagaagcactatgcttccttggagtaccacgtcaacagcttggagctgcttgcattgaccacagaggcacaccggagcatccggcgaggacctgcacgcttgaaaccgacgacgaggccatgctggggaattgcatattgtgtcaagggtggtccagaaaaagagctaaaagcaatgcagtacttggagagaagagagtgtgagtatgaccagaagatatccattgatttctacaaggaaggagatcccttgaaaccagctgtgatgggcgtcttagtgttcgtttccactccagatccaattggcaacaagtactatcttggccctgctcctttgcagaatatggcaaggccacgaagatgattcgatcatagagcttgcaaacaaggtgaggaaggtgctcaacagaacaaaggagaccaaaatcactgcgatgcagggcgcgtgaactcttctactacctcaagggtaagcaggtggactatggcgaggagcacagcaaggcttgcggccacaacaggtttgggagaatatatcacacaggtcactatcctgtttgttatgagcacaacccagtgcattttgtggggcactctgctggcgcgcaggttgtgagggtgctgcatcagatgcttgccgacaaggagaccgtggaggtggttctggagggagcatctttataagggctgcatcgataagctagatgtgatgatgagaaatcacttcgtatgtctcaaatgagcttggcgaagagatttggctaatccagatcttttgttgcctccactctgatggaatatggttttggatcctgaaggagaaagcgggtcctaagggaggaagcagagcaattggagctcgaactggagatgcatagagagttaagggagtagatgctgcaactcttgtggcctacgctcgagctgaagccagattagtgatgaggggggcagttgtccttgctgctaagcatgcaaaaacaatggtcgggaagccattgttgtatggaataggtaccctgttggtcatgtcgctgaggacactgtatggagtgggttgtgtttttggcgcacggtggttcctctacatgacaagcgtatctccatcgctgcaaattgagtttgtatatcgcaagttcttcggcgggtactgcaactgctcataccatgtggcacagaacacttctttgcatgaattccttgatagttatctacaattcaggcacaggtggtatgattctccaggatttttttgggactggtcattgcgggcatgttgagggtatttagttaagcaattttgttattattttagattgagtacatcagctcgctggttgcttacattttcttggtccctagagctactcacctcgctggttgtttacatttccttgttcctgggatccactttcctaaaatgaatctgttttaatcttgtaactggaactggtggatattttgatagggaaattacgatgattgatttctagatttgagtttcagattttttttgcttgtactggcctcttgagattggaagactggcgttgttgtgggcttgtggcataggcttcctttgtgggtctttttctcatctgatgtaaacaatattttttagtctggtaacggtgcaaaggcaaatggggcatcatcacatatctaggtcgtattttcgacagacagatataaaacggagtgggaatgcctcgattgatatcatgtccaagttcttcaagctgatggtggtagaggcctttgcccaagtgtattgtctatggcaagcccaagcaccagggtatcacccaactcaagttccagaggtacaagaggtgtgtcgctgagagagctatacgcaagcttggtggactgagggttcttatgttatgaaataaagtatgtcatgaactttttgcaatttgactgtattatcggactacgaatggagagtgataaaatgttgcatgctgttgtggactacatgattggttagtgatcaaaaaagggagtttgcatattaatgtattttatcatattaatcattattcatataatgttgttctctg

SEQ ID NO: 23952 - DNA, 1251 bp, Zea Mays
tccggtaaggcgacgaaatgtacggcgacacaatgaagggtcaccaacccaaaggggacaagggcaatagggacgactacaccttcaattcagaaggctcgcggatgtctggccgacatactttcccgaggaggccgaggtcgggctgtcagaatccgaccagaaggtccgcctcaccaccgccctggctgatttcttctccacgcccgagatggcggaagtccttcgctcacgggttgaagatgatggcaacgacatcttgtgtcttccaattgatttccagcagcttcaggagttacgcatgtttattgaagataaactcaatgagtccccaaaagaagccttgctttgcatgggagttgcagctcatctggctctgtgctcggacaaggacaacaaaaggaacaagataaatatcaggctttacaacacgggagcagctattgcattaaagaaactaaaagcagcctttattaagaaacttgtcacagtgcgtggtactgtgctcaaagtcagcactgtaaaacctcttgttttgtggttgaaattccgatgcatgaagtgccgtaaagaaataccccgtgtgttttgtgatggaaaattttctcctccaatgtcctgtaccatccagggatgcaagagcagaagctttatcccagatagatctagtgcacagctgatggattttcaaaaaataagaatacaggagcttgcaagcgctgacaaccatgaagaaggccgagtgccacgcacagtggagtgtgagcttacagaagatctcgttgattgttgcatccctggagaaattgtaacggtaactgcaattgtgaaagtgctcaacaaccatatggatgttggtggagggaagtccagaatcagcagtcaaggtttatactacctgtatctggaggcagtttcagtgagaaagttgaagtcccatgctgtttctgacaaagaaattcaagctagtggaatttgtcattctcagtcttctactgtaaatgatgattttgctgtcaaatataaagaaaaatatggcaccgatgtttttcgcagaatacttcaatccttttgtccctctatctatgggcatgaacttgtaaaagctggtatcacacttgctctttttggcggtgtgcagaagaactcaatggatcaaaacatggtccctgttcgaggagatattcatgttattgtagttgataaaatagtgttgcgcatggtgtgattatgctcttgcttaaaacacca

SEQ ID NO: 23953 - DNA, 1597 bp, Zea Mays
aggacacacagcgaagctaagcaaagcaaaccgaagccggtttcatatcgcaccccgcaccccgctcctccctcctcctgctccggctcccttcctccacagctcgaataaagtcccctcctcttccagtcttcctcctccgcgctccaatcttcccagcggcacggtttcggttcttgcagggtagcacggaggttccttcgttgggggttcttggtctgccttgagcgatttggtgcgccgcggattgttgtggggttgtgagttgtgactgcagagacaagggccgtgtggagagtcgagccatcgaggtcgaggaggagggaaaggaaaaggggggcgcatgggcggccagtggctgggggaggggatgccgtcgtccaacctgcagtgcttcttggactgcaccacccccaccgtcgagacgcacattctccccaagaagttttggtgaagataatggcatggatttatggagtgatgatgaggacaacgagaagatgtcgagatcctggagttccacctctgatgaatcattgttcaactgtgatgtgttatggtccaacaggaagcgtccagggcacctgtactttgagttctttgaagtaggttcaccttatggaagggttcctctcattgacaaggtttatgaactatcccagggctttcctggattgacatcactgaagagtgctgagctttcgcctgttagctggatgtcagttgcctggtaccctatataccacattccttaccagcgcagcgtgaaggacttatctgcatgcttcctaacttaccataccatttcctcctcgtttcaagatcacgggcttgagaccatgaccactgattgttgccatccagttgcaaacggcaaacaaaatggccacatggataagaagagcaacaccgtatcactgcctccatttggcctcgcagcacacaagatacaaggttccctctggaccaaccccatgacaggagaccgcagaaagatggacttcctcttcagtgcggcagactcctggctgaagcagcttggagtccagcatcatgacttcaacttcttcatcactcaccccatgtgaactgctgatccggagtggcttgcaaagaaccacatgggtacagtttgaagctagtgatattacctacccaccaccaacggggtagcaaaacgtttacagtacaatgcgctggtgaaatgagtctaacaatcgcaggatagatttatacttgagtttactgctgcagcgaataccaaacatgtcggcactcaaaaaggttttctgtttcttgtttcttggcagaaaaatgtaactgatctgtacagaagttttgcaactaatttggtatccaatgtgggggttgagctgttgcttgtgaactttagtaccctagagaatgttagttccaggatgaaactgtttacgcagactctagctggacctgaatctgtcgatgacaattagttatcttctacagtaaggcagttgtacgcacacattctcattcagtctgattggatacctgcacatgagcgcgcaggctcggacgaggctgactgtgtggatacaccagttttgagcgtttctgt

SEQ ID NO: 23954 - DNA, 1090 bp, Zea Mays
tgttattacaaggctatccagatattccaacaagaaggcatgtgctctttattcattaagttcctcttgcatatttctcaaccgctatcccaattttacattctttttccatcctagattcctgcggtaccttgttgaactgctgcatctgcctgcttattgcttagtggactcagatccttatggtttcgacattctggctacctataaatttggttccttggtaggcatgatttatctgatgctgctatgctcatctatatctattgtctatgaacttaacttccttagcagattcacaggttaaaattgcaggtaacgaatccatggacatgatcatatactgcacctttcgtcctaaatcaacagcttgtctggcctctttgcatttgaaagttctattactttatgaagtcccgttagcaataaggctgtgtattagagcagttcatttttcccctcaaaataaacatgattatgctcgttttgctcatcttatcacaagcatgaccaaaatatttctttttgctctttgaaacccaagattatgacatatttacttgtgttaacttaccaacctctgctacttgcgtaatttcattcttcaagcaattggcacatgatgcaaacttgttgcgtgtccctgatatacggtggcttggagttttcacatctgattttgaagaatattgccttccagactgctgcctacttcgtttgtcacctgaagataggaggaaagctgaaggcattcttgctaggtgctatttacacagggaagccccagaatggaggtcagagttggaagcaatgctgcaaaagggtgtcaagtttgagattgaggcactatccgcaaattccatttcctttttatcgcatgagtacattccccagaaaatcaaacaaggcatgcatttataagattggacattcttgtatccgtccaggatgtgtcatagagtacaatctttttttgtctgattatagttatatccggagacatatcatgtgcaaacactaaggatctgtttcagaacataacataatatttccttaatcctaagataatatcgtggtatttgagcataac

SEQ ID NO: 23955 - DNA, 3967 bp, Zea Mays
cagtcgaccgatccccatttcccctcctcatctgcgtttcatttcattcatcatcatcatccatggaggcttccacccccaccgctcgccgaggtggagcccccgccgactacgccgccatgtccctttctccctccccctccttctcccacacgccgaggagcggcgcctcgtcctccgcccacaagccccccaccacaagcaggcaccgggatcgggggcccctcctcttcaacggcaacagtaacagtaacagcagcatcgctgcccagcaggccgcacagctgcagcaaacctccaccaccacctcctccaaggggtcctccggatccggaggcgttaacatccaggtcctcctccgatgcaggccattgagcgatgaggaacgccgcgtcggcactcccgtggtggtcacttgcaatgaccagagacgcgaggtctccgttgcccagaacatcgctaacaagcaaattgatcgcacctttgcattcgacaaggtgctaggaccaaagtctcaacagcaggacgtcttcaaccatgctgttgtgccacttgtcagcgaggttttggacggttataattgcacaatatttgcatatggccaaactggaactggcaaaacatacacaatggaaggaggagggggcaaagcactgaatgctgacctcccgactgatgccggtgtcattccaagggctgttaagtgcatatttgacatcctcgaggcacagagtgcagagtacagcatgaaggtttcttttcttgagctgtacaatgaggagctcacagatcttctagccgcagaggaatcgaaattctccgatgacaagtccaagaagcctttggcactcatggaggatggcaagggtggagtctttgttagagggctcgaggaagagctagtttcttcagctgccgagatctacaggatactggagagaggctctgcaaagagaaaaactgctgaaactcttctcaacaagcaaagcagtcgctcacactctattttctctatcaccatccatattaaggaatgcacacctgagggtgaggaaatgatcaagtgcggaaagcttaatctcgttgaccttgctggctctgaaaacatatctcggtccggtgctagagacgggcgagctcgcgaagcaggagaaattaacaagagtctgcttacacttgggcgtgtcattaatactcttgtcgagcactctggacacataccatacagggatagcaagttaacaagattgttaagagattctttgggagggaagacaaagacttgcattatagcgaccatttcaccttcagtacactgccttgaggagacgctaagcaccctggattatgcgcatcgtgcaaagcacatcaagaataagccaggtcaatcagaagatgatgaaatctgcgctcatcaaagatttgtattttcaaatggaccgtctcaagcaagaactatatgctgcaagggagaaaaacggtgtttacattccgagggaacaatacatagcagatgaatctgaaaagaaggctatgtcagagaaactggatcgtttggagcttgttttggaatcaaaagataagcaattggaagagcttcatggactctatgaatctcagaaagtactgagtgcagatctaagtgatcaacttcagacattacagaaaagaatgaaggaaacagagtgcaccctagcggatcttgaaacgagatacatgaaggcaaatgatactattaaggagaagcaatatttgatagaaaatcttcttaaatcagaaaaagttcttgttggtgaagcacaaacactccgatcagagctggagaatacagcaggggatctacatgggctattttcaaaattagaaaggaaggaaaagatcgaagacaaaaatggaagtataattcaatatttccattcccagctgatccaggaaatgaatgtattgcatagaacagtctcaacctcggtctctcaacaggagagacaactaaaagcacttgaagaagagatgcagtcttttgtcacctcaaagggcaaggttgccggaggacttcaagagcatgtaagaaagctcaaagagagctttaattctaggatagcagaattgcatggttttgcaaatgaactcaagcataaatctatgttgagctttgaaaaccttaattcgcaagttaccacacacacatctagccttgaggattgcatgaaggacctattggttgatgccgatgaactactcattgcactacaaaatgggctttctcagcatgaagtgaactttgctacgtttattgagcaacagcatgaggggctctctagaaatttagagggaacaaagtttgtttcggcaactacaatgaacttcttcagaactatagattcacatgcattgggactcctaaagattttggaagaatcaaagatggaacatcaaaagcaactcttccagcttcagaagaagtttgaggccgttgttgctgacgaagagaagtacttgatggagaaggttgcagggttgtttgcagaatcaaacgctcgaaagaaaaatatggttcaagatgacatatgcagcctcaataggactgtttctgagagttcgaacaatttacaaaccgaaactaccaagctgcatgattttacatcttctatgaaagagcaatgggaaggctacatgaagaaaactgaagaggcattccagcaaaatgtatcatctattgaacagaaaagaggcttcttggcagggaattttcagcagtgcaaggaaaaggtagaatcatgctcagaacaatggattactgcacaaaatttggtgttggcacttggaagaaggaatgcagaagccatcggtttggttataagtgatgggaatgaggtgagcaaccaactgggtgcaagaatttcatctgctgttgctgctggatttgaagataatgacatttcaagcaaatcccttctaagttgtattgacgattcattgaagttggaccatggtattcgcgagaatgtgaaatccatcgtcatgacatccagagcacaacttcatgacttggaacatggtcactatgagatgacaaaagcaataacagggaatgccgataggtctctgggagaagattataaggtggatgaagcaacttgttcaacaccgagaaggcgtgagataaacattccggacagccaatcgatcattgagttggtaacccccctagaagatatcgtgaagtcattttgggacagcagaacaccgacgaagcctgctctaaatgcaaaagggaagcagcagttggtagggtcgacgacccctgaaacacaaagagcccctctttccgcaataaattaggagtttcattactgtatatactacaaacattcttgtgtggtcaagtaatgttgatcaagaatgttgagagaagttactggtaaaggagagctgtgtattctccagattcatccaatgtatgaacggaatcatacatccaatgtattttggagtggagtgcaactccaaaatacagagcaaatcgagcatgaccatttgtcaagttccgtgaaatggactcatttatttgtatctatgctgttgtgcacttgtttttaataccttcgtccttaaaccttcgtccgtgaaatggactcatttattcgcgagaatgtgaaatccatcgtcatgacatccagagcacaacttcatgacttggaacatggtcactatgagatgacaaaagcaataacagggaatgccgataggtctctgggagaagattataaggttagcgatacttatcgtctaaaagaagaaggctaagtaggaaaaagtatgatggaatgacgaagggaatgtaaaaaaggacattgagcaggacatttcaagtacatatacaaagacatgctatatacaattttacgttcaagtacatatacaaagacacgctatgtatttccttgatttttcatctattgtcaat

SEQ ID NO: 23956 - DNA, 1818 bp, Zea Mays
ccgaaaaacaagaaccatcgtacgggtgacgtggccaacacttccgtttttgttccggccaggcggctcgtgtccccgcagtcggcaggagcgcggacgcagatccgacggcctaggggcactccggggaggccacgcaacgcgcgcggcggcaggcaagaactccgaagtcggcacggccgcacggccgctacgatacggcgccctcacaattgggccgttataaaacgtcacaggaggaggagataggcacacggcgtgccgcggtgggcgaccttttttgcaccgggagataaatcgacagcaccctgacctcaagtcctcaacccgcaggccgcagctgctcccgcccgccgcgcaagcggccaagcgccgccggttcttctcgagcaattctcataaatcattgtcctcataacttgtaatgggtggaagccagtatgatgatgactgggtgttgcccagtgccgatatcactcttgttctggttgggaaacttggctatggcaagagtgcaactggaaatagcatccttggacgggaagcatttgtatcagaatattcacatgccagtgttactaatacttgtcagttgggaagcactaccctgaaggacggccgcaccatcaatgttattgatacaccagggttatttgatatgagcattacatcggacgaggctggtaaagagattgttaaatgcatgaacatggctaaagatgggatacatgcagttctgatggttttttctgccacatctcggttttctcgagaggacgcaagtacagttgagaccattaaagtcttctttggtgaaaggattgtcgaccacatgattttagtcttcacttatggagatttagttggtgaatctaagttgaagaaaatgttaaataatgcgccagagtatttgcagaatgttgttgagctatgccaaaacagagtggttgtcttcgataacgtgactgaagaccgaaggctccaagcgcagcaacttgacaaattgctcgatgtagtggattcagtttgtgcaaaaaatggaggaaaaccattttcagatcaaatgttcactagcatcaaggaggtgcatgatagagaaaaagaggtgcatacctcgggatattcagatgagcagatatctgaattgaaaaaggagattcatagaactagggatgaacagcttgcgcacataaccaacatggtcgaggaaaagttaaactgcactgtggagaagttgcaacagcagctcatggaagaacagaacgcaaggctggaagctgagaaggtggcgtacgaagctaggctgaaatcagaagcggagatccagaagctcaaggagagcctcaagaaagctcaaatggaaaatgatgagttccggaggatggcgcagagccagggcagtaaatgtgctatcctataggcattagtacttgctagaaattggtggagctatcgtgctgacgcgtctcttgtacgtagtactttctctgttccaaaaatatatagttcaatacaccttagtagagatgactacgagagtatccaaacaagacctcgtcggacatgttagcctgaagcttgcttatggacatattggatatagtttttgggtgagaacttttgaacaacttccttgtttttttctctcatgttctaatgcatcttttctctagctgtatgcgcacaacattggagttgttccccaccaaatagaagcattagggatcatccgacaaagaaaacgagtatcctctttctcactagaattatcatgacgaacagcaaaaggatgaataacaccgtcttcgtcttcattgc

SEQ ID NO: 23957 - DNA, 425 bp, Zea Mays
ttgaaattataacttcaatatacaataagggggaataaattggacttactccattaaaaaaacatgtccatccttgatagacaagtcagtttttttcctgaaagccccaggagggcgtagaggcttgtcctcaccaggtaatttctgtgcttttggccataggtacacttcagtgcgaacagcatgcacaatggagtttggtcgcacattttgcattgctaacgagatgtcatcctgaagctctttcccagaacagaacaatttgatcttctcagaaggcttcaattctgcaaaaagctaaggtggtgagtgttagaatatgctatacataggctacaaacttagttgtccaagatcctcttgggctagaatagaaaccgactcggattagaggttagagataaaacagaacaggactgcatgca

SEQ ID NO: 23958 - DNA, 2171 bp, Zea Mays
atgggaatttgatcgagaaagaaagggaaaggtagagatagtggggacaatcgatttaattgtagctggaacatttctaaaggtattagtaggtgacttgctgcagcaaacttgaacacacaagcaacaaacatatgcttcaggtccttgatgctaccaacaggtgaaaaaaatgcagaatggactacttagagatagctacactatcgatgcatctacatcattttggactatatgggacaccatcagtaatgaaattcagtttctgactgaactaaacggtggtggtttgaatcatcgtggttcactggttttcacaatattgggattcttggcaaccatgaggacattatgagattcttggctaccatgaggacaaattgttcaattacattttctacgtctatttcgaagcgtcgatggcggatgtccgcacacaaaatgccttgaagggtctggaggaagttgcaagtttcctgcgtgtccttggctactatccgtgcaacacaataacgatatgagctgttgcgtcacactgtctatcttggttgctccgccttggaagaccagagtgggagatgttgaataaaaggttcctcttcccttgtttggaagagattatggtcattatacactcccgactgaatatgaacactcttgaaatacattgcgaagctgcagaggatcgtcattagaattgcatgaaggttgtatgcgaaaccactggattgaacaattcgagaaatctacagaggaagtcgtgaacagctatgcacaagattgagtctaaggtataggcatctgatggaggacatgttgtctctactcccgcatatgaaggacaaccaggacaaggtcgagtccaagcagagcaaggggaacacgccgagcaagctgcttgagctcaggagttgctccagctgcctttcttcgagattctggctgttgaccatgcgtcggatgagggcgcgattgtaccaattggttcgcagcatgatgcacatttgaccaaactgatgaatatggaaaatgaccaacctttgttgccggcaccaccagttaatctggaatcagccatccttgagcaaaatgcaaatatggtggctctcaaggaaggctgttctgtgggaagtgagctgccacctggtctgcagggtaattttggtggtaacaaagcaaacacgtgtacttcagcactgcattctattgatgaaggtgaagaaataacttgtggtttcattaaacatgagaggagttatgatttacagaatttgactatggataagtcaattcaagtgtctaatgaaacaaagtacaagtttcttgctcataagcccagagtaggctgtgaaactgctattcaaaactgtgagttggcttctgcattgccagatacagaatttcatggccctgttgcaaccatttcaactacgggtcaatcagaaggatctgacactgagattaatgttccaaactattctgacctagaagcactgatacttgatctggacctgattccatgggatcaagaatctgacttcatccaaccagaagtttcaaggtttcagtatcctgaaagcaggaaggatttgataagattagagaaaggtgtctgctcttatatgaaccgatctatcatgtctaagggtgctttcgcaattctttatggccaacgcacgaaatactacataagagagcccgaggtaagtcttgggagagaaacagaagaagtacatgttgatatcgatttgagtaaagaaggaaaggcaaacaaaatatcccgtcgacaggcagttattaagatggacgatggtggatctttctacataaacaatactgggaagttttcaattttcgtgaatagcaaagaagtaccctgcagtaaacgtataaacttaatgtcagactcattaattgagataaggaacctgaaattcatttttcacgtgaaccacgaggctgcaaggcaatacatagttcgaaaaaggagaggaagctcccaaggcgggatcacggcgtttgattggagtcagaacccatgagtagttaacgttatgatcaaggttgtttataatctgcgatagctacctctctcttcaagaaagtattggataagcgtaaagttatttataatttccgatagctaatatttctctcttccagttagcact

SEQ ID NO: 23959 - DNA, 1572 bp, Zea Mays
acacacaaacacatcagcattcagcaatagctaatcgagcatcgtcgccttagctcctctcctctcctctccgtcgtcgtggaacttctctccgccggctgtcatatatataaaggagaagaagagaacagcaactctagctagccggccggcctccgtcgtcgccggcgtcgtcgactagctagctaactctcgatctccagttcctgcccccgcgccccacgcccggccgtcgtcgtcagcaatggcaggaggcttcttctccatggctcacccggccgtcaccctctccggcatcgcaggaaacatcatctccttcctggtgttccttgcaccagtggcgacgttcctgcaggtgtaccggaagaagtcgacgggcgggttcagctcggtgccgtacgtggtggcgctcttcagctcggtgctgtggatcttctacgcgctggtgaagaccaactcgaggccgctgctgaccatcaacgccttcggctgcggcgtggaggcggcctacatagtcctctacctggcgtacgcgccgcggcgggcgcgcctgcggactctggcctacttcttcctgctggacgtggcggccttcgcgctcgtcgtcgccgtcacgctcttcgccgtccgcgagccccaccgcgtcaagttcctcggcagcgtctgcctcgccttctccatggccgtcttcgtcgcgccgctcagcatcatcgtcaaggtggtcaagaccaagagcgtcgagttcctgcccatcagcctctccttctgcctcacgctcagcgccgtcgcctggttctgctacggcctcttcaccaaggacccctttgtcatgctgcgtccagatgggcctctacttctggtaccgcaagccccgcccggcggccaagaacaacgccgtgctgccgacgaccacggacggcgccaacgcggtgcaggtgcaggggcaggtcatcgagctggcgcccaacacggtggccatcctgtcggtgagccccatccccatcgtgggcgtgcacaagatcgaggtggtggagcagcagcacaaggaggccgccgtggccgccgagacccgccggatggccgccgcaaacccggacggcgccatgccggaggtcatcgagatcgtccccgccgccgccgcggtgtgacccaacgccaatcaccatgcaccgtacacaccctgctagcttcttattagctagctcggatgacgtacgacagtttggtggcaagtggctggcagctcaagcatgcagatgcaggcatcgtcgtctgctagttgatcgtttagttggttaattgttggattattattgcgtgtctctctcgtgtgcgtagtcttgtcagttcagttcagttcagtgtcgaatcaagtagtagtagctgttgtttgcattggatctgacaatgcatgctaataattatggtggtgtgatggtcttggtcggtacgtgcgtagtcgtctacgtacgccgtgtcaacgtcgtagatctctacgggaagatgataagactgtaacatgcagggcatgcatctatttatacttaacatattctttgtgtgcttaatttt

SEQ ID NO: 23960 - DNA, 1612 bp, Zea Mays
caaattcccttctccctcacgtctctttctctccccaagccgccgcctccctgccgttccgtggagcaccaggccagtgccgttccgatggtcattccaagccagtgccattctcctttggccgtccctgctccagccgtgagctcacccaggccacggcctcgtcgaaccgcacagcccctgcgctccttccccagccgcgcttagccctatcctccctgctcgatctccttcgagccgtaacggctccctggcgtgtccggctccctgcccctctccatggcgtcgcccagctctagctcgccccccctctgatctgtgcgcaggggtttcttccatggcgagctcccctgcaaacttcatctagccgccggccgagtttctttggtggtcgcttacccccagcatcggccagagcttgctgtcattccccaacaaacatgtggttgtaggtgagagatttcagaagtctgttggacgaagaaaagagaagtgaaatttgtgcagcgcccgtcaggtgttaggtttaatagatattgtgtctaccgtgtgagggaatcgtgccagcttcctttgggtttgggactgggagctccatcgctctatggtatgaaccacgtgtgtttgtgacaccaatgtgtaggatccatatactctgtcctagattaattagcagtgtgtgaatgccacagcatactctgtcctagattaattagcagtgtgtgaatgccacagcggcggtgctcgcccgtgtctcagctgccttcaatggcccccttgcccgcgcagtcgtctttggggtccatattgatggtagtccctctttctttgtgtgttcacaagatgggtcggcagttttagtgtctcacacgcagtggccacgggatttttcaagtcacttggtcgtggaagggcttcttattgcagtcatagtgttccagctctccaggaagagctacaaaccaccaaagaagccactcactgaaaaggagattgatgagctatgtgatgagtgggagccagagctgctatgccctccaatcaaggagggggccacaatagatgctccaacattggaaagtgccgttggaccacatacgattgttgattgttgatggtaaagaagttgtgaactttgcatcagcatgaggtctggagtctagacacagcattgcaaactgaggtttaatcatcttagcaactacggtacgtgaccctgagcgcgtgattgttgcgaaacaacgaccacctcggtctacaccttaaagttcaagctctgcaaggtgaggtctgttcagtttggccagaaagtcatcccctacctgaacacctacgacgaccgcaccatccgctaccccgaccctctcatcaaggccaacgacaccatcaagatcgatctggagaccaacaagatcatggacttcatcaagttgtatttgccctttcatagacttcatcaagttatatacttagttaggctcaatgttagcacaaacagttgatgagcaagtttaaatttagagtacacttatgtatgagttattatttgacaatacttatttatgagatattgaatattatttatctatattatattaattatagtgttatt

SEQ ID NO: 23961 - DNA, 2932 bp, Zea Mays
caaatctcgagatccaatcgaagcgccccctcccgcattgccgtttccgaccgccaactctcccaaggctgctctgctcgcccaccggaattcccgccgcggagggtgctgtggtataagcttgctttaggattggagggctctggttggttgcctagacgccggcgatggcgtcgccggccggcggcgagtctccggcgaagcccgtcctcctgcacggcgacctcgacctctggatcctcgaggcgcgcctgctgcccaacatggacatgttctccgagcacgtgcgccgctgcttcgccgcatgccgcccgccctcctcctgcgggaccaagcacccgccgcccgccgccgctggccgccgccaccaccaccaccaccggaacatcatcaccagcgatccctacgtcacgctgtccgtgtccggcgccgtcgtggcgcgcaccgccgtcatccccaactcccaggaccccgtctgggaggagcgcttcgccgtgccgctcgcgcaccgcgccgccgacctcgagttccaggtcaaggacaacgacaccttcggcgcgcagctcatcggcaccgtcgccgtccccgccgaccgcgttgtctcgggcgacgaggtcgaggactggttccccgtcataggcaccaacggcaagccgtacaagcccgacaccgcgctgcgcctccgcttcaagttccagcccatcgccgacaacccggcctaccgccacggcatcgccggcgaccccgaccacaggggcatccaggactcctacttcccgctccgccacggcggccaactcacgctgtaccaggacgcgcacgtcagggaaggggacctgccagagattgagctcgacaacggcaagacgttccagcacaacgcgtgctgggaggacatctgccacgccatcctagaggcgcaccacatgatatatatcgtcggctggtcggtgtacgacaaggtgcgcctcgtgcgcgaaccatctccgtcgcggccattgcccgagggtggagaccttacgcttggggacctgctcaagttcaagtcgcaggagggtgtcagagtgtgcctgcttgtgtgggatgataagacttcacatgacaagttcttcatcaagacgggtggggttatggcaactcatgatgaagaaactcggaagtttttcaaacattcctcagtcatctgtgttctctctcctcgatatgctagcaataagctcagcattttcaaacagcaggttgttgggactttgtttacacaccatcaaaagtgtgtgctggttgatacacaagccaggggaaacaagcggaaaattacagctttcattgggggcctagatctttgtgatggccgctatgacacacctgaacacaggcttttcaaagatcttgacacagtattccaaaatgattaccataaccctacattttcggcaggtgcaaagggtcccaggcaaccatggcatgatttacattgcaggattgatggccctgctgcctatgatgtcttgacaaattttgagcaaaggtggcgaaaggcaacaaaatggcgtgaccggtttagaagagtatctcattggaaagacgatgctttaattaaactggagcgtatctcatggattttaagcccttcacccaatgttccaaataatcatcctagtttgtgggtttcaaaagaagaggatcatgaaaattggcacgttcaggtattcaggtcaattgactctggttccctaaaaggatttcctagtgattgcaaagcagcttcaaagctgaatcttgtgtgccgaaagaacctggtaattgataagagcatccacactgcatatgtccgagcaatcagatctgcacaacatttcatttatattgagaaccagtactttcttggttcttcatatgcttggccatcctatgtgaattcaggtgctgataatctggtaccaatagaattggccctcaaaattgcaagtaagattaaagcgggagaacgctttgcagtgtatgtagtgataccaatgtggccggaaggagtccctactgcagcatctgtgcaagaaatccttttctttcagatgagctcaaggcaacggacaataaggatatgcaccctgaagattacttgaacttcttttgtcttggaaatcgggaagaaccaccatctaatggtagtccagaatcagagaaatctacagataaaagtgcagcggccttagcttcgaaatatcgacggttcatgatctatgttcacgcaaaagggatgattgtggatgatgaatatgtcattctgggttcagcaaacatcaaccagagatccctggctggttctagagatactgagatcgcaatgggtgcataccagcctcattatgcatggtctacaaagaatggacatcctcacggccaggtatatgggtacagaacgtctctgtgggcagagcaccttggaacggttgatgatcgcttcaaggatccttcgagtttggagtgtgtaaggtttgtgaatcaaatagctgtagagaactggcaaaggtttacagcagaagaaatgagtacgttacaagggcacctcctcaagtacccagttaaggtggaggctgatggtaagatcagcccactgtcagaccaggagtgctttcctgatgttgggggcaagattctgggagctccaacttcacttcctgattcactgactatgtagtgttattacataaaaaaacttctttcagagttgaactttgtaattgtctaaaattggcgggtttatcgcagaacttgtactatatctgtaatcatcgatagttggcgcagggaaagttcaagatgttagtggtgctaagttttcccagcgtttgtaaatgaaccatatgataggatcctagacaatgcttccatttccattatgattatacaacagttttcaacatttttgctc

SEQ ID NO: 23962 - DNA, 3278 bp, Zea Mays
cgtcctcgtctctcacagtcacagcatccttccttgcttctcgtctcgtcgcctctcggagatcagaaagagaacaccggacacctagcctgcgcccttgccttccctccgcgcgcgcgtgctatctatggcgatggaagacgtcgcgggtgcctcctcctcctcggtggcggccgccgcctccgaccccacgcacggctggcagacggtgtcgtaccccaagcgccaccgcaagcaggcgcatcagccaccccgcgccatggctcccgatctggcgctgcaggccaacggcaaaggctccggtgtcttcgacgccgtcgagaagcgctcccaggagcgccaccgcgcgctgcagcagcagctcgcatccagggcggccgacctcgacgacgcgcggatcgccccggtcacaggcggcgcttactccgacgactccgactccgacgaggccaccgccccgcgccaggtgggggaggtgaagaagcctaagaagcctaaaaagcctaaggtgacggtcgccgaggctgccgccctgatcgacgccgagaacctcgcagcgcacctcgtcgagatctcggtaacaccgcatcaaaacctctcctctccgtcgagttcctgcttgaaaatcagatcttgggtcgacggtccggatcgaaggttttgtccgtttcttagggatcggatctggatagggtttagcaatggatcttgctggacttcatgaaattccgacgaaatgctaggtcctacgggattttggatcaagttgaatcaaaattctatctgttttacctgaaagtcgaattttaggatgtaaagatgggatgtcggggagctttgggttttggtgctaggagtagatcctaccaaaggttggtacaccttctgctgtatgcatattctgattatttgttgtgtgcagtcatcatacgagaatcaacaggacattcaactcatgaggtttgctgattactttggccgggcatttgtagctgtaagcgcatcccaatttgcatgggcaaagatgttcaaggaatcaacagtgtctaagatggttgacgaggtttatgttttcatgttacattactgtgctgtagtcgcacgtagtgatgtactcgagattcatgcttggtgccaaaatttggaaaatccatgcattaatgtcttcggtttgagaaaccgttatgacacttttgtcgtatcttaacgaactgagagaaccaaccgagatcccactgtgccatattcctgaggctgtcatcaagactgcgagtgattggatcagtcaaagatcttatgatgccctgggagactttgttttgtggtgtatagatagcatcatgtctgaattgtcaggcccatcagcaggacctaagggttcaaagaaggttgcccaacagtctccaagggcccaggttgcaatctttgttgttcttgccatgactttaagaagaaagcctgatgtacttgtaaatgttatgccaaagataatgggaaacaataaatatcttggacaggaaaagcttcccatcattgtctggtttattgctcaggcatctcaaggtgacctagtgactggcatgttttgctgggctcattttctatttcccacgttatgtgcgaagccaagtgggaatccccttgcaagagatttggttttgcagttgcttgaaagaattttatctgtcaccaaagctcgttctatcttattgaatggtgctgttagaaagggggaacgcctagttccccctgtttcatttgacttgttcatgagagccacatttccggtttctggtgctcgggtgaaggctacagaaaggtttgaagtagcttatcgaacaatcaaggagttggctcttgccggttctcctggctctaaaactgtgaaacaagcatcacagcaacttttacctttgtgtgcaaaagcaatgcaagaaaacaatgcagagctcaccagggaggctgttgatgtgttcatttggtgcttgacacaaaatgcagagtcctacaagcagtgggaaagaatttatcctgaaaatactgaagccagtgttgctgtcctgagcaaaattgtgattgattggaaggatgtgtctcctaagctcagttctgaagctctcaaggcaacagtgaagaacttgaaggctaagaatgaggcagcgctggagtcagcaacagatgctggaaagcaggcatctatcaagaagcagacaagcactgcaagacttgagcaggggtcagagcagctgctcggaggccggcctggccctgccctgggtgtgctcgccactgtcgcagagtgctcagtggaacccgcggcacaaactacaaagggacctgactcgaatggcagctcgtcacctctcccacctgtcctccccagcgtctgcttccctcctcggccccgagccatggcgccctgcgcgtccccgtccgccctcgcgctctccgccagcacgcgggtcagcagcttcccactgacgctgcgcccgcggccgcggccggaggcgcgtgtgccgcgcgcgcccggcggcgcccagctccgcccggcgaccgcgtgctcttggccgcgccccttgctgcccgagctcgcgccggcgttccctcgtgccggcgcccgcagcgccggcagaccgcagccgctgttccggccccgcgcaatgatgacgacgtctcagatcgccagctgcgccttcaccgtgggcacggtcgccgtcctccccttctacacgctcatggtcgtcgcccccaacgccgacatcaccaaacgcacggtggagagcagcgccccctacgtcgccctaggcctcctctacgcctacctgctctacctgtcttggacccccgacacccttcgcgccatgttcgcgagcaagtactggctccccgagctgccgggcatcgtcaggatgttcgcgagcgagatgaccgtcgcctccgcatggatccacctcctagcagtcgatctcttcgcggcgaggcaggtctaccacgacggtctcaagaacaacatcgagaccaggcattcggtctcgctgtgcctgctcttctgcccggtcgggatcctggctcatgtggtaaccaaggtattggcaggggcagctggccgctcacattgatgattggaattgggtggttgtatctaggattcccgttttgtttagctggtggagtttatgagatctggatatgaataaagcttgttcaaggcactgattctttcaatgtggggtcaccttaaaggaaagaaattagttagacaaaaaaatagtttaaat

SEQ ID NO: 23963 - DNA, 2507 bp, Zea Mays
gcacgagagcggccaccaccatggcgacgcccaccgcgctctccacctcactcccctacctcccgccccgccgcgtcatctcattcccatccgccgccgccgtctccctccccgtcacctcccgccccgcccggctgcgggattcccgcctcgcggccgcggcaacctcggcctccgaggtcctcgagtccaccaacggcgccgtccccactgcggccaaggacggcgcgtggcgcgggtatgggagggagtacttccccctggctgccgtcgttgggcagatgggaggatggtttagctgatcaaatacagtatgactctgatggtaatgtcaaatccgagattgtcaaaacaccttttgtgcagattccacttggtgtgacggaggataggctcattggatcagttgatgttgaagcatctgtgagatcagggactactgtatttcaacctggtcttcttgctgaagcacatagaggtgttctttatgttgatgaaataaatctattggatgatggcataagcaatctacttctgaatgtcttgacggagggagttaacattgtggaaagagagggcattagctttcgccatccctgcaaaccacttctaattgctacttacaatccagaggaagggtctgtacgtgaacacttgcttgatcgtattgcaattaatttaagtgctgatcttccaatgagttttgatgaccgcgttgaagcagtggatattgcaacacggtttcaggagtctagcaaagaagttttcaaaatggtggaagaaaaaactgaaactgcaaaaactcagataatttttgcaagagagtatctgaaggatgttactattagcacagagcagctcaaatatcttgtcatggaagctatacgaggtggctgtcaggggcatcgtgctgagttgtatgctgctcgagttgcaaaatgtctagctgctatggaaggacgtgaaaaagtatttgtggatgacctcaagaaagctgtagagctagtcattctacctcgctccatcctatctgataatccacaggatcagcagcaagagcaaccacccccacccccgccaccaccacctccagaaaatcaagattcttcagaagaccaagatgaggaagacgaagaccaagaggatgatgaagaagaaaatgaacaacaagaccaacagatacctgaggagttcatatttgatgctgaaggtggtttagtagatgacaaacttcttttctttgcccagcaagcacagagacgacgtggaaaagctgggcgagcaaagaatgtcatcttctcagaagataggggccgttacataaagcctatgcttcctaagggtccagtaaggaggttagctgttgatgccacgcttagagcagctgcaccataccaaaaactgcgcagagagaaagaacgtgacaaaacaagaaaggtttttgttgaaaagactgacatgagagccaaaagaatggctcgaaaagcaggtcatatttgttgtggacgctagtggtagcatggctctgaatcgtatgcagaatgctaaaggtgcggcgttgaagttgcttgcagaaagctacaccagcagagatcaggtttcaattattccttttcgtggagattatgctgaggttttgcttccaccatcaagatctatagcaatggcccggaaacgtcttgagaagctaccatgtggtggtggttctcctttagctcatggcctaagtacagctgtcagagtgggtctgaatgctgaaaagagtggcgatgttgggcgtatcatgattgttgcaatcaccgatggaagagctaatgtatcactgaagagatccactgacccagaagctgctgctgcttcagatgcaccaagaccttcttctcaagaactgaaggacgagatacttgaggtggctggcaaaatatacaaggcaggaatgtcccttcttgtcatcgacactgagaacaagtttgtatccacgggatttgccaaggaaattgcaagggttgcccaggggaaatattattacctccctaatgcttcggatgctgtaatttctgctgccaccaagaccgccctgacagacttgaagagctcatgattttgcagcagcggcacccgttttctgtaccttttgataggggtggtgaaccttcattcatgcagtagtttttgtgtaggcctctacaatgacagggggaaacaaacccgagcatggcatcgtgtaaagtgttaaggtccaatggcctcctgtccacgtttggcgatgtaaatcctccgtaacatagcttgaaccattgagtgtcacgtagtgccatggctagcagttaaaagtaccatgcgtcatgaatgacggggtggacagtggtggttaaaaatggcagacccatcgtgtggctcgaataaggaggtagtcgcggtacgtgctagaaactgaaaggaaaaagtatataaccctctagcctttaggttttgacaatagaataaatgaataataatccctccaa

SEQ ID NO: 23964 - DNA, 2233 bp, Zea Mays
atcgaccaattcatccaatagtggatactttgtctccaagtctcaaaacccaattcgacccacttggaaccggccttgttccccgttggatccagcctaataaaattccccattccaacacacacagatctcgcatcccggcagtggcgacgaatctcgcggggcggaggtggtggcgcgacagaggcggtgtcgactccgacgaactcgcagccaccggtggatacgcaccagcagcaccggcgcactccaccgacgttcatatttaaggacttggtttggatagttctactcgtcaacaaaagtgattaaaaatggtggttcttgcagcttcaatcgtttcaaagtcggggaaagcacttgtttcaagacagtttgttgacatgtctcgcataagaattgaaggattacttgctgcgttcccgaaactggttggaactgggaaacagcacacttatgttgaaactgaaaatgtgcgttatgtttatcaacctattgaaggattatatcttctacttatcacaaacaagcagagcaatattcttgaagatctggacacattgaggcttctctccaagcttgtgcctgaatactccccttccttggatgaggacggtatttgtaaaacagcatttgagattatatttgcttttgatgaagccatctctcttgggaacaaggaaaatgtgacagtgcaacaagttaaacaatattgtgagatggagagccatgaagagaaggcacacaagctgatgatgcaagccaaaatcaacgaaaccaaggatctcatgaagaagagggctaatgaacttgacaaaatgaggatggaaagaggcaagcttgacaaaggaggatactcatcaatatctggtccacgcgtgattgaaaaaacgtttagtgacatgagcatcagtggttctggatttggtagtggttctggattaggtggactgagcactgatatggactcatttgccagcaagcccaaaggtcgtccatctacagcagctactgcacctggtaaaggttttggtatgaaattaggcaagacacagaagacaaatcaattcctcgagtctttgaaagctgaaggagaagtcattttggaggatgtacaaccaagtgcagtttctacaagatcatctgctcttccaccaagtgaccctgtcacagtgaacatagaagagaagctcaatgttgttgttaaaagagatggtggtattagtaactttgatgttcaaggaacacttgctcttcaggttcttaatgatactgatgggttcatccatttgcagattgaaagccaagatatgcctgggcttagcttcaaaacacacccaaatatcaataaggatttgtttaacagtcagcaaattttgggagcaaaagatccaaacaggccctttccgagtggtcaaaatgaaactcctctggtgaaatggagaatccaggggatggatgagtcatctttacctctgtcagcttctgagatgtttgatctgcacaacgttgtcatatctatacctctgccagcacttcgggaggctccgagtgttagacagatcgatggagagtggaagttcgactcaagaaactctgtgttggaatggtctattctccttatcgatcagtcgaatcgcagtggttccatggaatttgttgttcccccagctgacccatcatcgtttttccccatctccgttggattttctgcatcgagtactttcagtgatctgaaggttactggaattcttcctctgaaggaaggcaaccctcccaagttttctcagcgggctcgtttgctcactgctaactaccaagttgtttaacgcttgtaccgcgagtgttggtccacttgaatgctccaatagcagatgttattgccgtggacttatgcaagccatggcacgggagattattttgtgtttggaaaatttctttactatgcgcttctcattgttatagcatattgcacaaatgttgttctaatgtattgccaccagagaaataagtaatgttcttgcattttgttggcatgcattttgtacccgtctctttcctcctatgaggatgttgtcaggacagtgttatctcctgggcttggtgtaatgtgatcgtagcatctccacctgatcccttgtccctactgccactagtcaacttttggcaacagatccggtggtcttatttatcttattttctattttaaacttcgctctacaaacaatgtttt

SEQ ID NO: 23965 - DNA, 1677 bp, Zea Mays
ccgctcgatctcatccgtccgctggtaagccataagccaaagaccacaatagatctcgtctccctccgttcccctcctgtccgtcattttctcgtcacctacatatctccggctcgccgtcggcgtcgccgcctcctcctccttcgcccgctggaggcgcccatagcgacctcaccggtgggtttgctgaagtgacatcggccgaggtggaactggttggggggagtccatttcgggttcgagcagcctgagccggcgcgccggcagcgacggagtcgtgcagttgagttgagatggcaaacattccccactccttcgcaggggcctcgcctccgtccccctctccgatggctggcagcagcagcggccccgccccgggccaggcagccaaggacaagaagatggcgtccgcggaacagctggtcctggaactctgcgaccctgaactgcgcgagaacgctttacttgagctctccaagaaaagggagatttttcaagatcttgctccgctgctttggcactcatttggcacaattgctgcgttactccaggagattatatccatttacccgtcactatcaccccccacactgtcacctggagcatcaaaccgagtttgcaatgctcttgcacttctgcagtgtgttgcatcgcaccctgagaccaggatccttttcctaaatgctcatattccattgtacctgtaccctttcctcaacactaccagcaaaacgagaccttttgagtacctaaggcttactagcttgggggtcattggtgctcttgtcaaggtggcaactttcatcgtccaaaagattcttctagatgatgttgggctgcgctacatttgcgccactgctgagcgtttctttgccgtaggcagtgttttagcaaacatggttgtttcacttgctgatcagccctccacaaggctgctgaagcacatcattcgttgttacctccggctgtcagataaccctagggcttgtgctgcattgcagagctgccttccagacatgctcaaagatgggaccttcaataactgccttagggatgatccagcgacaaggcgctggctccaacagctcctgcacaatgtgactggcggaggcatgggaggtgctcctcaaccaggaatggatcccatgaacatgggaatgtgatgtgcattctagttgttgcaattcactgcaataacacatcacctctcagtgaattacaactagagaagatctggccactgtccagatgaaacttagtatggtgtagcctgactttctgccggggtaaaaataggaatgttgtttggtattgccataagctaagctgtagaaacaagatcggcaggcttctgttattgtgttcttgcaccggagctcttgtgcgttgacccttcagaacctgagaacaaaggaggaaacccccgtcccgtgaagctttgtcgcagtgccgatcgatcaagatcttgaattgcttcagatgatgccataagaaagcatactgaaaagaagtgtatgccgtgtgctatattttacgagtttatgggttgcttttgtctttctagtggcgtcgtgtaacaaagtccgctgttcttaatttgttcaggtaacaattaattaatccagcaatattttttcccaggttaccaataataatataaaaatatattctataaaa

SEQ ID NO: 23966 - DNA, 2121 bp, Zea Mays
attccacgggccaacgtgccacttcccccactcgtcttcgccagaaacccgctggcgctttggtctctgtcgtccaagttcccatctccggccaccaatagttccgacccgtaagcaccaacgccccatttgccactaccctaccgcgcaccggcaaagcgcagcgccaggccgcagcttgcaggggcaggcggcggcgggcagggcaaccgccactgcagccgggatccggcggccagcggcaaccggcggggggcaggcggtcgggacctggtgtcggtctacagccagacagcagcagcagcagcgtgaccctcaaaatcctagaccactaccgtatggtccactgctcctttgctggtgtcgtccactgctcctctgcaacgtcgtttgatctcctgtgcagtctgcacacgcgtgttgaaggagttgattcctggacagcacacgatagcacaatcctctactggttcattcctggactaccggtggtaatctgacctgctatatcgctttgcttattatctatattcatcaaagcatctatttgatcataatgttaaaagcgcgggcaagtttctagtgcttatcatttgccctccggtcaccccgttgtcgcgcgaagccgacgctatttcattccccgacaggaccggggctccgctgccgcctcttcgcccctatatggcggtcccgaggcctcaaatccgtgccctacgtcggggcacgctgcttctcttccttgtcccgctcatctactctgtgtccaggctgcaaccctgggctccagaaaagggtgtgtgcctgccacccccaaccgcgccgaagcggcctgaccatctcgtgctcggccccgccgccggacaggaccgccccgaccgcctacagtgccgaggacttagagctctgaacaagattggcatatcaagtgaagagaactattctggagaacatgtttcttttgctactgtattcacaacctacaattctgtctcagctggagatgacaatgttccatctgattctgtaactgttggaaacagttcttatagcaaaatagaaagatccatggccattctgaacactttcatcagtttcataaaggtatcaatgccaagaagcgacttgatcatattgactgatcctggttcaaaaatttcagtaaatcaagggactgctacactattgccagttgaaggaaactattctcgaggaaatttgatgcttcagagaataaagacatacattgcatttctggagcaaaagcttgtggaatttgataggatggagaggttgaatcattttgttttaactgattccgatatagcagtggttggtgatcttggacatatattcaaaaaatatcctcattttcatctggctgttacttttcgtaataacaaagggcaaccgttgaattctgggtttgttgcggtaaggggaaccagggatggcatcactaacgctgtggaattcttgaaacaagtccttggaacttacagtttaagatatatgaaggcttctcgtatgcttggtgaccaattagcacttgcatgggttgtcaagtctcatctaccatcggctttcggaaaattttctaagaatgaagcatttactggtgaagttaatggaacatctgttctcttcttgccttgtgctgtttataattggaccccgcctgagggtgctggacagtttcatggtgtacccttggatgttaaggttgttcatttcaaaggttccagaaagcgattgatgcttgaggcatggaatttctacagctcaacctctaagctgtctgatatgctatgcctaatcttgagaagtggccggacgaaatatgacttctgaacttttgggttaaaactgacacatgttgatactgttcaaagctgttgtatgttcaagtatagtacaaaaaaatgctgaccatgaggctgtcattgcaagaattcagatcagcataaaaaattgctagtagcattcagtatgtaacaaaaacatgcaatttcgccgtcagatgtcgtcagcagtattaaatagagctggcgctgtttcaatgtgtcaccggcaaaatttgcagatgtttttttttgctgtcattcatcgcattttcaccca

SEQ ID NO: 23967 - DNA, 1664 bp, Zea Mays
atttggtttcagtggccgaccacactataaattctgacatgtgtgcttcaaggctgtctctagcagttgtggatagctttatgtattggcacgaacagcagtgcatggttgggcactgctgctcttgttaccaacatgaggaatttccctctcagccgaggcactgttgctggtctcatcaagggttatgttgctgttagtgctgctgtctacactgaaacgtttaatggaatgctaggcaattcacccacaaatcttttgatgttgcttgccttggggatcccaacagcatgtattgtggtgatgtattttgttaggccttgcactccatcactggatgaggacaactcaacagaacacagccatttcatgtacacacaaatctcaagtgtggttctcggaatataccttatggttgctacaatacttggtgatactttaaaactaagtcaggctgtcacctatctattgtttggcataatgatacttttgctccttgctccacttgcaataccaataaagatgacactttatccaaacaaacaaacaaaggaaaaggccagcacccttgctccatcttattcaactgatagtctgtctggtgcggatccagagaactcacaaccacttttgggcagtgcctcaacaacacttgctacaggtaccaatgaatctgatgacagtactgatttggatcttctattggctgagggtgagggagcagtgaatttgaagaagaaaagggggccaagaaggggggatgatttcacattccttgaagccctagtaaaggcggacttctggctactgtttgttgtttacttttgtggagttggcacaggggtcactgttctcaataacctggcgcagattggaatgtctgttggtgctaatgacacaactattttgttgtgcctctttggcttctgcaactttgctggtcgtatccttggtggatctgtctctgaatatttcgtaagctcttcttgctggctacatctatgacaaggaggcagcaaggcagcacccaggtgtactggagccttccgactgctatgggcctgactgtttcagattgactttctatgtctgcgccgtcgtgtgttgctgcggtaccctgttgggcgtgttcttcatatcgaggataaagccggtctaccagatgctctacgcaagtggatcgttcagacatcctcggagccaacagcagctccactgatgttgcatatacactacagtcatatgctaagaaatagtcctattgagttttgggaatgaaatcataatgttctggagtaaatcatctgctggatgccatgttccggtgctgtatcgcattaacggtgcttgatttgcccctgtttgtatcagagttttattctgatttcatttgtccctgctctgtaaggtcgccagcctagtagatataatatagcgggtcatcaatatatactggtaaaccagctgcctatttatatggcagctcgtgtgcatcagcaagtttgaggacgtcataaagcgaatgtatcttctttattctgttgttcctatacaatgggtttcctccattgagacgctgctgcttctttattctgttactaggtatgtacccgtgcgttgcaacggtacacagattaatttagtcgagccttatgacaccgtac

SEQ ID NO: 23968 - DNA, 2903 bp, Zea Mays
caggcccccaccattgtactgtgttcccggttggcggtttgccctgctccggtcagacagagttaaataaaaactgtctcgctttgttaagagaagaagaaagaagagttcaaagaaccaaacactcccctccggcccactgccatctggcccagcagcacatgttcgattctttcccctttgtccgtcggctacgacgctagccgccgccaatcccaacggacagcacggcggcggctggggctggggctgcggcgagcggcgcgccgccagccgccgccgctaggaccttgggcgcggctgccggctgcgctcgcgcaggcatgcgccgtgcggacggtacctgagcgcaacgacggatgggcagcgacggcggatgcagactgctagccgcgtccgccgtcgaacgccgccgctcgtccgctccttcgctcggccagaagggaggaagacagaagggttactaggggttctactccggcggtaggtggggcagctgccccaccgtgctgcatggggagctccgcctctgctggcggatgaaatgatcctgcggccttctcttctggccgtcgcccgccctctcagcaccgtagccgtcgcggcggccgtccgccgcggggacctcgccggcgcggaggaagccttcgcgtcgacgcagctcaagaccacgaccacctacaactgccttctcgcgggatacgcgaaggcgtccggtctcatccgcctcgcggacgcacgccgcttgttcgacagtatcccgcacccggacaccgtctcctacaacacgctcctgtcctgccactttgcctgcggcgatattgatggcgcgcggagagtcttctccacgatgcccgtcaaggatgtcacgtcgtggaacactatggtctccgggctctccaagaacggggccagcgaggaggccgcagccatgtttcggatcatgccggtgaggaatgctgtttcctggaatgcaatggttgccgcgctcgcgtgctctggagacatgggtgcagcagaggacttgtttaggaatgcgccggagaagacggatgccattctctggactgcaatggtgtcagggtacatggacaccggcaatgtccagaaggccatggaattcttcggggcaatgcctgtgaggaacttggtttcatggaatgctgttgttgctggttatgtaaaaaactcacgcgcagatgatgctttgagggtgttcaagaccatggttgaggactctattgtgcagccaaatgcgtcaacgttaagtagcgtgcttcttggatgcagtaacctgtctgcacttggatttgggaggcaggtacatcagtggtgcatgaagttgcctcttagcaggaatgtgactgtgggcacatctcttctcagcatgtactgcaaatgcggcgatttgaatgatgcctgcaaggtgtttgatgagatgagtacaaaggatatagttgcatggaacgccatgatttctggctacgcccaacatgggggtggaatgcaagctatcaagttatttgaaaaaatgaaggatgaaggagtggtgccagactggattactctgttggcagtattgacagcttgtatccacactggattgtgtgattttggaatccaatgctttgaaacaatgcaggaagcatataagattgaacctcagattgatcattactcatgtatggtggatcttctctgccgagctggtctgcttgaaagagctgtcaacatgatccattcaatgccctttgagccacatccttctgcctatggcaccttgctgactgcttgtagagtttataagaatttggagtttgctgagtttgctgctagaaagctgattgaacaggatccacagaatgcaggtgcctatgtacagctggcaaatatttatgcggtggcaaataagtgggctgatgtctctagagtaaggagatggatgaaggataatgcggtagtgaaaacacctgggtatagctggatggaaataaagggtgtaaggcatgagttcagatctaatgacaggctgcatcctcagcttggtttgattcatgacaagttggaccgcttgcagatgctgatgaaagcaatgggctacgttcctgatcttgattttgcactgcatgatgtcgaggacagtctgaagtcacaaatgctgatgaggcacagcgaaaagcttgctatcgctttcggtctgattagcacttcccctgggatgaccttgaggatcttcaagaacctcaggatctgtggagattgtcataatgcagccaagcttatatccaaaatcgaggatcgggaaataatactaagggataccacacggttccaccattttagaggtgggcattgctcatgcggggattactggtgaaggaaagaatctcgataacagtttcagacacactcgcaatgtagtacttgcaacactatataatcccatcgacaggaataaaatgtgtggtaattttttgttaacttaatgagtggctaggacgatctgcagagagttagccagagaaactgatcatttgtttgatggctgtgtttttgccaaacttttttggtttcggttgtttggaaaggttaatcttcaaagtttggtaccacagctgggggtcaacaattttatggagttgcggagataggctgctgggcagatcactggtgttgttgtagaggagctgaaaacacttttagttttgggagcttggaccatttggaaacaccgtaatggttcgatttcaataaaatctttccctcagtaaggctgctctcacttggatgctgctctcagtaaggctgaactagaagtggagtttggaggttggcaggggctaagaatctttccctcctaactgctccaacccctgttttgatagtccgattagttgtagtag

SEQ ID NO: 23969 - DNA, 3198 bp, Zea Mays
atagacactggatgtctggatggcatagcgctaaatttgagaccggcaaaatagcaatttttccccctgtgagcccgcgacgcagcgcgaggtgcggccccgtcccctcgccaccggaggagcaggacgacgaggtggcgccggcgcgaggtagtcgcgcgcctggaagagcggcggcatcagagtcgcaggcggaggcgaggaagtgaggggagagccctatagccaccgccgcggggcgtcctgctcgctgcacgcactcccaccattttgtcccaactcgaagctcagactcgtgctgtcgtgcacttcccctcccctagcatcccaagctcctcactgagaaaacaggagatgggaagagacggggaacagactaggcgccggagccgcaagagatcccgcgacgcctccccctcctcgtcggattccgattccttcgactccccatcctctccgagcagtagccctgagcgacggagccgcagcagtaagcggaatagatcatcctcatcgcaccgccacagccgcaagaaaagcgaccggtcgcggagatcccgcgacgaggaccgccggcggcggagaagacggggccaggagagaaagcggcacggtggggatggtggcaggtcctccgactcccaatcgtcggaggaggatagggcggaggaggcgcgggagatcgtccgagatatactcatcgaattgccggccatagccgaagagcttcgccagcttctccaaattatagacagtggtgaaagcattgatatttctggaatttctgacaaactattggtgaagcgcttgaagaaacttttccgatctctgagattgaaagaaagtgcaagtggggcttacttgttgccttcaaaaaatgttcctacgcttgatattgttggatcattactattagcaagttccaaacttgcagacaacaaaagtggaaagccagtgtcaccaaatagagaagcactacaacaggctaactttgatgtgcaaaataaagataaagattatattgtttccgaagagccaaaaattgttgatgtggaagaggaacctcctaaaagaaggataattggtcctgcaatgccatctcgtgaattattggctgcagcagctgaaatgacagaggctcttaggtgccgggatgctgaactggaagccaatgatgatttgctcataggccctccaccgcctgccgtagttgctgaagctgcatctgcaaatgaagctgagcgatttgaagaggttactagaatattggcagctgacacaaattcaccttatgaggttttgggggtaaattggaagatgtcaactgataacatgaagaaaaggtattggaagttgtctcttttagtgcacccggacaaatgtccacatccttccgcacaagaggcattcgtgaaattaaataatgccttcaaagacttacaagaccctgataaggttccagcatagtttgtctttgactagcaaaattcaatgttctccccctctatttatcatatggcgtgaccgtcgtggcgagcggaggggcgagtgcaaggtcagcagggactgggaactcgaggggagcaggtagcgaggaagaacggcggtgggctcttcgctggtgacaactgctgaatctcctaatggcaccgtcgaaggggaaacctcaccctgacacagggaggtttatttccttctttgatacttgattacaatcctaaagtgcccctttatagattaggagcactctccaacaattattcaatcatatctcctaaaatctgccctctaattctctttcctaagtcctaattaacccagccttagccaagcttgggctggacggacgcttgggacggtgccggtattggcgtcccacaaacgagtccacaacactccctttagtgcagcactgcagcttagggcgtgtttgtaagcaaagtatttcaaaatcatggttttaaaatgtcatgatacaaccgtagtattttttatatcactccaacaaatacttgtttggagacaaagtatctcaaaccatggtatttagtatacatgtactagaagctagtcatagacaaaaactttgggttggagtggtgttttaaatactccaaaaataccatggtaactactaaacctgtaaaccatgatattcaaaacagggttttttcccatggtagccaaacatctcttagcaaaaaatatcataatattcttcaataccatggttttatctcaaaactgcaaaaatactttgcttccaaacacccccttaattttttttgtttctggcattttcttcattgcagagaggtgcaatagacgagaagataaaaaagaaagaggagatggaacaatttgaggttgagcttaaagcaatgcgtgaggctgcggaatggagacgaatacaaggtgtatcactcgcaggtgatgatgaacttttagcaggtccaaaagagtcacagagacctacgagagatgaatggatgaccacattgccacctgagagaaaagcaggagtgccaatgcattcaactacatcatttagtatgaatggtaaagaaggacgtggagacacaagtgtctggactgatacccctcttgatagagcacaaaaagcacaacaaagctatctagaagcctacaataagacaaaggcaattgcagaaggcgacgacgtgaagagcaagaacccggatgcttcaatcgtagataaatacaacacctccaaacgatcagtgtcccttgtgcagaagcaccgagagagtaaaaaggagaaaaagaagcaaaagcagcaggagaaagaggaatgggagggaagccacccatggaagccatgggaccgggagaaggatctgtctgctgggcgccagaatgtggccttagacgcagagaacatgtcgcaaggattatcttcccgtttcgcatctggtgctgttcagcggaacttcctgtgagctgtgtggaaagatactcctggagcttggtctaatcgatgattaatgtccagttattacatcctggtcggcagatggcaaagataatgctgacatataaaaacgagttatgttaccaaggaccatcgtcctgtaatatcgatcgtgcttgttgtgcttattttctcagtgtattatcgggtgagctaaaatggtgccatagtttgttcgtacgatacaattactttttttttcaaac

SEQ ID NO: 23970 - DNA, 1690 bp, Zea Mays
attttacaagagaccgtgaatacaaacgtgatagcctcatgctcgcagctcgacaaacgacagcggcctagccccgcctccccgttatccgacctatccccagcgtcgttgggtcatctccggcagctcccccgctaacacctccatggcgtcgaagcaggcggcggctggcgaagcccttgcggcccaaatcaacggcatgtcccgccctgagatgtacgacatgatgtccaagatgaagaccatgatcgaccacgaccaggagacggtgcgccgcatgctcgtcgacaacccggacgtcacccgtgcgctctttcgggtttgaattttctatacaacttcctttttgcaggcacaagtggtccttggaatggtgaaaacacccaaaactacacaagctttggacatggtccaacccacagcagtgccaacagcaccttcctcagtcaaaactactgcaccagatcatgtcagcttgcccccgcccccattacctgctaaccagcagagtgttgctcaactttctgccccgttttcatctggcttgtctaatgtgggatcgaccatggaccctcctactatttcagcaaatccaccacaatcagcacaagcaaaaggataccttatccatcagatgccttcatcagctcctcagccatctcaacatccaaatatggccctacctcatgctcctccacagtattccaatgttccatcacatatacctatagttcatagtcagccacagcaacctttgcaaagtcctgcaatatataatcaacagttgcaaccacctttgccccaattgtcaaggccgccttttcctcatcagatgcattcacaagtaccaaattcatttgggttgactcatgcaaatgctccgcagcacatgttacaacaaccaatgtttcatccggttgcgaatcctcaaactaatttcctccctggccaaccaccattgcctagccagccaccaccacagcagctgtaccaggctagttcacactacaatacacaaaatacgactccaatgcaagttgataggggcgctccctgggggcgggcccctgatgctcccactcctggctctcatttccctggacaattacccgggttgcccggacaaatgacccaaggaattggtggtatccaggcaggccaagcaccactgacacctgagatggaaaagatgctagtccaacaagtcctgggcatgtccgctgagcagattaacatgttgcctccagaacaacggcaacaggttcttcaactacgagacatgctacggcaatgatagatcgtcagttgactgggtggagaagtttcagttcactgcagcagggatcccgagtgtgggtgcctgttcgttttagccttttgtatcacctgattgacatcccgactagtctgcagcctaccttggatatgcgattgtagaatggtagtcgttgtcgtcatttatagaaatgcttgggcaatatgttttccgaaggactcacaaatgaactgcatgttttggtccagttcagccgcttcaatttcaagtcgtgttaaacatttaccatagggcccctgtggctccgtaccaagtaccaaccactcctacggtgcattcatacgaaccttcataaaaagaatgaggatacaattctaggttctatttgaaccatcttaaatttgactaattctg

SEQ ID NO: 23971 - DNA, 2426 bp, Zea Mays
ggaggtttatactttatactaacagttccttgatttgatcgaaaaatctgctaaccagcactgatggagaaccaggttgccagcttgaaaaataaaggggttccagctgaatttctctcttcaacacaggcatctcacactaaacaaaggatacatgaagaccttgatactggtaatccttctttaaagttgctatatgtgactcctgaacttgttgcaacatcaagctttatggcaaagctaaagaagctatacaacagaggtcttcttggtcttgttgcaattgatgaggctcactgtatttcaagttggggccacgatttcagacctagctaccgaaaactttcatcattgaggaagcagttcccagatatccctttgttagctttaactgcaactgctgtaccgaaggtccagaaagatgtggtatcatcattgtgcttgcaaaatccagtaattcttagagcttcatttaatcgacccaatatattctatgaagttcgttacaaggatcttcttgatgatgtttactctgatatatcaaatttgctgaaatcaagcgggaatgtttgctcaattatatattgccttgaacgggcagcttgtgatgatctaagcatgcatttgtcacagcagggtgtctcttgtgctgcttatcatgctggcctaaatagtaaagtgcgaagttctgttctcgatgactggctttcatcgagaactcaagttgttgttgcaactgtagcatttgggtagggtattgatagacaagatgtccgtattgtttgccacttcaacttgcctaagtcaatggaatccttctaccaggagtcaggtcgagctggtcgtgatcaacgaccttcaaggagtgttttgtattacggattagatgaccggaggagaatggaattcattttgagaaaccccaaaactaagaaatcacagccgtcttcctcttcaaatgagctttctgagaaggctctagctgacttcagtcagattattgactactgtgaaatttctagctgccggcggaaaaagatcattgagagctttggagagaaagtacaaccaactttatgccaacgctcatgcgatgcttgcaaacacccaaatttagtgttgtctcgtctggaggaactccgtcgtgtgcccaactgtcgctttaataagatctctccagtgtttcaaagctcagttaaagaagcacacttggacacagaattctggaatcgtgaagatgaggcgagcttatcagctgaagacatatctgattctgatgatgggaatgaggtagtgagtaatatagccatttcaaaggttccggcaaaagctggtctggatgcaaaatttaaagcactggagcgtgctgaaaatgcttattaccaaggcaaaggtcaggcgaagcagcagggtggcggccttgctgacaagaaaagcatctctgagacgctaagagatgcatgccgaaaaagattgttggatgctcttggacaagcaaagttgcgactcgggaatattccgtgcggagacgaggcttctgctacacaccttgaaacagagtgcttcaaaaaatatgtgaaggcgggcaagacgttctacaactcacagatagccgccacagttcggtggctgtcatctgcaacactcagtcagatgcgtgaccgcctcgacactctttatcgaccgaaccaaagatgatggtgcgtcaggctgccccgacattgtcccagagtcacctccagcatctcctgaaatcgtcgtcggcgcaaggtcaggagaaaccagtaacgacaaaccgcagcatatttgtgagttgaagagttcagatgagtctgcaaagggtgctgcatcatcgactgggaacatggtgctccccgccataccgacgttcagagaattcttgagccaaaaaggaagggatcgggcgaagtgctattcaaattctaatgcgacgaaccagccatctggtattcgtaggaagtttagtggtcaccttgataaggaagaagccagcaagaggatgaaatcatgaatatctgtcgggcaacttgattttttttctgccttttcgttgtcactaatcaaacattgcaaatctacgttgtagtgaaacgttcctgaatcagaatctccatgatgattttcttattatatctagtttgtacagtgaaaaggggtgttctacgcttctcgtgcaacatgaaggatctgcctcccaatccctatccaccctctataggttagtcatctcatgtggacacagccagaagggaagcggtaaacttaagcaagtatatacacatgtcggacctataacaccctatttgatcagctcttacaacggtcaactacacctgacgcaccctatttgatccgaggaatccttctcaagctccgcgatcagctgctcaatgtttcttctgtat

SEQ ID NO: 23972 - DNA, 1123 bp, Zea Mays
cagcagtgctgttctgtattcccaaattgccaccctgttctgcgtactcgtcgaaacgacgataaccacacgtctcgaaaccctaaggctgccccaaattgttatcccaaaccctagacctaaacggctccatgctgtgagaccaccaacagtgtccatggctctggacgccccggtggagcgacgggacgaggtacagatcgcgatggggaacggaaacggcgtggcgccgtctcaaccgtcgcggccagccggtcggccaacggctgctgcggcggcagcgccatacgcggacaggcggctgcggctgaacccaaatgcggatcacaagccggaagactacagcgacgtgcgcggcgagtacgcgccggccgtgtacagcgcactcgagcggcatctcccacccagcctcatcgatgccgaccgcgatgtcaagctacacttcatgcgggacattctcgcgcgctactggccgcagggcgagcgtaacaaggtgcaaaggcacagagaatataggcagaggatactccacctttacaagcctcttcatgaagaattatacaatatgcatccttcagtgttcttcttaccaacattccttgaagcacctactttctgtgagatgttattggaggaggtagagaactttgaaaaatgggtccatgctatgaaatttaagataatgaggcctaatacaatgaacaagtatggtgctgtccttgatgattttggcctggaagctatgctgaaccagttcatggaacagttcatagctccaatttctaaagttctttatcctgaggttggtggaggaacattggactcccatcacgcttttattgttgaatatgggaaagacagggatgttgaactaggttttcatgttgatgattcagaagttacattaaatgtttgccttggaaaacaattctttggtggtgaattatactttcgaggtattcggtgtgagaatcatgtgaattcagagacacaacatgaggaaatgtatgactacacacatattcctggttgggctgtactccaccatggtcgacacaggcatggtgctcgagctacttcatctggtctcagaataaatctgcttttgtggtgccggaggtat

SEQ ID NO: 23973 - DNA, 1773 bp, Zea Mays
tgacggagctctgctgctgtcttcaagaagcagaataggagtgagggaaagcccgttgctttcgcttcggttttctcccagaactccaccgagagaggggaaggactccacaaggagaggggccgaggggggagtaaactcgggtccgtgtgacggcagagagtttccgacgaggagagagaagcagctgggaagggcactcacggagcttacagagaaaaaaggggtcgaggttcatgcccgtttggttcctcggttgctgcgtgaggcggccggaggagtcgtgaaccgggaatgacgggggtggtggtggtttccagcgcggggtgcaagggtggcggcggggcgaagagggccgccggcggcagaggtggcggggaggaggagcggcggcggcgggcggcggttctggagctgctgctcgcggccgtgcggcgctccgtggtggcgtgccgggtggagcgcggggccgccggagccgggtggccggcgagagaggaggacgcggcggtggcgctcgaggagatggagatcggttggcccaccgacgtccgccacgtcgcccacgtcaccttcgaccgcttccacggcttcctcggcctccccgtcgagttcgaggatgagatgccctgccgcgtgcccagcgccagcgccagcgtttttggtgtctcggctgaattgatgcaatgcacatacgatggcaagggaaattcagtccccacgatattgctgctcttgcaggagaggctgtatgcccacggggggctgaagtctgaggggatctttcgcattaatccagagaatgaccaagaggagcacgtgagggaccagctgaacaaaggaattgtacctgatgacattgatgttcactgcttggctagcctgattaaggcatggttcagggaacttccagaaggtgtcctggatggcctgtcccctcagcaagtgcttcaatgcaattctgaaggggagttccttgagcttgtgacactgttgcgccccactcaggcggcactcctcaattgggctgtcgagctgatgtctgatgttgtcgaagaggaggagctcaacaagatgaatgctaggaacgtagccatggtgtttgcccccaacatgacacagatgtcagatccactgacagcactcatgcatgccgtccaagtcatgaactttctcaagacactgatcttgaggacgcttcgggagcgcgatgatgcagccaccaccggagagtacacaccatactcatctccagcatcatccagtaagcatgatgacgccgaatgctgctatggcagtgagcaggacatggacaggagctgtgagatgagtgacatgcatagccagatcagcaagtctgggcgacatgcagactatctcgtacgctacaatacctgttttgacagcgaacaagaggtcgacgatcatctgagtgaggttgaagaaggtttcttgcgtcggttggagcgtgatcttggagcagacagaccagaggtttcttgcagaaaaatctcagagatcatggccctggaggatgctgagccgaaagctgaaactagagcagtggagaagggcatacagaatgagaatgaagaggttgctgaacagctataatgatggaagttctgtgtttttaggcagtaaagcttattattgtaagtactgaacactgaccaatggtctttatccaacacctcggttgaatgtattgctccagtgtatgatgtaaacttggctgatccttttaatgcttggtgcccctttgttacctgg

SEQ ID NO: 23974 - DNA, 1018 bp, Zea Mays
gtatttttccggtacttcgaaagttggaatttcatggtgttccagagatacaaaaattatcagaacttggcaaagaacttgaggcggaggaatccacttctggtaacaaagaccaagatgtgatcgttttgccgtatgcagaggtcgatatgttgaaattgaatgagaagatggagcatcttgaacaaaaagtgaaagaagtgtcaaacaccatcagagagaaagacttaaggctttccaagcttcaaatactgatcggtactgcagatagggcaacggtggaggaggcagcagctagcatcgaccagctagagacagagttcgagcaccatctccaggagatactggaagctgaaatccagtatctggtgatgatgaaagcgaggcagaactggcaggtccgggcagaagaccagatggccttggaggagcacagggcgtctgctgccggggacaacaccaggatgctgctcaagctacgagagacggagagcaagatcgtgatgttgaaagagcaggtggacaagctggaggtccgggagaaggatctctaccggacgaccgaggtcctgaagatgcagagcaggaccttcaaagtgtccctctttggcctcgtccagctgataatgatgtgcctgtccctgaagatgttcttcgcgcaggtctcggcgccgtttgacgaggttgtgccgacatgatgatgccctgcctcgtttggatgcattcgtatccacatggattgacgtgctcagttggtgttctcttccgtctgtaacttcgttcgccgggtttgtgatgtcttaacgtgtatcttactgtagctgtaggcctgtagccagcacccagtaggtagtatagtttcttagtcgtacatgcacttgtgatgatatacgtcagaagctacgcgtgttctgtaaaaactaataatgtaggtctgtgcataaattgggttcgattgacaactaggctagctgacggtctgcagctaccaaatcatggattaattaggcaaactaaa

SEQ ID NO: 23975 - DNA, 1056 bp, Zea Mays
atggccttgatgttgtcgatgaccgaaattcgtttttcggttagtagcgaaaacgggaaaaattatcgagattcggtgattccaatgcgggatagtaaacagtggtccaggctgggatgtcaggatccggaggtggagatcatcttcgacagtgtaagcgtcgaagccgtggtgcctgtcggccgacggacaacgcccacgcttcccaacaccatcatcaactgtgggaaggctgtaatggattctgtgctcatgcgccgctccagggaagaaacgtttaaaatcatagatgcagtgagcgggacaataagatcatccaggtgcttttcttgtgtggccagaatgacacttcttcttggagcacccggatcaggaaagacgaccctgttaaaagcactggcaggaaaactagattcttctttgaagatccatggagatgtcaaatacaagtgtaatggggaaacaatgtcatctacatcgcagcacctctgtgcgtacgtcagccagaatgacctccatcatcccgaaatgacagtgagggagactattaatttcgcttcaaacatgcttggggccaacaatgaattcggtatgagtgcctgttggttttggtcaaaatcaaaatattaaattgatatcctcaagcgatagcaacatgcattcatactgatatatacatatacacacacgcgcgctaattatctcctgctggtgataactgctttagagacgctgagagatgcattacaaagaaaaatggaaacatgcaatgaactaaatcaggacctattttccaaggtgctatagccatatttgtttaagataagaaagcatcagtttattttagtagaataacagctaagttgttcccgtacaggcaactaaacctggaaacggaagcaatcttaaaacaaactacatcatcaaggtaaaatcttattttaatcaatgaagttatcattttttactgtcaacagggaggggggacatcctcacttgaatttcattgaaagcaacctcttttttagagaaacgaggcaaagcactatataaaat

SEQ ID NO: 23976 - DNA, 3617 bp, Zea Mays
gacacagatcccggccgtccagcgcgagatccgacggcgccgcgctcgcagagcacgcgccccaccccttctattccggtccttcctttccctatcgtcttcctccccttctccactccacggaagtgctcgttggcacctgaacctcccagaacctcctcctccgcttgtctccaccctccacgccgccaccgatttatacacgcttcgtcccgccccgccgcgaccttctgttccataccatgccataccatttctcctgataaaccatccaatccagagttccattccagtctgaattgctcctcctaccttctgataagcaatcacgattgtgccatcaacactacagcgccccaccatggccgccgcgccgcctctgtccgccgacgcactttccttcctaacctccgcccccgccgcggccgcggccgtgccgacgccggtcgtagccgcggcgtggggcgcggcgagggcgggtcatgtgaggggtaaggcgggactaaggacgacgggaggaggaaggggcggggtactggctccggtggtcgggaagaggctctgccggacgccgctctccgttcgctgcaacgccaccagccgggacggcaggattacacaacaagagttcactgagatggcgtggcaagcaattgtctcatcccctgaggtggcgaaggagagcaagcaccagattgtggagactgagcatatgatgaaatccctgctggagcaacggaatggccttgcccgccgcattttttctaaggcaggagttgataatacaaggcttcttgatgccacggagaagttcatccagagacagcctaaggtattaggtgaagaacctggatctatgttggggcgtgacttagaagctctgatacaaagagcccgggacttcaagaaagagtacggcgattcatatgtctcagttgagcatctagtccttggctttgctgaagataagcggtttgggaaacagctgttcaaggattttcagattactgtgaagacgttgaaatcagccattgaatcgattagagggaagcaaaatgtaatcgatcaagatcctgagggaaagtacgaagctttggagaaatatggaaaggatctgacagctatggcacgtcaagggaagcttgatccagttattggaagagatgatgagattcgaagatgtatacagattttatcacgaagaacaaagaacaatccagttctgattggtgaacctggtgtagggaaaacagctatagctgaagggttagctcagaggatcgttcaaggagatgtcccacaagctctgacaaaccgtcgactaattgcacttgatatgggtgcattgattgctggtgcaaaatatcgtggagagttcgaggatagactcaaggctgttctcaaagaagttacagattctgatgggcagaccgttcttttcattgatgagattcacacagttgtcggagcaggtgccacaaatggtgcaatggatgctggtaatcttctcaaaccaatgcttgggagaggagaactacggtgtattggtgcaacaacccttgatgaataccgcaaatatattgagaaagatccagcactggagcggcgcttccaacaagtttttgttgatcaaccttcagttgaagatacaatttcaatactccgagggctaagagagagatatgagttgcaccatggtgtacgaatatctgacagtgcccttgtagctgcagctgttctttcagatcgctatatcagtggacgattcttgcctgacaaagcaattgatctggttgatgaatcagctgccaagttaaaaatggagataacatcaaaacctactgctctggatgagattgatcgtgctgtcttgaagcttgagatggagcgtctctcacttacaaatgatacagacaaagcatcaagggacagactgtcccgtcttgaagcagaactatcactcttgaaggataaacaacgtcaattgactgagcagtgggagcatgagaaagcagtaatgactaaaattcaatctatcaaagaagagattgacagggtaaatgtggagatacagcaggcagaacgtgagtacgaccttaatcgtgctgctgaactgaaatatggcagtctgaatgccttgcagcgccagcttcaagcgacagagaaggagcttgatgaatatcagagttctgggaaatccatgctaagggaagaggtgacccaagatgatattgcagaaatagtgagcaggtggacaggaattccagtttctaaactaaagcaatctgatagggagaaattgttgtatctggaggatgagctgcacaagcgagttgtcggtcaggatcctgctgtaaaagcagttgcagaggccattcagagatccagggctggattatccgacccaaaccgtcccattgctagtttcatgttcatgggacctacaggagttggcaaaacagagttagcgaaagcccttgcagcttttatgttcaacactgaggaagctgttgtcaggattgacatgagcgagtacatggagaagcattcagtctcaagattgattggtgctccaccaggttatgttgggtatgaagagggtggtcaactaacagaagctgttcgtcgtaggccatattccgtcgtcttgtttgatgagatcgagaaagctcattcggatgtgttcaatgtcttccttcaaatactggacgacggtagggttaccgactctcaaggacggaaagtgagcttcaccaacaccataattatcatgacgtccaacgttgggtcgcagtatatactaaacatggacgaagaagttggatcatctgattcagcctatgagaacataaagaggagggtgatggatgctgcaagatctgtgttccgtccagagttcatgaatcgtgtagatgagtatattgtcttcaagcctctcgagagagaacagatcaacagcattgtcaaattacagctcgcaagagtacagaagaggatcgcagaccgcaaaatcaagctggaagtctcacccggtgctattgaattcttgggaagcctggggtatgacccgaactatggcgcgaggccggtgaagagagtgattcaacagcacgtggagaacgaactcgcgaagggcatcctcagaggtgatttcaaggacgaggacagcatctttgtggacacccaggtcacggtgccctctaacggccagcttccgcaacagaagctagttttccggaaagtgggtgagcaatcgaagcccgctgctgaaggcgagaagttcttgccggctgtctgatggagcacggttgcagttctacagatcgtgagcaataaaatgtacatataaaggtgccaaactggtagagtactccgtttggcttagtagagcatcacagccagaatttgttctatgcacctagagaagataatattcccggatgctgttaagacatatttaaggatgccgataaacaaaaggaggttttgttcgattgcatcgggattgaagaggattgagcggattaacgaggcgtttggtttgaggaatgagccaattcattatcttctcactcttcaatatttttgtttgatttgtggaatagaatgagttgatc

SEQ ID NO: 23977 - DNA, 462 bp, Zea Mays
ccgacatctttgcgtgtcgacccctccaacccctcccctacgctcgggatctccagctaacttagatgtgtgccatctttgccgataaaagggacggcaccccctcgaccacgcgcaccagcacctcaaattgggatattcaccaccgagagagagaacatggagccgccggaagcctccactgtcgtccggcgtgcactgcactaattggtgccctatgcgcgatcgggagaatctgtccaagctctaggatcatgttgaaggtggtggctaggagggagtgcgacctgggcgccgccaatttgacgtcgtggccgcaaatacggggtgcgccgtgggcagggaaaggcactgcgtgatcactgtttgagggctccatggccatgggaagggatcctcgctgctgccatgggagaagagaagagagggatggctccacagcagcgcaccaaggagagcccg

SEQ ID NO: 23978 - DNA, 1665 bp, Zea Mays
ctggaggcttcctgcgtcgcgtggaggcagacagagctcagggagggagggaggggaagaacgaagcagcagcaacagcgccatccgctcgcttccttccccttctctccctcctcccccaccgccggcgtcgcctctacgcgcgcgcgccccgccgggggctgccgtcgctgcacccgtggcccgtgggcggcggccgcgtacctgtacctacgtgctgccgggggggggggggggggggggagctacgcgtctcctctcgccatggacgccggtgtagagaagtgcggcgacgcggcggcggagggcggcggcgacctctacgctgtcctcgggctcaagaaggagtgctccgacgccgacctcaaggtcgcttaccggaagctcgccaagaaatggcacccggacaaatgctcctcctcctccatcagcgtgaagcacatggaggaagccaaggagaagttccaagagatccagggcgcctattcggtactctccgacgccaataaacggctcctctacgatgtgggagtatatgatgacgaggacgacgaggatagcgggatgggggacttcattggtgagatgacccagatgatgagccaggtgcggccgatgaggcaggaaagctttgaggagctgcagcagctttttgtcgacatgttccagtctgatattgattcaggattctgcaatgggactgctaagggccatcaggttcaggggcaagccaaaagtagaacatgctcaccacggtcccctcctactactatagtaaaggaggcagaggtgtcatcatgtaatggcttcaataagcggggttcatcagcaatggactcaggaaagcctccaaggcctgttgaatgtggtgcaggtcagagccaggctggattttgttttggggtgagcgacacgccaaagccgcgaggtccgaacgccaaccggaagaggaacggccggaaacagaagctgttccccaagcactacgttacatccgaagatgatacggccggttcctagcatcagcagcacggtagcagtttgaccgttggctttggtgatgtcagcagtagggagggcacatcatgtcgcctctgccagctgctgtgatctgaagaggcgtttagctcatcatatgcctttagtcttttgagaggtctttagggttgaaaggtacttcgaaaaccgaaccagcgtctacaggcctaagagggatttccattgaaactcgtcgatgatactacagttttctttccccatctgtgccggttgtgttgtactaccactaccagtgacagtgagtgacttctaagctattcatttttttaactggagaagttgataccatgataattaaaaaaaattgggtgtgtattgaactattaccaagaaaatagtacttggattgtgatgttctgaacattatgttttgtaggcaatcgtgacttgaaagcggtcgaggtatatcttgttattttgtttccctccgatttttcaatatccgattgattttgttttgaagcaaatagagagcatgtccgtgagaatagtcatgaagcaaatagagaacatgtccgtgagaattgtcggttaatataatttttagtttttaatttgtacatgccactcttgagaaagatctctctcaagcttgtccatgtgcgt

SEQ ID NO: 23979 - DNA, 653 bp, Zea Mays
gggattgtgactgtggtgtggcctgaaagtgcctctgaactgaggcttcaaaatgtcgatgctgtttgtgctgaagatgtggactgggagaaccttctcgagcacaggtctggggagctttgccgtcatagatggaaccagatgattcgcctgatgggtgaccacagatataggcctttcattgagcaagtggaagtgcttgcaaggcggtactgcccagagatgcttgcgtacaggaaaccagtcgcaggtggatcctcggccgacgaacctgctggagcctctgacttgtaatatgggatctttagaaacgttagcagcatatggttctagagctgccaagggtgtcgtcagcactctgatctcaacaaactttggtattgttgagggcttatgtatcttctggatttgaaatcacggatgttttatcgcccaactaatcatgatttggggctcgattagagaacgactaggaatcaggccgtccagttagaactaatagtctgattaagtgttggatgactgttgaaaatgcaatgtgaacttagcagctgtgcacttgcacttttaccttggacttggaaattgccgttgccttcttggctttcaaccttcccagctgctgttaaaaaacggaacctattacccccggt

SEQ ID NO: 23980 - DNA, 4716 bp, Zea Mays
gtgaccccaagtgtggctgtggaacacgctgtcgccttccccgacctcggccccgtcaccgtgaagtccttccaggtccggcggaagggtgtactgtatcgcctctctgattcaatgacagtgatgagtgccttcaccaaaatcaaaggtgggtgctttcttcatgtcaatatggcagaggctacagcagccacacactgctgccaagatgcgccagcaactgacactagaagattgaatggtgttagtcttggaatttatgaaaagaaccatgttcaggagctgcctgcagtggcaccagatgttgcttgtgatatgctccctagaggccttgaaggttgtaatgatgatgccgtgctgaatactgttcaaacacatgatgtgttgccaaattgtaccttggtgccatcctcatcacagctaaatactgaagtaccgaagaacaatgcagtgggtctggccagttatactgaagcaggaattgctcaagttattgacaaagcaaagagttacagtggccagataaaacatgctaatcaaactgaaggtgcttatattatttccacatcaaaggcatgtgttgataaatctttaaatgagagtaatatgtcacatgctgtggaggagctacatgcaagtcgagaccatggggttggtgatgatgtttctgataaaaagcaagtcatggtagaggagcaactgctggaagagatacaagcaaaggataatctttcacaagcaaaggagcacaaaaaatgtaggactagttcttttgacacatcatgtatggatctactggaaacaggcactacttctcttgtggaatctttaaacacttctaatcatcaagaagtccatgacaccttacatgaggagtccattcagctagaaaatccaagcactgttggaaagaagaagaaaaggaaaaggcgtcaattgtccccttcaaaatctgcttctgctcaagagacaacagaaccgtcagctacagcagttgatttattaatacccacaggtgaagttctgtctaataacagcccagggatacagatccataatatacatgcaatggataatctttcacaagaaaaggagcagaaaaaatctaggactagttctcctgacacatcaaataggcatttactggaaacaaaccctacttctcttagggaaactctaaacacttcaaatcatcaaggccatgacactttagatgaggagttcatccagccagaaaacccaagtgctgctggtaagaagaaaaagaaaaggcgtcaattggtcccttctaaatatgcttctgctcaaataacgacagaaccatcgtctggggcagccccagcggatttatcaaaatccacaggtgacaaagcatataatgctgaattgactagcaaaggtgaaactgtagttgaagcatctggtttgcctctttcatcatatgaacataatgatggaaaccaggggggcaaaagtgttaagtttgtgagcgatgatcaagcatctactgatttaatctctgaacaagagaagtttgatcatgctctcaagggatgtagggatcctttaattgcagatgacatttattctacaggtgaaaatgtagctattgaaggaaagactacaaaaggaagttgtgcccctttaaatggaggggacaggcatgaagaaataaaacacctcaatgagggatgtcataatgcaggtgtacctgaaacaagcaacatggagaaagatggcaaaagtacagatgtctctgacaagaggcaaacaagtcaaaatacctcgcaagtgaagaagcgcaagaaatcaaaggttggttctgttgacatgccttccgtggatgcttctggtgaaaaagatcatcggtatagtgaaaatgcgaccaaacaagatacagcttctactaaaagggagattgtccacgaaccttctatgcaacagatgtcaaacattgtgcatcagggggattcaaatgtaatagaaaatccaagtggtgatggaaagaaaaagaaaaaaagaagacaccattcagaatccttaaagggtatgaatcctagtcaagatctgaccaaatcttctggatttgtaacaaacgaaagctcgatacaatgcacaggtgctgctccaataaatgcaaagcaaacaaacttagtcattatagaaggagaaacagttactgggcacaggaagcttagtgaaaatctagatgtagcggcaacacatgttgttgatgaggtattggcagatctaagatctaaagacggcttaagtaaggatctggatgaaaatctattaccaggacaaactcacctaggcagcaatcagaatggaatagaagttcctgaatccattgctgttaaagttggtagtactactgcagcattacctccgaaatatcctgcaacagttcactctgcttctcctgttaactcacctagacaaaggaagtctaaggggaaaaaattgaaagtgctatccaccatggctgactcttctcatcaatcaagtggtgtacccgaagaagatgctaatagaaaattaaaagagtctgattctttgaggtttgctgataaaacaagtgatcatgaggatatagtaactgcaaatgtggttgctcaagctgatgaaaaacgcaaagccactaagcgtcaaagaaagaaaggttctgtaaagcaggtacttgatacattggacttgaaggaagtgaatgacacagaagaaaatttggttcagggaggttctgtagttgacactcccttgagcactgctgggaacgtagagcagaaagactggtcttctgagactttgagtcctaaagaacaagaaactaattgttctactcatgggctggatagtcacacagctaaggacagccaggatgagtatgtaactgacaccattgggacccatgataatgaaaatgctgcaggaaccccagccttgcatgtagttcagaaagatgccatggccctcaaatccgccagccctaattctcaaaaggagcaggaaacatctttgaactctgaactacaaagtcaggattgtcctctggaacatggttttagtgcagatttggtgaactccaggactgaaaagggagtcaggactacaagttctgctagtgctgttaaatctgattacaacaccatgtttcatcctgctaatggtagaatcaatgtccttgatcattttagccgcagcaatttgaatgatggttcatcaattgtcgcagaaagtaagcaaaacaatgaagatggaagtttaagggaagtgaagaataaaaagaagaaacgaaagcaaggtactggtagcgttgaaccaaatgatgttatagaatctcttccctcagagatagctagcttaactggtcattttggtaccagcaaagctgttgtgtcatctgttgcaacagaaaacatgaatggaggaaatgagaatgtgaataaaggcaaggagaagaagagaaagggcaaatctaatatggaagtacctactgctggaaaggaccatcctaattgtgatactcaattcattgatattggtacccaagaatcacttatttctattgtacaaaaagaaaggacaggtcaagacaatggaaaagagagcaacagtaaagctactcagaatgccagtataatgcaacatgaaccagaagatgccacttggaatcgtagccctgagaagaatcaccaccagagtgttgatgatgatcagaacaagttgctcactgaaaaggatcatgcacatataaataaagaagtgagaaaattcactcctcaaacaaaggcccatgctaagattagaaagcctgatgggtctactatcaaggaaaaggtggctccaaatcctaaacctgtaaccaaccttgtgaaggatttttccatgagcccacgagcatcaagtgacagcacagagggcatgccacaaagtgctaaccgatatagagttgcagtccggaaagtaccaagtaaaaggtatgaagagaccagtggaaactccaataaggcgagtaggaaagtaggctctggtgcaatattcaatgactctatcagcgaaggttctggtgatgaattggacaccaagactgtcatggaaagatcacctaataagtcatctacatctgctgattcaggtatttcatctgcagcctctggtgaaagcgaggttcctgatgatgatggcaccgtatcactatctcagaagagtttcaaaggtctgcacattagctccatcctccgtggctcccgtagctacaagaaggcactaaagaggcaaatggagctgctagacgacgacaccattgtgcctgatagccagcccgcggatggcctttggggctgaacatggttatcgtcaagagaagcgccgaccctgcttcatccttttttgccattgtccacctgatacgctggtgggctttataagttgtctaaaacacatgcccgaatgcgtgatgtcgctgatggcattgccatacgccacacgcagttcccttattttgtcgggcttaagctgtgatctgcctgaggatgaatcgatgatgttcatgatacagcttaccagctatatatatgtgttaatgtatgtaagaatgatacgcacgcttagtctctcacccatgagccatgggtccgttgagtcctgactgaccatcgccagaagttgtggtttgtgacaggaaattccatccttctggcttatctgttgtgt

SEQ ID NO: 23981 - DNA, 1101 bp, Zea Mays
cattccttccccaactctctgcaccagcaccttcccatggcgcagggttcccaggcgtccatcctctctcccttcttcccttgtgcaggcgcccccatctcctccccttttctgcagcaagcagcgcccagctgagccccgtccactcgcccagccctatctccctcacggcgccctcgctggtgctcgccccccctgctggatgccgctcctcaccctggtggccgagctctcccatggacgtcagccctcatcctcaggttgcccctcccaaggcgtttgttcctgcccaaccatggacgcgcccctcccttttgctgctcgtcgtggacaggcttggcgccctaatcctcaggttgcccctcccatgacggtcatggtgtcatctgttatcggaggaaaaatccctaggaatccgaaggtgatgaagtgatgccccagtgcagcgcctggtaggtgtccggtggaacgcctaagccaggactattgtcgttcttatgaacctggtatcgattgaggtacgctagttgatcacgtgatgcagaattcaagaattgagttgatctcaagatgatgaaatgatgaactactccgacaaacgatgtctgtgaatcaatcctactactatacaggttcttagagaaaacgtttattgtgcaataaatgatggaattatcaaccttattgacaaggttgcccaaagtttaatgtattcatttttggctaatattacatgttggccaaacgcttggaacaatggaactattgcaaattcctttttacagactacaacttctatcgaactaggtggtcaaggctcaggattcagagtagaagatgcacataaatactggtgaatgatgccatcgacgatgatgaactgatgaaacgatggatgatgccatcgatgaaagatggaatggaactcaaattttggtggtcgcacaagtgtggagacttgaattcatatatacttagttaggctcaatgttagcacaaacagttgatgagcaagtttttccattagtagtttagtttgaatttagagtacaattatgtatgagttatttgacagtgcttatttatgagatattgaatgat

SEQ ID NO: 23982 - DNA, 831 bp, Zea Mays
gcacaagaattaagagaagtttctcagaaagaacaaacacaaagaacaaagatcaacttttcgtctttgttgaaggtgccaaagaacctgctgaaaccaagggattttcaagaggagtgtattctttcagcgattcagattctatcagcacattttgcccagtggagttaccatgtttccttcctagaagtagccaccattcctcttgtcctcttgaagaggctacatgagcagacaacagttgaatcacttcgccatcctattaagtgtttgatagaccaggtgacggagaacaaggattttatagaaaggaaaagagaggttgtatccttttcaccaaatgataaggcgtcagttgatagcttccttcagtcaattgcttcacatttactattcaacatctggcctgctgagtttgctgaaaaacatattactgttgaatgcaggaggagaagtccacacagaatgtcggacagggacgccgtggcccccgcgggcggcggtgaccggaaggcggccaagctcgggagctggagcagcatgagcagcaactacggcaacaagaagcggaagagcagcagcagcagcttcgggaggagatccacatccacctgcgaggaaaggcagggggtcttccgcatgctcatgagctggaaccaggagagccggttcagcaacaagatcaagacgacgacgagcaaagaaagatgaacgaaacgaagtgttcttagcttggtgtgattattcggggggttgcttgctggagggtttttgttcgtttagtgtctagccttagcttacttattacttttgttagtactctactagcag

SEQ ID NO: 23983 - DNA, 961 bp, Zea Mays
atcctccggctcctgccagacctaggctatttcccgatcagacctgttatttcccgatcagacctattcctctctcggcctcccaccgccaccggcggcgacgagtaactcgcccgctgaccccagcaggcagccatgggagggcacggcgggttgaacatcctgccgcagaagcggtggaacgtctataacttcgacaaccgtgagaaggtgcaaaaagacgaggccgccgccgcccgggaggagcagctccagcgcgaggcggaacgccgccgcgagtcggatctacgcctcgctgcactacgccgtaaccgcggcctggtccaggcggagacgccccccgctcctccatctcaccccgccggccccgctgatccggcggacgcccttccttccccggcggacgcccttccttccccggcaacggatggagaccacatcaacctcttctcaggtggatcaggcgtcgccactgatttcgatgcgctcgcctcggccagtggtgggaggggcgcggctcgggagcgggagcctgatgccgaccctaaccctaagaagcggaagaagaaggaagaggaggtgagggttgtggggcccgatgaggagaagtacaggctgggctacggccttgccgggaagggcgtggcggtgccctggtacatgtcgagccctgcagcggcagcggccaaggaggggaggggcagagatgcaagggagggtaacggggtgaagaggagtggagggaagaagagcatcgaagagctgagggaggagaggaagaagagagaggccaaggagaaggaacgcgagcgagccatccttgttgctgcagggaggaaggagagacaggtggatcgggggcgccagtcaagatgggctcggtgatgtaaggattttcatggtataatgtccaagaatactaaggaattaagctcgtcctctgaaatgtggggtgcaggcg

SEQ ID NO: 23984 - DNA, 1336 bp, Zea Mays
ccgcactatgcttgcagcattagaaatgctgaaggtttctgtcaaagaagacaacggcaatgagtcttctgttactgttcggttgtatggaccaaatacggacttggtgattgataggaaaagggaattgcagctgcagggttcggggctcggctacttggaatatttgagaatggagtagttcagtcattcatctatgctcgaacactgtcaccagcagacatgaaagaacctaaaatagcagctgaaattgccaaggagctacgcaaattccatcaagtagacataccagggtctaaagaaccacaattgtggaatgatatattcaagtttttgaagaaagctgcagcattgaagtttgaggataacatgaagcagaagagatatgaaaagatctcatttagagaaatacaagatgaagttcaagaacttaaggatctcttggacattctgcgcgcgcctgtggtttatgcacacaatgacttgctttcaggaaatctgatgctcaatgatttggaagctaccgtggctatgacattgcaaatcatttcaatgagtatgcaggatttgattgtgactataatttgtacccagataaagatgcccagtatcacttcttcaggaattatctacacactgatagacctagtgaggtggatgcacaagatatggaagtactttatgtggaaacaaacactttcagactagcatcgcacatttactgggcattatgggcccttattcaggcaaaggtatccccaattgactttgactatcttggatacttcttcttgcggtatggtgagtacaagaaacaaagggagtcctgcttctccttggcacaaagctttctctccgagctaaaaaatggctagagcctgagaatctgttcacgagtttatactggtgtacgcatgctcggagcgggtacgcgttgtgatcatcgactgctacccagaaactctattatagcggttgtagcagcccctcattgttgtatctgatgttaggttcatcattgtctaaggactagtttggatactctagtatcgagctcaattcatgtgtatgagatggattcgggtgtaacttaaactaatttacacactaatccaactcaacacatgtggattggggtcaatactaaattacccaaacaaagcctaacagggaagtcaccagtggcaaattatgtacttatatttataataataaacacaatcctgatgggttgtgccctgttgaatttgttcttcgattaattctgccctgtgcaatctgttctgcacttccgagtatatagtttttaatgactgggtagtcctttgaaggtccg

SEQ ID NO: 23985 - DNA, 855 bp, Zea Mays
cgccgactcgtctcttctcccctaatcctccttccccgatccagtcccgcagcaacgccgagggagagcgaggagagacagatacagatcgcgcgctgagatgtcgtcggactcctcgtcgtgggcgcgcgccctggtgcagatctcgccctacaccttctccgccatcggcatcgctgtctccatcggcgtctcggtcctcggcgcggcatggggtatcttcatcacggggagcagcctcatcggggctgccatcaaggcgcccaggatcacatctaagaacctcatcagtgtcatcttctgtgaggctgttgcaatttatggtgtaattgtggcaatcatcctccagacaaagcttgaaagtgtgccaacatcccaaatggtatgtgtggggataatcggaagcagctgtgcactgtctgatgctcagaactcatcactctttgtaaagattttggtgattgagatcttcggcagcgctctgggactgttcggagtcattgtgggcatcattatgtcatctcaggcgacatggccagcaaaagcttgatccttaccgttagtgctctgtatattattcggatggaatgtatcggaatatgcatgcggtccaacggactttccctgttcttttttcttttgcatcttttcggcaaaacacgaaatgttgcaagcgttgcgctaccgattgtagagttgctattccaaatgccggagcgttccaatgtgttacgatatcttgtaggtgctattgcttttgtaagacatttggcaattggcgtattaaataaatgcttgaactgaataagattagaattatttttttgtcacccttcgtttatgacaaaagtgtcg

SEQ ID NO: 23986 - DNA, 1673 bp, Zea Mays
cgtcagacctacgagggcatcgaggccccgcactgggccgacctctccgaccccaacgccggccgcgccgccgtcgacgacgaggcctggttttgccgccccgattgccagcatccgaagacggccgaggatttcttcaagctgagccccagccccaagggcaagctgctgcgatcggtttccgccatgctgccgttcgccgaaagggacgccaacgccaccaacctcagggacggcagtagcaacctcaagtggcggggtggcggcgccgttgctgcctccacgccgccgaagccaaaggcagcgcccaagaagaggttccaggaggatagcgagaaccatgaccctgcgctggccacgccgcccccacggcaggcgccaagtaggccgccgttcggcgcccctcggtggaacaagaatgccaaggaggccatcaagtccagtgcggagaagcggccggacaatgctgagaaggaggcgctgctcaataagcacgtcccgccgaggcagctcaagagcaccctctcagcgaggaacctcttctctggaaaggatatacttggccagatttcggagttctacgatgagctgaagcggatggttggtggtggcgtcggccggcctgtcacagacacacaggaggagcacagctcagacccagtgaatccgagctatttgatggagaaggtggctcctgatgagacagtgaaggaggaggcgagacaagaaacggcgaaaaagagtccaagcccaatgaagggaaagaaagtggggctgaaggtggaagcagggaagcaaaggtctccctctgtgctgaaggaggtgagggcaacgccgccgactccacagcggtttctatccccatcgccaaaccgcattaagaatgttaaacctggagggatgtccacagcaggctcgccactcaaaaaggcaccaaaggagaaggggacacctagtaaggacctggagagcaaaaaagatgctgtgaggcaaccctttggtgttaaggatatgaacaatacaagagcagcgtgtgatgcagaagggagctccagcagcatgttttggttcttgaagccctgcactttccttgtggagtagcgtcataacactacaattttttaacgagcaacacttgatatagttagaatccattacttcattcatttccaaatattctctgttcctatttgattgattcatttcatgggtactctatacgggaagtaaacaaaaagaatcatgtatagtcatacaggttgaaagtcttctccatatgtataattcgagatatagcaaaacgtggttctgctgctttgtcgtttgttcaaataaactgcatttttttgtcccttgaagtgatatactgaggttatacaattcaactactacttatcagttcgaaacagtttgaagtgcaatctatatacattccttgggggtgatataagtcgatggtctgtttcttaattcatgaaggtttgtgcctgccacattggggatgttgtttctgtttcttcaattgttttggcacaaggatactttgtagtcctaagttgtaacaatgtggattcactggtctgtaaggaagtgcaagaattctgaaatctcttccgggaatcacaactttttatatagacttggtttgcatttaaagattttacagtctcaag

SEQ ID NO: 23987 - DNA, 1561 bp, Zea Mays
tcctctgtcttttccaacaataatagtataatacaggcagctcacctccaagataaaatggcctgacgaaatgagcttcagggaaggccgccgccgcctactcctcgtcctcctcttcctggggtgtcgacaagccgcggcacgctcccacggtcggagacgaccaagatttcctcttttccgaggggagcacgagcacgagcaccaacgccgaccccgacctgacgcatttccaagggactcccctctgcaaatagacctgtccaccgcaatcctgacactgtcggagaacggggagctgcagcggatccatgacaagtggctcaagacaggcgactgctcaacggacaatgctgagttcgtggactcgaaccagctccgcctcgagagcttcatgggcctgttcctcatctgcggcgcggcatgcgtcctcgccctgctcatctacctcggcatcacgatacgccagtacctgagacacgaacagccggaaaaagaaagagaggggtggaaatgggatattccattcctggtacccttccaggcttccacctgtgctttctttatggataacgatgatgatgactatgaggcggccgttgtgggcgcgccattccggaccctacactccagctccactctcccatggcttcctccgccctgccttccagaaccttgcaccgccgcgcgctcccctcgtctacgccgtgccaccctgcgacggagaccttcgcccccggcgccgtctcccggcggcgagcagccgtgcggctcctctccgccgggttcctgaccgccgtcgcgccgccgccgtcgctcgccgcgaggaggggacgcgttgtcgtgccaccggaggactacgccactgcacgtacgtaggcgtgcctgcttcctggcgctgctggtttctgcatccgcgctcgttttttttcttcttttcggctaaagttggcacctttttttgcgagcgactgactgaatttcagctaatcacaacctttttcctggttaagaccaggatccttttcttttactgcaaataatgctggtgcttctaactcgtatgcgtctgcaacgccataccctacctgagtattccctgtgttaactgaccgattgaaattccatttcgagttcccgcgaatgatctgacgtgatgacgttctgaaagcagccgatggtctcaagtactacgatcttgtcgaagggaagggaccaactgctgagaagggctcaaccgtgctggtccacttcgactgcatttaccgtggcatcaccgcggtgtcgagccgtgagtcgaagctcctggcggggaaccggagcatcgcccagtagccttacgagttcatcgttgggtcgctgcctgggaaagaacgcaagcgggatttcgcggacaacgccaacgggctgtactcggcgcaggcggctccgaagcctccggccgccatgtacaccataaccgaggggatgaagaggagagtgattgtccctccagagctggggtatgggaagaggggaatgagtgagataccgcctgacgctcctttgaactggacctcga

SEQ ID NO: 23988 - DNA, 693 bp, Zea Mays
atggagattgccgccgttggcgtttcgatcgccatatttaaccaagtctccaaggaacaccataatcaatgcgaacctatgcccgcacatggatatgagatggattgttatatatgcccaaatgtgaagtacttaagagaaggtgctttcattaatgttgatattgaaaaggggatacaagatggacagaaagcagttggcgacgaagcaactgttgtaaagaagcggtaaggatccatatggcgtggaattgggcagccgtccgtctaccttgcgtgccttcccccagctgcatgtatctgtgtttccgtcttgccacaagcagcccacaaccacaacttggtgtcttgtatacctgtgccttgctttccttggttggtggtgacagggccatcatgaattaggcatgacttgtttccattctggtattgtaatgtgtatcattactgctagctgctatatcttggcagtccacacggtggcaggacctcaggccgttctttgcacggcagagctcgggagcaggtgtccccagtttgtgtgagccacggcagggccggagtggctgcatgggagcaggtcgtcgcaaggcctcgactatttcctttccgagaattattcatcttccggtactgtgtgtcgttcaaggcaaccgtctcaacattcaaccagggttacgcaaccatttgttga

SEQ ID NO: 23989 - DNA, 1810 bp, Zea Mays
gcaagtgtgctacactgatacttgcatcttcgccactgccagcgcgctggccctggagcggaggcaagaggggtgactacaaggagcttttcgtcatggcactgcctaaggacggctgcctcgatggtgccaagatcacagaggtaggaggggtcggctacaaggagcttcttgtcatggcgctgcctaaggacgacagcatcgatggcgccaaggtcgcagaggccatcggcgtcaagctgccagacgtcgggggggccataaggactattttgaatagcagagaggccagagaatttgccagtggggcactagctggtgctatgtcaaaggctattcttgcacctctagagactatcaggacaagaatgattgtaggagtaggacctaggcacatttttggtagtttggtggatatcatccaacaaaacgggtggcaagggctttgggcagggaatacaatcaacatgctccgcatcattccaacccaagcagtcgaactcggaacatttgaatgcgtcaagaggagcatggcagaagcacaagagaaatggaaagaggacggatgcccaaagatacagcttggtaatatgaaaatcgagcttccacttcacctcttatctccagttgctattgccggtgctgctgctggaatagctgccacactggcgtgccatcctctcgaagttatcaaggatcgcttgactatcaaccgagaggtttatccaagcattggccttgccttccgcaggatctataagacggatggtataggtggtttctatgctggcctgtgtccaacgctgattggcatgattccttacacaacatgttacttctttatgtatgacacgatcaagacctcttactgccgcttgcataagaagtcgtctctgagccgccctgagcttctacttatcggcgctctttcaggtcttactgcaagcacaatcagcttccctctggaagtagcaaggaagcggttgatggccggcgccctgcaggggaagtgcccgcctaacatgattgccgccttgtcggaggtgatccaggaggagggcgtcatggggctttaccgcgggtggggggcgagctgcctgaaggtgatgccgaattctggcatcacctgggtgttgtacgaggcatggaaggatgttcttctggctgacaggaacaagccacgctctttagcgaactaaacaggccgtccttgagcaatggaggcgttgctgggattcctgatctattttcagttttggaatcccggctgcggcgagtggggtacatagggcgcgtttctctcttttttgattgactgatgagtggtaagcgttttgttgtgtcatcggcacacagacaaacatcattaatgtgtcaaaaaactaagcgaaaagacaaacccttctgtatttcctgagtggaaagatggggaacctaaccctacctggagcctctgcaggaaccttttccttcatctaccaatcagatacagggagcttcaggttgacagatcgcaccaactgaaggacgaacctgttctgcgacaacaagcaggataagctgaggaacctgttttgcaagctaagttgagatgtaatttttgtcttgggctgggtggttatagtgttttctttcggcttttcttttctttctgcctcaagtctgaagcgaagtttataaattatttttcctcggctaatataatttgggtggcaaagcttttgccgcttccttaaaaaaagagtggtaagcattttgttgtgtcatcaattctgaattcttgtgctgttataagaaaaaaggatttggg

SEQ ID NO: 23990 - DNA, 938 bp, Zea Mays
gccgaattgccctcgcctgtgcaataaaaacggaccccgtgccctcgcctgaaggaacctctgtgtcggagtcgtgccggtgaagaaaatagagagaggtaaaacaagggagggccgccgccaggggcaattccttcgtaggtcgccgattttgcctctgtcggtggtcagggagcttcgcctcgatacgtgggtgatgtccgtggcatcgtcgtgcagctaggagctccggctgcgggcaatttcgcgccggcgttggtcctacgcggcagatccgccttgtgccgcgagtggtgctcctctgcgcgtcatccgtggtgagtaccttccccgttcaactcgcattgattccccgttcgcgtggcgctagacggacagtaatttgggctcgggtcgtcggcttcactgcctccggtgaggtgcgtggccgcagcagggtcgccgccgtgccgacctcgggggaggaagacagcgtccaggccgtgtattttgcgatggccggtcgggattagatggagagtagcgcaagtgacagtcgtcggatcgcgatcgtgcggtctagatcaaccttatagttagtgaatcgcgggatcagatcgtgtccgtagatttgtggatgggcgcttgggatctggtgtagacgtggccggatctcggacgatgataccggatccaagggactgggttgcgtacaggtataggcgctggtagatctaattgtgaccgtaggttttaatccaacggctgatcgcggccgataccccttcggtcgtggcaaattcttaaagagcccctgacttatctgggaattaacccgcggtcccatacagctctggaatcattacaactaagctctgtttttatcattctagcccctgagccttcctagaattaggactcgtccagagccgtgtgataatgggaaaaagtaatatagg

SEQ ID NO: 23991 - DNA, 239 bp, Zea Mays
cccgttcagatcgcaccacgcacaagaccaccaaatacgcaaaccagccgccgccgagtaaatctcgcctgtgtccaccactttgagcgttgtggcttcaggccatcggcggtcctccatggggacgcccgtggctgcgggtggcgcgtgggagctgcatgttggcgggaactcctcgccagcgtcgcggttctacgcatcatcgtgaataggagcccctgtgctgcgcaatcgaaggt

SEQ ID NO: 23992 - DNA, 1731 bp, Zea Mays
ccgctttgttagcccgcgccgccggcgccacctgggctcgcgccgagccggaatccgcccggttgccggggccctcatagagcctccgctcgatctgcccccggatcggattggccgccgcgcatctcatgggtgaggaagctgtccacttcagcgtcgtcgacgccaaggactgcaaacagagtgcctttgaagtcggcgataagacgtatgttatttgtagatcagatgatgatttgaaaacatctgctgttaaaattcacgacaagctcactcagacttggctctcacccacaatacttggggaacagccacttctaaccaagtcacagtctgtgattcctgtcagtgatgagaagatattagttatcgagaagggtgttcccttgaatgagtccatctggttccttgagatagacaccccctttgttaagcaacaacggaaaatcaaggaaacagaagttgtttcttggagcaagggagtaatcggcgttggccaaaaaccagttgtgattagtggtccttctggtgttggtaaagggacattgattgcaaagttgatgaaagactatccatcgaagtttggtttttctgttagccacactacaagatctccaagggaaaaggaaatagatggtgttcactaccacttcacagaacgaatcaagatagagaaagatataagcgagggcaaatttcttgaattcgctcatgttcatggaaatgtgtatggcacaagtatcgaagcagtcgaatctgtaactgatgagggaaagaggtgtattctcgacattgatgtccaaggagctcgatccgtgagggcttcttctcttgaagcaatattcatctttgtatgccctccatcgttcgaggaactagagaagcgccttcgggcacggggtactgaaacagaggagcaaatccagaaacgactcagaaatgctcaggctgaacttgatcagtccaatgaaccaggtctctttcatcatcttttggtcaacgatgaccttgagacatgctatgagaatttgaagaagttgctttctctggatgatgaccaagaagattcagatgatttttttaacaaggaggacaaagaaactgcaagttactctatcgtgtccaaaactgactcagaaattttgttgcaatctgagactaacgaaggcaaaaatggagccatacacttgctggcacttgatttgtcgtctctctcaggcggtgcgcctggacgaacaaggggccttaagattggctcagttaactccttttgacaagggcttatattggcgttttagatgacccaaagcattcttcaaaatgatacagcagaagcactgacttgaattttggatcaattcccatgagctgatatcttcaaaaacatcttagttaggaaaaagaaggaaacgaaaatggaatttatttccatttgttatttgtttgggtgccacaaggaggcaaaatcatagcaaggaattgtaccttattttttttagggattgtgtacttttctgctgttgagaggtatttggtggttggataatgtgatggagcctatctaaatgttctttcatagtggtctgaataacattgagctcattgctggattatgttgtgattctttcaactcttgggtcatgttgcacagaactaactcgtagttctgaccaaagagaaatgtttttttatgttaagtacgccctgccgtaagcaagtgtaaactttggg

SEQ ID NO: 23993 - DNA, 2120 bp, Zea Mays
catatcatacctcaattatgcattaaaaaagcggccatacatgatattctttatcacacttatcacatcgagaagtatgatcatttggaatttcctggagttgttcctcgaacgtttataggagcatttgttatctctattctctcatcacccacagtctttgtattgcgtttacttcgtgttccaaagttctatagtcttcttacagttcgattaacattgagttgtgtcactttgatgagtttgagacttctcagagttcaggtaaaaaagaagtttggccatcaagcagaagcattctttgtggtactaactgctatccagtttcacttgctgttctactcaagccgtccgcttccaaatatctttgctttagctttagtcaacttggcatactctttctggttcaagggaagctacctatgtacattacgggctctggtatgccttatgcccttttctgatgccttacctaccgagggaagctcggttctcaccaaattcagacataatcattatttctagtacccaagatataattcttcgtttcagcaccaaggatctggatcaacaaaggattaaagctttcacacaattaaaatcataccgaactatgtgtattgtgcaattttcattttcttgcagattgttgcagcagttgtttttagatgtgatatgattctgcttcttggcccaatagggcttgcacttttgctcagcagatctgtttctctcttggaagcaataaaatgttgcataagcactacccttgtatgcataggatttaccgtgctaatcgactctataatgtggcgtcgaatcctgtggccagaatttcaagttctctggtttaattcagttctgaatcggagttcagaatggggtacccattcaattcattggtactttacatcggcgcttccccgttccatgatagtggcataccctctctgcatggttggtgctcttcttgatagaaggatagtaccatacatgtttccggtcttcttatttgttgtgctctattcaaaacttccacataaggaactccgtttcataattggctcaattcccatgtttaatgtgtctgcttcactaacagctagcagactatataataaccgaaagaaagctgggtggaatttgctttttattctcatgcttggtgcctttcttgtcagtctaggatattctactgtgactttcatggcatcctacaacaattatcctggtggctatgctttaaaggctctacatgaagcagattcttcagtgaaggaaaagatggtacatattgatgccttcactgcaatgagcggggtttctcgtttctgtgaaaatgaatatccttggagatactccaaggaggaagaaattcccatcgaagaatttgagaaaaggaatttcacctatctactgaatgagcaccgctccatcggtggctaccagtgcctgttcgctgtggatggattctccagagtaaaacttacgccccaaatccccccgctctctctggtgaaagaacccaaggtgtttgcacatgggaatacgagagaccctgacattctttcactgagttggcccggttgtccttgagggcatggggacaccggacacccagattcctgtggcaggaccactaactgccagcagtgaagatgtgtttgagtcagtccgcgtgacacatatatggtatacatctctgggtcttgccatgaagctaccttacctgcaaatctagaatggggcccctcctcccctagatcccacggcttcgaaaccacagctttaaggaacactgccattttcaggtgcaaatttgtgtaacattttagagccggaagaaagacagaaagcacacggggggtggggggaatcatagcaattagcaaccttgtatttacaagttggtcgatatatttttttcccttttgaggcaactttcatactccatcttatataacaagagcttctagactttatttatcggcagcaggcatacagtcgtgctggagacgcatacttgctccattcaaagataatatatttgttttctatctgctgtggccctgctttgcgagtcgtattcggttcggtggcaggctggccgcattctatct

SEQ ID NO: 23994 - DNA, 973 bp, Zea Mays
acttatcttccttatcctatctccatcgccccatttcctatcctcccagccgatcccctctccctcacggcgccctctcccatggccgtcggccctccccgccatggacgccgctcttccttcctatagtacatcagcgacctcgtctccctcccttcccgtggactcctgctgcaggagctgttcctctactgcgctcgcctaagatggccggactcgcccatgatggctttcccctgtcgatgctgttctctagccgccatggcagtgcctccctgtatcagtccggtgaccgggccctccccttcccacgtcatgctggtgccatgtcttctccctcaccggccaacctcgccagccaccaggaaggatgttgacaattggaaatccatgtagcaaataaatgattttggaactgggggcaggtcagagtctagagcatgctcattccacacattggaggtggattttcctcaattggagatattgacaaattggaaaaaaatatgcacacatccttgagccaaaatagaaaaaaatcatagaagagttctttggtaaatataaattgtgcactcataattttgcaagtgcatctatggataccttcacttattcctaacgctattaactttgatgtctttcaggctgtcacgtgattcaagagtattaatgatatacaaaagtttgctttatggcaagtcaggtaaccacaaattttgggcaatgatagggatgtgcagtggtggtctcttaaaagaattttgtgttccagcgtagctatttccactgcaaactatcaaatcattacaaactagtgagttggcactgctgctgcctgcgtccgtccatcaaataatgtgcatgaactggaacaagcaacttgtgcacgaaagagcattacttgaacaagcagcttgtgcatgaatgagtaatactgtagatgattggtcatattataaagaaagtacat

SEQ ID NO: 23995 - DNA, 75 bp, Zea Mays
acagaagtaagggaggagagcaacacacacaagactcaattacgcagcacaaccacgcacacaagtgaagacttg

SEQ ID NO: 23996 - DNA, 1833 bp, Zea Mays
cgacgcattaggctttaccggactccggacgcataacgagaggaaaacaaatcagaggaattcgacgagggcaccagccaccagcaccaccatggcggccgcctccaccgccaccgccgcctcgcactcagcctccttccccgcggcctccctccgccacgacgcgcgcaggccctcctgcgtagcccccgccgccgccgcggcgacgacggccgctgagacggggctcacggccgtcccggcgccgccgccgacgccgatgttgcgggtggtgccggagtcgctgcagcgggacagcgggtgcctcgtggcgggcttccgggagcgcggcgcgggcgcggcggatggggaagggttcggggacgccgtgggggaaggaggaggccccggtgcgatggagtacctcaccagcgtgctgtcgtccaaggtgtacgatgtggcaatcgagtcgccgctgcagctcgccaccaagctctccgatcgccttggggtcaacctctggatcaagcgcgaggacctgcagccggtattctcgttcaagttgcggggagcatacaacatgatggcaaagctctcccgtgagcagttagagaggggtgtcatctgctcctctgctggaaatcatgcccagggcgttgctctttccgctcagagactgggatgtgatgctgtcatcgtcatgcccgtgacaacaccagaaatcaagtggaaatcagtggagaggttgggtgcaacagtggtccttgagggggactcatatgatgaagctcagtcatatgcaaaattgcgttgccagcaggaaggccgcacatttgtacctccttttgaccatcctgatgtcatcactggacaaggaactatcggcatggaaattgttaggcagctgcaaggtccactgcatgcaatatttgtacctgttggaggtggtggattaattgctggaattgctgcctatgtaaaacgggttcgcccagaggtgaaaataattggagtggaaccctcagatgcaaatgcaatggcattatccttgtgtcatggtaagagggtcatgttggagcatgttggtgggtttgctgatggtgtagctgtcaaagctgttggggaagaaacatttcgcctgtgcagagagctagtagatggcattgttatggtcagtcgagatgctatttgtgcttcaataaaggatatgtttgaggagaaaagaagtatccttgaacctgctggtgcccttgcattggctggggctgaagcctactgcaaatactataacttgaaaggagaaactgtggttgcaataactagtggggcaaatatgaactttgatcgacttagactagtaaccgagctagctgatgttggccgaaaacgggaagcagtgttagctacatttctgccagagcggcagggaagcttcaaaaaattcacagaattggttggcaggatgaatattactgaattcaaatacagatacgattctaatgcaaaagatgcccttgttctttacagtgttggcatctacactgacaatgagcttggagcaatgatggatcgcatggaatctgcgaaactgaggactgttaaccttactgacaatgatttggcaaaggaccaccttagatactttattggaggaagatcagaaataaaagatgaactggtttaccggttcattttcccggaaaggcctggggcccttatgaaatttttggacacgtttagtcctcgttggaacatcagccttttccattaccgtgcacaggcctaatttactagcacaatttgcgacgaggagtcagacgatgatggagaaagtagtgtgtgcaactgtctgaa

SEQ ID NO: 23997 - DNA, 782 bp, Zea Mays
tttcaacagactcgcgtcatagcttttccttcgtttggtatctttgccgaggctgtgcgattggccatctccccctcgcgctctcgtgccctcacacgaccttctgctccccgcactgttcgattctgtgtcctcgtgcccttctgtgtgctattccgctcccgcttctgctgccgtgcacaatcgttgccatcacggccgtcttcaccatgttcaggccgccgcgtgctcgtccaacgacgctcgtggaaaccagcgttctagagagtactctcgcttcacagatgcctctagacaggatccgaagccaggtcgttgggtgggggagatggaagactgcggtttggagccctacactgactgctacaggaggcttcggctttgggatgaaggtatgcgtgatatggagatataacccgaaggcaggatgaacggacgctgaagctgtggctgaaggagcttcgtcttagtataatgatgaaggtggaagatgaaaccgacctaaaggggaaaaactacttagtccttgatagcccgccttatgattatcagtaaatatcagggacatgaatgtaattttatccggactgcgccacgtgcttataaatagatgaacagtaacaccatactgttcacgctgaatggtaatcactctcgcgtcactcttgcattttcaccttctggcaagccgaaggtattgatgtaatataaataccattgatgtttatccatgtttgtaaaaagagaatataaataatctaatgatttgtaatgattattcg

SEQ ID NO: 23998 - DNA, 1721 bp, Zea Mays
agaggattccccttctcaagctggattaagaccacaggacaatctccaagcaaaaggctcatggttaatgcatgcagctggcccaagctcagatgattctctgccacctggcttcgaatcattgcagccaaccagcgatctcaaaattgacatgtcccaaatcgctcttattaggtggagatgcccaccacagatattgtataatcctgattggtgtgtcgctgctggagaagaaagtgaggaggttgccttgcagaatgagaggatgtttggagcactggaggctatatatccacgaccatcgaacattcctccaaacccattggttactcctgatgtgaaagactcccagtatgatgattcccgaacccaattggttcctttgctcccagttgaagaggatgatgcctctgaccagttcgaagaaccacctgttggtctaccaagtagttaccaccagtcagataagtatgatgatgcaatatccagggtcccacaagcctcagatgctctctttaccactgcacaacagcagccgaatggttccatcaacacaacaaggtctggtgtccccgccgaagcagacgtagtggctgctgcatctgctgcttacactgcaataatgcaaagcaaccaaatgggaaacatgattgaccaagatctgctcatcaaaatactaagtgatcctgcccaaattcagaggctaatgaaagaatatggtgcgcttaaacatgaacagtcaaccaacagttctgtggcgtcaatggtgcaaggtccaccaccccagatgacagctagtgtccccgtctctatcccagaccgttccaatgcatttcacaacataaaccctaagctgccgcctccacctgttccgaatcgtctacctccagcttcagttaccatgaatgcaccagcgagttcaagtcaagcaattagctttccaagtggcccaaccaggggtttgaactattaccagaacctgatccatcagcatggaggggagaggcaggagccacttcagcagcatggaatgcagtttgcaatgcatcaccagcctcttgcctcgcaggccagtgccgctgatgttgtcagcagtggtgctatgccagctagggataccaagcaaaggcctacgaagccttgtgcttacttcaacagcgcgagaggatgccggaacggtgcgaactgcacgtttctgcacgatgtgtctgccgcgaggaaagaacagtcaaagggttccaaaaggattaagcttgacagcagaatagccgggcggtattgaggggctgctgccgccggttgatttttgactgttcatttcgccttttttccccttcaaaaacgtttcagtaaatattgcgccccagctccttgtttctttcacttagccaatttctctttgttgactaaatgaggtgttttagaagaaagaaaaatatcccacgatttattggagctatgtcgtggtagctacgccgtggtcatttgtgttggttctgctttttttttttgtcaagaccgagaaatgcatagttgcatactttaacatatagaccttaaataaaaagaacataaaacgcgaaaacagagtcgtttgtcttgtgtcttggtccatgggagccgataagctgttggaaacttggaatatcgttttgcttggtgcatctctattttgcccgacttggtgcttgtaagagcaactccaacaactcctaagaaaa

SEQ ID NO: 23999 - DNA, 2063 bp, Zea Mays
aaacttctccgctctcctgtgttcttttccgacgaagcagcagctgcaacgactccttaccaatcaaaccaatcccccgtcatcttcaagctccggggatctcagccgccaaatccgggccgtgctcgcgcttgggcatctgcggcctacgatggggagcgagtcggagcccgccaagggcctgttgccctacctgcagcgcgccgatgagctgcagaagcacgaacccctcgtggcgtactactgccggctctacgcgatggagaaggggctgaggataccccagaaggagcgcaccaagaccacgaactccatcctcatctccctcatgaaccagctcgagaaggacaagaaatcgttgactttggggcccgacgacaatcttcatttggagggatttgcattaaacgtctttgttaaagcagataaacaggaccgtgctggacgagctgacataaacactgctaaaactttctatgctgcaagtatattcttcgagattcttaaccagtttggcgagcttcaacctgatccttgagcagattgagcaaaaacagaaatatgccatctggaaagctgctgaaataagaaaagctctcaaagaaggccggaagcctgaagctggaccgcctggtggggataaagatgaagcacctgtcagtaccaccaccatttctcaagatatggggcaaagtccttccttcagcagtgtacaccagggcagtgaagcatcacctcgacctgtcaacatggttatttcccagcttctctttagtgtttgcgatttgcaatattttgacatggttacatagtttcgtcgaacaaaacagctttacttctttttttttttttgaaatataattttgtgcacaggattttagtaggcgggatagcttttctgctgtgcagccaggaaataacgtccctcaccaaagtacagagttcaatgatcatccctctacccagttaccctattcaccgccaccaccctcacagtcccagcatccttctccatcacaatcttattcctctccctcgtatcaggcaacaacagattacccttcttctgattttcacaaaccatcccccaattattcaactcccggctacacaagcacagatttccctaccaatgaggtccacaaaccaccttccaattattccccacctccttacacaaggacagatcgcccttccaatgacggctacaatcctcacagcaatggtaaaccagatgtttcggcttaccctcaggcatatcaaccctcaccctacacatttgaccctcagcacaactctcaaaactactactccacggaagccccagctgttccatacaactaccctaatttccagtcatatcctagtttccaggacaacacgtcagcttctgttctgacgcatcagtcttcattctatcctgaaagtgatgatcccgcagctacatcacacactcctgcctcaaattcttctgtcccaacgcactaccacccaaccgctgactgttcacctcaagtcactcctccagctgcgccaccagctagccagtatagatatgatagcagttaccagcctgaagttgagaagattgctgaggcccacaaggcagccagatttgcggttggtgctcttgcgttcgatgacgtatctgttgctgtggatcacctgaaacgtgcactggatcttctgacgaacccatctgctgaaccccattagctctttgcaccaccgagctcttgtcagaagcatcatctgtacaaatacaagattggtataccaccatggatatattgccaggtcgcgtacatatgagaggggttaccacacaaatctaggagataataagcgagccgtgtgggcttttgaagtcacacttaaggaaaccttattgtgcaaaattcaattatcttattcagagttctgttctacgtaatccattgtattcatttgaatattcttgaggtctggtatggtattttgggtatggacggatgatgcagtgcctgctttgtttgtctcttccatgatttgtcatgctgctgtcaccctcgtgaagatgattt

SEQ ID NO: 24000 - DNA, 2083 bp, Zea Mays
gctgcctagcctcattgggtcccatacattggaagaggcgtcttaacaacaacagcctttctggttcaattccaaaatcattaactgctatcactgcactccaagttctggatctgtcaaataacaatttgtctggagaagttccatcaactggttccttttctttattcacccctatcaggaagtagctcttctagtactggagcaattgctggtggagtggctgctggcacagccttgctatttgctgttcctgcaattagttttgcctattggcagcgcaggaaaccacaagaacatttctttgaagtacctgccgaggaagatccagaggtgcatcttggccagcttaaaagattttcactacgagaattacaagttgcaacagatggcttctgcaataagaacattcttggaagaggtggatttggcaaagtctacaaaggacggctggcagatggatctttggttgctgttaagagactaaaggaggagcgcacgcctggtggggaattacagtttcaaacagaagttgagatgattagtatggctgtacacagaaatctattgcgtcttcgtggattctgtatgacaccaacagaaaggttgcttgtgtatccatacatggctaatggaagtgttgcatcacgtttaagagaccgggcaccagctgaacctccgctagattggcaaacaaggagaaggattgctttgggttctgctaggggcctgtcttatttacatgaccattgtgacccaaagattattcatcgtgatgtcaaagctgcaaatattttgttagatgaagacttcgaggctgtggtgggggattttggtttggccaaactaatggattacaaggatacccatgtaactactgctgttcgtggaacaattgggcacattgcacctgaatacctttcaacaggaaaatcctctgagaaaactgatgtatttggctatggaattacacttttagagcttattacaggacagcgggccttcgatctagcttgccttgctaatgatgatgatgtcatgcttcttgattgggtcaagggattgctcaaggagaagaaactggagagtctggtcgaccaagatctagaacacaactacgtcgacgttgaggtggaatctctggtacaggtcgcactcctctgcactcagagcaaccccatggaacgccctaagatgtcagaggttgtgaggatgctcgaaggcgatggtctcgccgagagatgggaggagtggcagaaagcggaagtagtacggcaagaggtcgagctaggccctcatcgaacttcggaatggatcctcgacttgaccgacaacctccacgctgaacagctgtcagggccgaggtgaaggcagctttggactcactgattcttgtatcttgcaagggcaatagcgatgtgtatcaatcatcctagtcaagaatcccccatttgttcataccaatcgttgggtgaagcgaggagatgtggtcagccatgatgtgcattggatgtatgttgctgaggtgacatggctgagttcatatatgcgagggcagcagagctcgacaagctagtgtcgtgcgctgtcggtgcatgcactagtggtcctggatttgcgaaggttggaaggaactgacgcgaaccgttctgactcccctcctacaaaaggatcggatgatataggtgtgcctatggacctgttctgggtggcaaggttaatcagaagtttccgtgctgagtgttgtaattatgtctctagactgtactctgtagtggcgaacttaagagttagtttgatggacaggaaaatgaaggggattcctctcctatggatcttctctatttttctgtccaaactaaatcagccctaatgagggtgggacgttagggtggggatgtatagacgtcatgtaatggaggaggtgcatatttcttagggtacatctacacatcctaaactgaatatagcttcgcccccctatttatatcgatgatctcaattttcgtgcatgtcggttaaccagtcagtactccagatggtaccgtgcatctcgccccaacttggcgtaacttcattctag

SEQ ID NO: 24001 - DNA, 713 bp, Zea Mays
gtaaatagtattaccgtaaaaaatatcaagccaagtgagagacatcatattcatcatcataaaatcctcgaatcaaatgtgtaaagtagtgcaatggtcgatataaaaggtaatcatggaggaataaacatggatttgatgatggcgtcgccgaaggatgccccaaagccatcagaccggaggagaccgtccccggaagatgcccgaagcacgctgggtcggaggatgtcacgtggcccacaacacggagggagaaccccgcatgcgcctccagggagccgtcgcagtcgcgcctacagatcggggagttgttgtcgtcgtgccttcggatcgaagaactcccaccgtcgcaccgccggatcgggtagctgccaccgtcgcgccaccggatcaaggatacaccgtcgttgctcctccagatcggggagccaccgttgtcgcgcccgagtcagggagccgccgcgacatcggatcagggagcggccaccggtcgtgagttcggaggcagccaccgcacttggtgtcaccatcgcgcacgttccgtggcaccgccgccacatttcgctttcggggaaccgccgccacacacgtgtctgggtgggcgtcatcgctcatgtatcgggtggggcatcaaaaatcgaaccctagcggtttgatgctccttttatagacgctcaggacctggtgcggctgaattcgatggcagcgttggg

SEQ ID NO: 24002 - DNA, 2829 bp, Zea Mays
tggaactaggtcaaaactcatattgggacgatgacacacatagcatgcagctctcatttggagttgatgagtttttgataattgctccgctgagtgccagtggtgtgatcctcgatgatccagaatcaactaagcttttgagttctgtagcaattgctctttctaattgtggcagcaattggccagcgtttgtaccagttcacgacccttcacggaaagcctatatagggattcaaaatctgggaactgtatttactcgaagatttgaagctgaccgaattggtagtcaagtgccaataagactcatgcatctggaggggttacatgagctatttctgtcaaaatttgtcctatcctcgtcagattttccagctagggtaaaggttcacttctcaatgaagcttagctacaagaccccagaatatgatcatgataatgaaactttagattctgaagctactgagccattgactgaaaatgaagttgtgaaccaccctagaaaactatgggacgatgattgcccttgggcagagtggtactctgctgaggatcctgttaaaggttttgagttgactgccatctggggagagaggacatttgaagagacccttgagatggctgaagtggaaaatgcctcgtcctttgatgctgatagctggttccttcacccagttgtatctcgatacatggtagatgattctattggaaaatttgttgggtttgcatcccagctacatcttctagtaaatgcatatgaatcatcagtggaggcacaatttctagaagactttgttgcagatacttcaggccaggataatgcaaaatctactgctactgtgcctccaccatcagttattgatcgtgttatgaaagatcttttcagtgatgagactggcaactatatggaagcagaaaacaagtatagtcgtgctatgcgaggtgcacctgcagattcactttttggccagttctgtttgcatgcactgtggtttggcaactgcaatatatgcgcaattgctacactatggattgattttgtgcgggaaattcgttggtgctgggaggaatcagaaagattgcctaggatgaaaagcacttcaagcattgatctctcttcttgtcttatccaccaaaagttacaaatgctcacgatatgcattgagaggaagagatcactgaaccgtgagaaaggtactggctacaaagatgagacttcaaatagtacggcagtgaacaagtctaggaaaggatcagctggtgttgtgcctaaaatgatgctcctgaatacgtttcaggaaatgcatgctccatatactcaggatgcacctttgatgaccgaagatatgcatgaagaaaggctccatgcagctgaagcttttggcaatgccattggtctatctggacagctggaaagggatatattatgttccgatatgtctgcttttaaagctgcaaacccagatgctgtctttgaagattttattcggtggcattcacctggtgaatggttgagcgaggacaaaacagatggtaatgcaggctggcctcccaaaggaaagctttctcaccgtatgtcccaacatgggaatgtgtggcgcaaaatctggaatgatgctctgccattgcctgtttctgaacagaagtctttgcttgaccctgttcgggaaggagaaaaggtgcttcattaccttgaaactttaaggccacagcagctccttgaacaaatggtgtgtacagctttcaaatcatcagctgatatcctgaataagaccatgtatggtggcttcaaggaaatgaagacaaaaatggatcgactatatgtcaccatggcgtcaacactgaaatcttttctagggaattctgatgtcaatgatttggttggaggcctgaaacggctttgtcaagtttttgagcacatcgagaagttactgattcttgctgcttccatcaatcggaagcttattgatgctccacgactagctcaagcaatattttacgactactacaacttctaccttccaaaaatgggaactagcctggaaagcatttgctatgagaaggagttcacaactaaggaaaaggtcgggatgtatgagagagatgctgtgtcgaacctgtttcctccccctactgctaatcagtcttggaggaaagttttgagcatgggaaatcttctgaacggccatgaaccgatgcaaagggaaatcatattctcagtccaggagagaataagcaacggtcattattcgagcccaaccccattatgtaccaacaatgagaagatccagacacataggatgtatatatctgggacatctaatgacctttgggttgcattgtctgtaacgtcctgggattgagctgcacgatgtatgagaggagcaattggtgttttaattagcttagaatcccgttggtgcagataaactatcattgtattttttttttgttggatgtaccagaagtccagaaggggccaccaggacatggctagtgacgcactgaggacaagcatccatttttgacatcagatcaaagtattgattatttacgtcttgtagcagtcagaactcagaaatgctaatatattcttggcttcctctagagaaatggttgtagacaagctctatttggctgacgtttttggtctgttaggtggtgggctggtgagttgcaacacacacactggggttgatgtacgtaaacatcttgtatgacttttgcaatgagctaggctttgttcaatactcgagtccatgaaattttcaatatttgatatctgcccgcatttttttagatgggttcatcccatgtattcgcagttcgcac

SEQ ID NO: 24003 - DNA, 2999 bp, Zea Mays
cgtcatgcaaaggcaaacatagctcctgtagtcctgttcaccacccttttcgttctcgtcttcctggctcccggcggcacccacccgttcccggagcaaaaataaaacgatcccaaaacacaaaagaatccgccacctcgccggcgacaggggcgacctcgcgcgccccggccggtgctgaccccgacttctccatgcatccattctgctgcgcgcctctcgtgcccgtatcgcccgcggcctctgccgcccccgctgcgtcctccgctgtggcgggcacccaggccgtgatgccgccaccgcagcccccgccgttgccgcctccgccgcctcgaaacaactccgccactggcggtgagaggcgcgcgcgcgcagcgggggtcagcggtggtggaggaggcgattcctcgccgctcgagggggtgaagctgaacgagatcgtcggcggcggcatctcgggaatcatgtacaagtgggtgaactacgggcgcgggtggaggccgcgctggttcgctctccacgaaggcgtgctctccttctacaagatccacgggcccgaccgcatcatcctatcgcgcgagaccgagcggggcgccaaggtcatcggcgaggagtccctccgccgcctcaaccgcccctccgccttctcgccgtcccactccaacggccaccaccaccctcgaaatcccatcggcgaaatccacctcaaggtgtcaaccgtgagggagagcagatcggacgacaggagattctccatcttctcggggacgaagacgttgcacctgcgggcggagaccagggaggacagagctgcgtggctcgaggcgctgcgggtgaccaaggacatgttcccgaggatgtcctctagcgagatggtcgggccaggggacaccgctgcggcagtggccgtctcaaccgagcgcctaaggcagcggctgcagcaggaaggggtcagcgaggcggccattgctgacagcgagaggatcgtgcgagaagaattcgaggctctgcacaagcagcttgtgctcgccaagcagaagcatgcgctcctcttggaaactcttcgccagctagagacagaaaaggttgatttggagaatacccttgttgatgagagccaaaggcagtcaaaagagtatggatctgcttctaaaccaaggcatgagaagtatagtgaaggaagtgctagcgaatctgatgattataatgaaccacaagatccagctgaagagactgacgatgaagcaaatctttactttgatacaagagattttctatcctcaagctcttttaaaagtagtggatctgatttccaaaggtctgaagctggttcggatgatgaagatgattatccaatggatggaattaatccttctatgaagtctatcggagttagttatgcatatgtaagaagacggaacaggctgccagatccagttgagaaagaaaagggtgtaagtttgtggtcaatgatcaaggacaacataggaaaggatcttacaaaagtttgtctgcctgtttacttcaatgagccactctcatcgctacaaaaatgttttgaagatcttgaatattcctaccttattgatcgtgcatccgaatgggggaaaagggggaatagtcttatgaggattcttagcatagcagcatttgctgtttctggatatgcctctacagatgggaggagctgtaagccttttaatccccttcttggggagacatatgaagcagactatccagacaaaggcctccgttttttctctgaaaaggttagtcatcaccctatggttattgcatgccactgtgtgggaactggctggaggttttgggctgatagcaacctgaagagtaaattctggggtcgttccattcaacttgatcctgttggtgcattaacactggagtttgatgatggtgaagttttccaatggagcaaggtgacaacttcaatttacaatctcatattgggcaagctatattgcgatcactatggtactatgcgcatacaaggtaattgtgaatattcatgtaagcttaagttcaaggagcagtcaattatcgatcgcaaccctcaccaggtgcaaggtgttgttcaggatagaaatggtcgaactgttgctacactatttggaaaatgggatgaaagcatgcactatgtaatgggtgattgctttgggaaaggcatgggaactgaacagttttcagaggcccatttgttgtggaaaagaagcaaaccacctaattttcccactagatacaatctcactcgctttgcaattacactgaacgaacttacccctggattgaaggaaaaattgccaccaacagactcaagattacgaccagaccagagatgtctggagaaaggtgaatatgaaagggcaaatgctgagaagttgaggcttgaacagaaacagcggcaggcacgaaagatgcaggatagcggatggaagcctcggtggtttgcaaaggataaagctactgacacataccgttacctcggtgggtactgggaatccagagaaaagagcagctgggaaggctgccccgacatcttcgggcaagaccctaacgatctgatgatagctgactaggtttgagtaggttataggtcttttggttctctttttcgggaacgcataattccggaaatttttagtggttcatattatagagcaattaaatggccgttgatatgtaagcattggcagtgcctcagggagtattgatctcgtacataataattagacaatggttcgtctcacatgtcaccttatttttttggcaaagtatttttagccctcttgtgaggttttcacgctcacaagttcagtcttcagagtggtggtataaggtgggcgatcagtgattcaccagtatatggctattattattatataaatgtagtcttatactggatatgtaactacacatacaagtgcaggagggcgtgactttgttcatcattttggtggagtgctagtaaagatattaagctg

SEQ ID NO: 24004 - DNA, 3167 bp, Zea Mays
gcgaggccgaggccgagacctcgaggcggtcgcgtggcgtctcggaacccgggaggaatccacagaaaaatccgcgcgtggggggccgaatctctgctcctggggcgagccggcgaggtcgaactgattcgaggctcgttctggtagagtggaatgcgtcggatttgagctgcttagggttgggattggggggtttcggtatttctttttcttttttagctgcagttttcgtccctctcctgtggccttcctttactcccgagtcccgacgacgacaggagcccttcaccggcgacgcacccttcgccgggcacttcaccgccgacgaccacgctcctgatgaaagaggaaatcatgtttgacaaccaaacaaagccatgcagatcgagggttgactccaaaagcaattcaagttctctgaaacctaagtttggatcatcatggggttcccaaattgtcaaagggtttacaacagacaagaaaaccaagaagacagcagcaaatgcaagcaaaaaaccacctcttccaagtgtcgaaaatgttaatcaggccaaccaacagattccgtatcactctagggtgaaaagatcccttattggggatttcccttgttcacctgctggtgctcaagtccacccccatgtctttgattgccacaatattaggtcccctgcatcccatgatctttttcttgagctggatcatctcagagagcagcttcgtgagtcgaaagaaagggaattgacattacagtcagagttgagacagtgcagagaaaacccaaaagtttcagaacttgagaaggagcttgattctatgagggatgaagttgacaggcttgcacgactgaaaatttcattagaagctgagaaaacaagcatatctgaacagttatcagctctatcttctatggaagaacatcatgaagaaaatgtaagattagatagccacggcaatcggatacttactgtagatggggacaatgcaccttcagaaaacttggagtttgaagttgttgaactacgccggttaaacaaagagctacagtttcagaaacgaaatcttgcaattaaactctcttcagctgaatccaaattggctggccttgagaagaatgaagagagtgatattgttgccaaagttcaagctgaggcatcgttgttgaggcatacaaatgcaaacctcagcaagcaagttgagggattgcaaatgagccgactaacagaggttgaggagcttgcttatctacggtggatcaattcttgtctacgccatgagctttgtaactcagatcaagcagctagagcaacgacggatatagattacaatggtggcatggcttttaatgaggatgataatagcgaaggtgatgcaaaaacttccgaggacagttctgatataaaattcagcattgcagaacgcatcaagcagtggtcccagaatgataagagctgccaagcatcgaaaaaggaatcccttcttgatagggcatggattgaagctgcagaagcacgaagcccgacacgtaggcactcactcggtggaccaaagggatgtgcacaagacttcaacatcattaaaagaaggcaatccgatacctttatcagcctcccggatgcgacagatgagtcatttgcctttaataaggatcctgcaatcagggagaagcgtgatcttcttgtagacaagtatgattttggtcgatctgaaagttcaagatttgttctcagcaagccagaagtatgcaaatcacagtgtctggatgttgaaaagcgtgcgttgcgcatccctaatcctccaccaagaccttctgtttctgtgtcaaattctggtccatcaaatggatcgactgtaaatccaccgcgaccaccgccgccgccgccgcctccaaagttttcctcaaaaagtactggggtcatgaagagggcacctcaggttgcagagctctaccattcacttatgagaagggactccaaaaaggatacttccggtggcggaatctgtgaagcagctaattctgcgaatgtgcggagtagcatgattggtgaaatcgagaaccggtcttcccatttgcaagctatcaaggcagatgttgagactcaaggtgaatttgtgaaatcattaatcaaggaggtgactagtgcagcctacaaagatatcgaagatgtggttgcatttgtgaagtggttagatgatgaacttggcttcctagtggatgagagagcagtgttgaagcattttgattggcctgagagaaaggcggacactctacgagaggcagcttttggctaccaggacctgaagaagctggagtcggaagtttcaaactacaaagatgatccacgcctgccctgtgaaatcgcactgaagaaaatggttgcattatctgaaaagaccgagagaggtgtctacagccttctaaggacaagagatgctatgatgaggcagtgcaaggagttcaatatccctacagactggatgcttgataacaatcttattagcaagataaagtttgcttctgtgaaattagcgaagatgtacatgaaaagggttgcaatggagcttcagtacatgggtcctctgaacaaggatccagctctggagtacatgctgcttcaggctgtgagatttgccttcaggatgcatcagtttgctggaggtttcgatccggagaccatggatgcattcgaggagctgaggaacctcgttcacgtcagaaacagcacccagtagctaggacgcggcaccgcaatgtagtgtttgaagaagaggattagttttcagactctcaggcttaccatctcagtaagcgtagcaggcacgatttttggtcgtgtgatgtttgcatgtgttcctgcgtggtgtgtttcagtgtttgcagtgtgtaagatatgtttgttctgtaccgcgtgtggtgggtgggatgaagtgacccgccggcgctggcttttaacctcactgttgccagaaaatagaaaacgcactgggacatgcacatgcttttgttttgtgcctattgagcacagaagtagcggtggggttttgatttgagggtttgtttaggacgtattcaattgctttggatattgtcggagaccataattaggggtacctccaagacttctaaattcggctggtaaccatcatcagcacaagctgcaaaggcc

SEQ ID NO: 24005 - DNA, 1124 bp, Zea Mays
cttggtgtttgctgcctcaaacaaaaaaaagggaaagcttgggctttgccaagctcaggtggtgggatggccaccaatccgaagctaccgcaagaacacgatgtctaccacccagctgaagggcagcaaggaggatgctgaggccaagcaggaccaggggttcctgtacgtcaaggtcagcatggatggcgcgccgtacctcaggaagattgacctcaagacttacaagaactacaaggacctgtcgactgcgcttgagaagatgttcagtggcttcagtactggcaaggatggcttatctgagtaccgcaaggatggtgaatatgttctgacttacgaggacaaggatggagattggatgcttgttggcgatgtaccatgggagatgttcgctgactcttgccgcaggctcaggatcatgaaaggatcagatgcaattggacttgctccaagggcagctgataagtccaagaatcgcaactagaatggttgcttcttacagtccagagcaagagggagatatccagtgactgtagggatctttgtggaagccggaaaacgtctaacagtttcaagaagaattctgccttatggtctgtaccacatgtttttgctgctacgcaagtaaagaactccacgtctgtcaatgttagttttacaacatcgtctacggacaaaaaaaaaaccccccgctatttgattgttgctaagccttcgtacgacgtgtaaatggtttggtacaatgagtgctgcgactacgattgagcacccctctacctagtttgcaaaaaaacagtgtcccatggactgtctgttgtccctctatataaatgtccaatgaagcttgctaatgtgtggtcatcgtgttcatgttctggtccattcatctcgacagtgttgaaaccctgacgaagcaacttgtttcgaaagtgggcctcctctgtggagcagtttctttgtggaaactttgattcctctttttttttcttttttttgttaccagctttgatgcctaattgctggtggggcatgcagcgtatgcgattatttgtctgctgctgaaggtcatgatggttaccatctatgatcccacaccaaagtgtcattttttttaaaaaaaaaga

SEQ ID NO: 24006 - DNA, 982 bp, Zea Mays
gaaaaaaaaacaaaaaagccgaacaaaaaacacgacgcggcacagaacatagcaccgcaccaccgcaccgggcctcctccgagtctccgacctcctcctgtcttcggtgtcgtcgcccgcctccccatgaggccgccctcgagacatgcctcgtagcctcggcgtcagtagcagcagcagcaccaggcgctccctccgcgtcgcgccccccgcctcacccccgctgcggcggccgccgtcgccggcatggccatgccgttcgcgcgccgcgacatcgaggcggcgggcgccggcgccagcagcgacgactctcctgccgctaagaagggcaagcccgagctcgcaggggcgcgcccggctttgacgaggtccgaggcgttcgcgttcgcggccgtgctcgcgctcttcaccgccgggatcttctgcgtcttcctcaccgcgccacgcggcgagtttgggcagatcctccgcctcccgcgcagccttgccgacgtccgccttctcaaagacaatcttgctgtttacgcgagagattaccaaacgaattttatattgggttattgctcaatatacatcttcatgcaaacattcatgatccctgggacaatattcatgtctttacttgctggggctctttttggagtgattaaaggtggcattttggtagttttcactgccacagccggtggatcttcttgctattttgtctccaagctgattggcaggcccttggttagttggttgtggcctgaaaaactgagatatttccaatcagagattgctaagaggaaagaaaagctgctgaattatatgctttttctgagaataactccaactttgcccaatacattcataaatatggcgtcaccgattgttgacatacctttccatattttctttgctgcaacactagttggtcttattccagcatcttatattactgtaaagtttgatcagtgaagatgaaagataacatgtgtca

SEQ ID NO: 24007 - DNA, 2748 bp, Zea Mays
gtcgcttcccaggcacgactccatccccctctctctttctctctctctcttcgacgactcccgccgctgtcttccactcgggggccgccgagaagcttggtgctgtccctcatggcctgtccaccgactctgaggttgcccagagggaagctgagtctatctctaggaagactcttaggagctccgccgagaagtttgagttccaggctgaggtgtccagactcatggacatcatcatcaactcactctacagcaacaaggatatcttcctgagggagctcatatccaatgcctctgatgcattggataagatcaggttcctttcccttactgataaggaagttctgggtgaaggtgacactgcaaagcttgagattcagattaagttggacaaagagaagaaaatcctctccattcgggataggggtattggtatgaccaaggaggatcttattaataaccttggaaccattgctaagtctggcacttcagcttttgtcgaaaagatgcagtctggaggtgacctcaatcttattggacagtttggtgttggcttctactcggtgtacttggttgctgactatgtcgaagtggtcagcaagcacaatgatgataaacaatatgtttgggaatcaaaagctgatggatcgtttgctatctccgaggatacatggaatgaaccccttggccgtggaaccgagataagattacatctgcgagatgaggccaaggagtacttggaagaggataagcttaaggatttggttaagaagtactctgagttcatcaacttccctatctatttgtggtcaaccaaggaggttgatgttgaagtgccagctgatgaggatgagacaagtgaagaagaggattcgtccccagaaactacagaagaagagacagaagaagatgaagagaaagagaaaaagcctaagacgaagacgataaaggagactacttctgaatgggaacttctgaatgatatgaaggctgtatggcttcgcagcccgaaggaggttactgatgaggaatactcgaagttttaccactcactagccaaggacttcggtgatgacaagcctatgggttggagccacttcactgctgaaggagatgttgagttcaaagctttgctcttcattccaccgaaggctccgcatgatctctatgagagttactacaacagcaacaagtcaaacctcaagttgtatgttagaagagtgttcatctctgatgaatttgatgaccttcttccgaagtatctcagctttttgaggggtattgttgactcagacacactgccgctgaatgtgtcacgagaaatgctccaacaacatagcagtctgaagactatcaagaagaagctgatccgcaaagctcttgacatgattaggaaacttgctgaagaagaccctgatgagtacagcaacaaggataagacagatgaagagaaaaatgagatggaggagaagaagggccagtacgccaagttctggaatgagtttggcaaatcaatcaagctgggtatcattgaagacgcaactaacaggaaccgccttgcgaagcttcttagatttgaaagtaccaagtcggatggcaaacttgcctcccttgacgagtacatttcaaggatgaagccagggcagaaagacatcttctacctcacgggaagcagcaaagatcagctggagaagtctccgttcctggagaggctaaccaagaagaactacgaggtcatcttcttcaccgaccctatggacgagtacctgatgcagtacctgatggactacgaggacaggaagttccagaacgtgtccaaggagggcctgaagctgggcaaggactcgaggctcaaggacctcaaggagtcgttcaaggagctgacggagtggtggaagaaggccctggagagcgagagcgtggactcggtgaaggtcagcagccggctgcacgacaccccctgcgtcgtcgtcacctccaagtacgggtggagcgccaacatggagaagatcatgcaggcgcagacgctgtcggactcgagcaagcaggcgtacatgcgcggcaagagggtgctggagatcaaccccaggcaccccatcatcaaggagctccgcgacaaggtcgcccaggacaacgagagcgaggagctgaagcagacggcgaggctggtgtaccagacggcccttatggagagcgggttcaacctccccgaccccaaggagttcgcgtccagcatctacaagtcggtgcacaagagcctggacctgagccccgacgcggccgtggaggaggaggacgaggccgaggagcagccggaggtggaagagaaggagccggcggccaaggaggggtcggagccgtccttcgacaaggacgagctgtagtcggcgtgctgtggtctcgtctcgtcttcgggatctgttttgaagtctagctgtagctcccgtttagttgagatatcggggagcccactcactgccagctttgtgtttaggaacgtgatacgggatctttttttttttgttgcctgtctttgtacttgtacaaacctcagttcagtgactcggtctaattaccggctccgattagtgaactgtttctgtctgattagtgagctcaccgacatccatagggtggcgctccctcccttctaatttaacttgtattcttaagttcagctgctcagcttttgtagcttcggtcggatttatatgaagatacaaaaatacaaaccatgtttatagcaag

SEQ ID NO: 24008 - DNA, 3515 bp, Zea Mays
cccgcacggccggccgcgctgtcctttgtacaagaggagatgggatggtcgccacggcccccgcccatcacccgcagcaccgcatcactccgcctcgtcccccacttctcgcacttccgcttcagcttccaccgtgcccaagagtcacgaggcggcggcgggtcacgccgacgtactctcaggtgctgcggtgggactgcccctgctgctgccgcgggggcggcggaggggaggatggccgcggcgacggcggcggacatggtgtgggtgagggtgcttgaggatggcgtgttccggttcgacgcgtcggaggcggcgcgcgccgccgcggggcccagcctctcgttcgcggacccgcggcggcgggaggcgccgcatgacggggccgacatgcccgccgttgtcccggtatgcgaggtcgcggcggggggatcccagaaggtcgtgataaaggttttcacatggaatacagatgcatggggttttgggccaggaaccacttcgttgtaccagtcacacccttgggttttggctgtcctccctgatggaaaagcattgggtgtccttgctgataccactcggcgttgtgagattgatttgcgacaagaatcaactataaagttctctgccttatctgcctaccctgtcatcacttttgggccatttaatactccagctgatgtcatgacatctttgtcgcatgcaattggtactgtgtccatgccgccaaaatggtcacttggctatcatcaatgtcgttggagctatgattcttctgagaaagtactcaaggttgttaggacatttagggagaaagacattccttgtgatgttgtctggatggatattgactatatggatggttttaggtgcttcacgtttgatagtatccgattccctgatccaatatcaatggtagatgatctccattccattggttgcaaagcaatctggatgcttgacccagggatcaagaaggaggagggttactttgtttatgatagtggctcaaaaagcgatgtttggattcaaaaggcagatggcagtccattcgttggggaggtgtggcctggtgattgtgttttccctgactatacatctgaaaaaacacgagcttggtgggctagtttggtaaaggacttcatctctattggtgttgatggaatatggaatgatatgaatgaacctgctgttttcaaaactaccacgaagacaatgcctgaaagcaatattcataggggagatgctgatattggtggtgttcaaaatcattcatactatcacaatgtctacggaatgctaatggcaagatctacttataaaggaatggaaatgggcaatgcagctaaacgaccatttgttcttacacgagctggttttattggaagtcagcgttatgctgcaacatggactggtgataatctttcaaattgggagcatctgcacatgagtctaccaatggttcttcagttgggtctcagtggtcaaccattgtcaggtcctgatattggtggttttgctggaaatgctactccaaaactttttggaagatggatgggtgtgggtgcattgtttccattttcacgtggccatacagaaactggaagcattgaccacgaaccatggtcctttggtaaagagtgtgaggaagtctgtcgccttgcgctactaagacggtaccggctactgccacatatctacactcttttttaccactcacatacaaagggtattccagttgctactccagttttctttgctgatacacaagaccctgaactgaggaaagttgagacttcctttctccttggaccactcttagtttgtgcaagcactttacctaataaaggagctcatgaatatgcacataagttaccgaagggcatatggttgtcttttgattttgcggattcacaccctgatctgccggtgctgtatctacaaggtggagcaattcttcctgtaggtcttcctattaagcatgttagtgaagcaagtttggaggatgacctgtcactaattatcgcattgaatgaaaatggtaaagctgaaggtgttctctttgaagatgcaggagatggatatgcattcacacagggagactatcttttgacatattatattgctgaactccactcatcagtggttactgtcaaaatcttaaaatctgaagggtcatggaagagaccaaaacgaaatctgaaaataaatatattgcttggtggaggtgctatgataagtacagatggtgttgatggtgaagtaatacaccttacaatgccttctgaatctgtagtgtcaagcttagttgcaaccagcgaatttgagcacaagaaacgaatggagatgattcagcctatacctgatatagaagagccatcggggcaggaaggtgctgagctatcaaaaatacctgttgatttgaaaagtggagactggttccttaagattgtaccatggattggaggccgtattatatcgatggcccatattccttctgattcccagtggcttcacagcagaattgagataaatggttatgaagaatacagtggggctgaatataggtctgctggttgcacagaagagtacaaagtcatcaggaggcaccttgaacaatctggagaggaggaatctatttgtatggaaggagacattggtggtggtctggttctccagcgccagatatccattttgaaggacaacccaaagattgttcagatcgactccagcattcaggcaagaagtgtaggagctggttctggtgggttttcaaggttggtctgtttacgagttcatcctacattcaccctgctgcacccaactgaggtagtagttgctttcacggccatcaatggttcaaagcaagagatctccccggaggcaggagaaataacattcgagggagacctcaaacccaacggagaatggatgctagtggacaagtgtgtcgggctgagcttggtgaaccggtttaatcccagggaggttagcaaatgctttgtgcactggggaactggtgatgtgaacatggagctctggtcagaggaaagaccggtgtctaatgagacgccgttgaggatttgccaccagtatgaggtgcagcaaacaacctaaacacctgcccgaagagcagaaataaaaataccaatttggaggatacttcagttgcttgcacttgttttacggtctctgtattgacggtcgcgcaccataacttccatggtattttggagtcgtgtcgttagtcattaccctcttggaggactttgggtctgctgaaaacatggttactcagcaatatctgctactgttcacgactgacattcaaagggttactcagcaatatatggataaaatttgtgttaaagataagttgtgtcgtgtgggttgagttatgtgtgttgtgttgtgctgtaccttcttctatctattaatggaaagatacgtagatctcctgcgtattcgagaaaaaaaactatatggataaaattttatgaaacatcgtaagtgtg

SEQ ID NO: 24009 - DNA, 1975 bp, Zea Mays
ccattctaaaaaaaatccccgatctactacctttctcctcctctctcacggtctcacctctagtttccaggatgacaaaatatgggatcagattcgattcgtgagcctgtagaacaaggatgctcctccaatccatactaaattgaacccacgcagcagacatccgcgcgcagtacgtccccttcgcgaagcaccgccatcctcaccacgccgccgagtcgggcggcgcatgcgccatggcgttcctattcggcgcattcctgggcctggtggtgggcgtggccgtcgtgatggcgttcgcgcgattcgagaacagccgcgccgagcagcgccgtgagctggctgctacagctgcagctttctcgaagttgactgtacaggatttgaggaagctcatcccacccgagttttatccatcatgggtttcattcacacaaaagcagaagcttaaatggctgaatcaagagctgacaaaaatctggccatttgtcaatgaggctgcatcagagttgatcaaaacttctgtggagcctatttttgagcagtacaagtcattcatcctggcctccctccatttctcaaagttgacacttggtactgttgctcctcagtttactggtgtttcaatcttggagagtgatgattctgccatcatcatggaacttgagttgcaatgggatggcaatcccaatatagtacttgacatccaaacaacacttggaatttctcttcctgtacaggtgaaaaatattggattcacaggagtacttcggctcatatttaaaccgctggtgtctgaattcccctgttttggagctgtttgctgttctttaagggagaagagcaaggtggaatttaccctcaaggttattggtggcgaaatgactgctattccaggaatttctgatgcaattgagaacaatgatttgaatcccatctggaatgagcactatgaatttgtggttgaggacatatctacgcagcacttgactgtaaaaatttatgatgatgaaggactccaatcatcagagatcattgggtgtgctcgagtagacttagctgatatacagccaggaaaagtgaaggatttatggttagatcttgtgaaggacctggaaattcaacgagacaagaaacctcgtggtcaggttcacctggagctcctctactacccttacgcgaagcatgaaggggttcctaatccttttgctaatcagattcaactaacttcattggagaaggttctcaaaaccgagtctaatggatatgatattaatcagaggaaaaatgttattatgagaggagtcctttcggtgacggtcatatctgcagaggagttgccacctatggacattggtggcaaggctgacccatttgtggtcctgtacttaaagaagggagaaaccaaaaagaagacaagggttgtgacagacacgctaaatccaatatggaaccagacatttgatttcatggtagaagatgcactgcatgatttgctcatggtggaagtatgggaccatgatacatttggaaaggattacatagggaggtgcatcttgacactgacgagagttatactcgaaggtgaattccaagatacctttgtcttgcaaggtgccaaatcgggaaaactaaacttgcatttcaagtggacgccacagccaatctatcgtgatcgtgacagggatcagtgagacttgtaaacgaaaaaggccgataaacacttatccccaacggtgctatgtatattagtcgttctgtatttacaaaatcccacggttcttatagccacgtgaccaaaaagagatcaacccaccgacctgtattttctcctttgtgatgcaagtcagcaagtgcatggacctgtatatttgagtcgttaatgaataggaaatgctgttactatgctgcaagcacatatatgcttagtggtgccgtggtggtggttgcttctgtgctgctgtttgttcttccg

SEQ ID NO: 24010 - DNA, 2449 bp, Zea Mays
  misc_feature (2449)..(2449): n is a, c, g, or t
ctccggcctccatcctacccgccgtgctatataatccccacccggttgtcctctgtccggtttcctctcccgttcccctcttgccgcggcggtgtgccccaatcggccaatcctcctattctccccctcacctcctcaaccctactccgacaacagcgggcgctgggagcaaacgaaaactaaaacgagtgagatcgcggcgcccgattctgtcgcggtcgcgcgggtggccggattggattggatcctcggacccccgcgcgcgcgcggagggcaattcgggcacagatccccgcgattccgtcgccggaggcgggcatgagaggccggagggcatgcctgtggtggttcctggcgcaggacgagtgagccggtggcggcgggtggaggaggacctgttgctttgagcctgagaggtgcagtcgtcaaggaggaggaagaggcggcggcggcggcggcggcggcggcggcgggggtgggtaggtgatccgaggcccgaggcggccgtgccatgtctcgctgcttcccgtttccgccaccaggatatgccaagaccgcgcgccccgacggccagctagcctcgcacctgcagcagcagcagcagcttgacaaggagaaacaaaaggagaagaagcataagaaggacaagaaggacaaagttagaaaagaaggtaaagaaaagaaggacaaggacaggagtaaggataagcacaaagataagaaagaccgaaaagaaaaacacagagacaagaaaaaagacaagagcaaagataaaagcagggattcaggtgaaggaattgaaagaaatgacgaggctcaccatggtcagaaggttggagagagcagcaggagatccgaagaaattaaggatcttaaattcagggaggacttggtcagagacgtacaggatgagaaaggggcggcgagtcgacctagtgaaaattatggtgtttcaaatgatcgaaatcgcaaaggcttcagtgcttcacccgcgatggagactgaaaggtttgcgcttaataaagtgcatattcagtctagtaatgctccaaggaaaaatgagggactggtacaacagagcatcagtgccaatcgacaaaagaatgggacatcaatacggcattctgaaagcctcaccacttttgctcaaagaactgtgggtggctttccaccagcaccttcaacggaggaaaaattcaaagctgcaaggcctttatccaatactgaagctgcacccagaaaagaggggattggacagcgaatcagtaacattagcatattggttccaaagagaactgaaaacacaaacagagatgttgcgaagaaagaagttgggacctcctctccattgcctccaaatcctgctaatgctatgcataagggaaatgacaaggttggtaggccaatggagaacacacaagtacccatgcagagatttggcagcccatcgatgtcaactgcagcagtggggatggacagaggaacacctaggtcatccatcccaagcccgagcattacaatccggagaccgaatggaattgtacggccgcctaaaaacatttctgtctcttctaagaaacctgatgcaggagacgtttcacctgctattggtaaggaaaaggaacaaggtggaaggttgctgcaagcaaatatttcaactgatcagaaactggttatgtcaaaaccaccagctgtggagaaagctgcacacggaagtgctgaaaggacggagaaggtcagcagagatggggtgcctgatgttgccaagaaagaggacaaaaagagtgaccggcatgagaaaaagaaaaggaaagagaaagataaacacaaagagaggaaaaaggagaaagaggcaaagaaggagaaagagaagcataattacaaggagcatgataagacaagagagaacaatataagttatccggtagatagtcttaacttgaagccctcggcccctcctgtagccccaccagttgatggtggaaaatctgttgtgcccgatgagaacctgaagaagcgaaagaatcatgaaacgaatggttacctacaaaaccatcttgaaatgcggcctacaaagttgccgagaccagccctccccatcaatcttgtggagaatggtacagcatctcatgtagccgcgccactctcttctgtgaagccagaagccattatcaataatattgaaaaggctgaaaggctgcacaaggaagagaagatgaatggcaaccaacaggctgagcgagcttcagtcgatccggtggctgcctatgagaatggcataacttctaggaagtcgcctcaccccgactgcaagtatcttagccagatatacagcgttcctgaagcacctcaaatgatggaattgcctgggcaggaaggtgaggactggctgttcgaccgaggtggcactaaatcaaggaagcccagttcagcggctgaggctgatgan

SEQ ID NO: 24011 - DNA, 1024 bp, Zea Mays
tccacaagatactcctcaatttcttcgtgccatttgacattccttttttgtgcttcggaccatggcttcggttcttcatcggcggtgtgctctttacaaagccttagagctgcctctcctgcaaagtctgaacttgcagagatagtcccacaagagaaatcaccaaaagattccattcaaccaatgtcaccgagtccaaggtattctacctcaagatgaagggcgactaccacagtcaggtgcatagaggaaggatgctgcggggagcaccatgaatccctacaaagctgctcgagtttcctctgactgttcaccattattggaagcaggtcaggcagagagccttggaaccgaactcttggagatggtgcctagcagggaagaggagattaagttgaaagaataaagggaggatgctttgtcgacttttgtagttaatgattatgtgagacttcagtttaagggctcaacttttactggttcttggaagtcatttagtagccctaagatttcatcagcattcttagtagtaattgctatagtatcaaatgggattgtggtatgagttgctcgagtactaagtactaacgttgttgtacattgtgaagctaagtgggtaatatcaaaagggattaagatttatgtgtggtgcttactgtatttgtttttattattttattgtgctttgtacatgtaccgtcattcttactctggtgttcttttaatgcaaagtttgacacaatatatttttatacgagagaccgaaggttacttagtattgttttctgtttcttttatcgtctttgcagatctatgtttggatgatgaaaacagtgctactcgatgtgaagtccaccaatactatagtttaaattaagtctaagatcggtgctttagagggaattggtaagagccagcaagcacttttttttgctggaattatggtagcagtcaggtttcagatttctatgagttcggtgaataaaatgagcttatgggtgttgtcaatcttttttaatttcct

SEQ ID NO: 24012 - DNA, 4625 bp, Zea Mays
cagagagcaagacgcatgactcagatcagaaaagagaggaggaagtaataataaataagccaaggaagaaagcgagagaaataagagggggggaaacgaaacgaagcggaaaaaaccgcaccccaacaagtgtgtggtggccggtgggctggcagcggcagcgcagcagggtaataaaatccagccagcccctccacgcccggccacaggcgtggatgtacggatgtctcccctgggatgccccaccccgcccccgcgatcctcctccgtctccgttccggccctccgcctccccgccccgtccgtcaaatgattcccaggccctttttccggtaaaaccaccgcaccgaaagggcagcagctcagacgcgcctcgatgcctcgtgctccataaccaacgcccacagcccagccattagccgtgctagtcatcagtaggcgcgcacactcgctcgctcgcagcgcttcgctcgttgccagttgccaccgccattttcccctcgtcggactgaaagagcgctcccccccacccccaccgcggcgggagtgggaaagagcggaggagcatgcgggagggttttcaccgcggcccgagaaaggaggacctgcgccgcgcgcatcgcgacgagccgctccccgctggcacgcacgccaaaaggcgaagaatctctcggctgagcccccccgtcccctccgccaccgccgttgtagccagtaggagggaggaataaaaagcggttttctttcgggcggcaggccggtcggtcgccatggggtgcggccagtccaagatggaggaagagtacgcggtgcgccactgccgggtgcgctccgagctcctcgcgctggccatccgccagcgctacacgctcgccgacgcgcaccacgcctacgccgagtcgctgcgcgccgtcggcgccctgctgcacgacttcctccgcggggtccagtcgctgccgccgccgccgcccgagcccgcgctccgcctcccgcagcagcggaagggcgacggcctccctgccgcgtcgccgccgcccgcgatggcgtcctcctccgccgccgccgccgcgccgcccgtcgccaagcaggtccgcatcgcccccgacgacgggcatatccagttctccgacggcgactccgattccgaggatgggcacatcaagttccactccgacgaagagcccgacccggctcgccgccgcccggaggtcgtccgctccaccggcgcgccgggtcctccgccaccgcagatgggacagccgtatgcctccggcggagggtatgctccgccgccgtatggtcctggatacggttacgggtacgccactgggcctggtccgggtcctggtcctgattatggcggtattggcatgaacggcggcggtggttatgaaccaggccatggtgtcatgtatgggcaaagctatggtggcagcggcagcggcggcggctatgatgaccagggctatggtggcatgggcagtggtggcggcgctggcggctatgaccaaagctatgctggcataggcggatatggccagagcttctttaacatcagctacgctcgcagccagccacctccaccatctgtctcgcacgagcaacgcctggaggcgactaatgccagggtccactactattccggcaatggcgagcagcagccacccccgcgtggctatggtggtgggtactcctacccaccacagagttcaagatcatataatcagtatgcctatggtggttactatggaggtggttctgctcctgcaccaccagcagacatcccatcctcctccggtgagccagcagcagtgccaccgcctccatctccgcccagggtgtccacctgggagttcctggacccgtttggaacttatgagagctactacgagcaaccaactgctacagcagctccatactctcctggcaggagtttgaaggatgtgcgcgaggaggaggggattccagacttggaggacgaagacatggaggtagtcaaggaagcttatggtgatgagaagcaccctgtgaagggttacatggggaacgggaaggccgcaaagggagagggtaggagcagcacgggggatgaattgccccgcaagtccaagtcatctgaggccagtggtagtggtagcagcttggagcatgacgttcatgtagtggaaaaaagtgttgtcggagaacaagttcgacactcggagccacggcagcatgttgccggtctaccacccacaggatcggaaaagctatacattgatgacactgaggtggtggtggagatcaggactcaattcgagcgtgcctcacaatcagctggtgaggtatcaaagatgcttgaggtcggaaagatgccttactaccagaagggttcaggtttcaaagtctccgcaatgattgtttgtggtataccgacaatggaggaggagtttctgcgttttgaagaggacaaggcgatgggctctggcaacctctcctctacactacagaaattgtacatgtgggagaagaagcttcttgaggaagttaagacagaggagacaatgcgggtactgtatgacagaaaacgtgaggagctgaaaatgttagatgagaaaggtgccgaagctcataagcttgaggccactgaagtttacatcaggaagctatcaactaagattagcatagctatccaggttgtaaacactatttcagaaaagattagtaagttgagggatgaagagttgtggcctcaaacatgtgagctcattcaagggttgatgaggatgtggagcgttatgctagaatgccatcagatacaactgcatgccatatcccaagctaaaaacatagactccatgatagacactgcaaagttcggtgacgctcatatggacttgatcaagcggttagagcttcagctattggattggattgcttgttttgttgcatgggttagcgctcaaaagaattatgttaaaaccttaaaccggtggctgacaaatggtgttatctatgttcccgaggaaaccgaggacggggcgcctccattttctcctggaagattaggagggccaccgatcttcgtcatatgtaataactgggctgccagtgtggacaggatatctgagaaagaagtagttgaggcgatgcaggcctttgcatccaacgttctgaacctctgggagaggcacaggtcagagcaaagacagggtctgatggcgaacaaaggcatggacagggatcttagggtgatggaaagagatgagcagtcgatgcgcaaggccctggaagcgcagaacaagaagctcgtgctcgtttcgagtcagggcagcgtgtccttgtccgcgcaagcgttacatgagcagcgaggccctggcgctgaggttggcagtttgcaatcaggcctgagaaatatcttcgaagcgatggagaacttcacttctgcatccgcgaatacatacagggagctccatcttcgcgccgaagaagagaaagcccgagttgcgcaggagagcggcggcagtgttccctaactcctttcaacgcttaggttttacacgaggacatgagcgtctgtcaatgcaaagggaccgccaccagtgacccccctgcggcacagtgacactacaacccttgtggcagctgatgcaccttgctcgccaggtgccccaagtttcgggtttcgggtttcaggctctggtgtggagttaacaggttgcaacacgggttttgttttactaatctgtacatgagttgggctacgtgatgcattctttgatctggatggccagcagttctcctcaaaccggaactgtgaagcacggttatggaaataggtatatcaccaggcatgttctggtagttgtgagacccctggagcgactgagtgaagaagaggcaggcccttgtgcatctgggaagctgaattatgacctctagttggctgtgcaaccccagaagataattggaaggaagatgtaagccgcacgatcttggttcagatcaaagggtggggcatataagatcctgttgtcatgaaatccaagatccatggaacgctgctctccaccccatgtcactatgccagcgctcaaccgtacatacaagaggccaggctatcagaaggtgttccgtaatcgcagcactttggcatgtcattgtacatttgtacagagaggtgatgcgggatgaatcgagctggagcctcttgtccgctgccgagcgcccgagacatatgtttgcttagagtttcctctgctgcgtctggactctacttcgccgtgcaaccgagctggaagtactcttacagggtagacgacgccctgacccgttctgcagatcagctaaccgctccggccctcaacctttttttttgtttattatatatacatattattaattcatttgtagcaccccgtgtacagctgccggcgaacttaaacctgctgcgccatattttattcatttttttcaccacgggtttgccgtgcttgtgaattgctgaatgctctgagcccacctgttgtgatggtctgatggataggtgtaacggtggttagcagtacagcatcgcgatggtgagtttagttacgggctgatctcgccataccaattggataatttcaagcatcggaaaacggcga

SEQ ID NO: 24013 - DNA, 1123 bp, Zea Mays
cacccttcaggcttcggcatgggcattttggtcatcatacatggcttgaatgagcacagtggaaggtacgtgcactttgctgagcagctgacagcatgtggtttcggagtatacgcaatggattggatagggcatggtggaagcgatggcctgcacggctatgtgccttcactagattacgtcatcgaagacatcgaagtgcttgttgacagaattctgatggagaatccaggggtcccttgtttcctcctcggccactccaccggtggggctgtcgtcctgaagagaaatggtgcaaaaacgttagcgaagtagcctggtcgttgaaacctgaaaaatggtctggctgctgctgctgctgctgcatggcatctctgtaccctcacatcagggagaaactggaaggcatcgttctgacatcgcccgcgctgcgtgtgaagcctgcgcatcctattgttggggctgtggcgccgatcttctctctggtggcgcccaggttccagttcaagggcgccaacaagaggggcatcccggtgtcccgcgaccccgcggcgctgctggccaagtactcggacccgctggtgtacacggggccgatcagggtgcggacggggcacgagatcctgcgcatctcctcccacctgctgcaccgcctggagaaggtcaccgtcccgttcctggtgctgcacggcaccgccgaccgggtcacggacccgctggcgtcgcgcgagctctacggcgcggcggcgtccgcgcacaaggacctgcgcctgtacgacgggttcctgcacgacctgctcttcgagcccgagcgcgacgaggtcggcgccgagatcgtcgcctggatggacgggatgctccggctccggcggcaggctggatgaagggatggccgtgctgcttctctccttctaggtggtgttcctctccaaagtataataatagatttgtgtgccaagataagatggatgcatttgtgctgtggaactacgttacgtatctatttatatttataacagcggggtaaaagggtcgttttgttttggtgtaaacgaaccaaaacatatggatcaaaatcagacgtaaaaatcagaaacattattacatagagtataaaaataaa

SEQ ID NO: 24014 - DNA, 873 bp, Zea Mays
gtcaccgtagggcacataggctctgggctctggcgctaatgttcgagcaaggcgctgctcctgttgctgtagaagggattttttgaccaaccctccaaccggtgcggcttcgatctttcctctcctatcacctgaatccctcgagtattcatcgccggcgcagcgcggtctcttcccttcgctggagaagggggaaggggacacgaacggagcagaaggccatggacacgatgcggggcgcgctggagcgggccaagatgctggtgggcatggaggtcgacgaggagtccgcgttgccaccgcccgaggagcagtccttcttcgacgacatcaatcggcactgcaccctcaacaccactcagaggctctatggtttcgcgatatgcttggctgccggactgacgtgcacattcttgtcaatgcttgtcttcttcaatccagtgaaatttggggtagcattcacccttggcaatttgatggcccttggaagcatttctcataggccccaaaagacagtttgatatgatgcttgattctgtgcgaatatatgccactgctatatatattgcaagcatcataattgctctattctgtgctatctacgttcgcagcaagctgctgactctagtggccatcattttggaatttggtgcccttatttgaataattgaccgtcattcggagccagacaccatcccatgaggtatttctgtgtatttatagtgacgatatatttagcgaatgaaatttgaaagaattgtttgacatgtctctagggagtagggataaaagtgaaaaaatggaaattcccatccgggttttgttttttgtgggtttgcatcttagggtaatatggaaatggtaaccgaaaat

SEQ ID NO: 24015 - DNA, 2246 bp, Zea Mays
cttctctggacgtctggtgggctatgtacggaacacttcagcatgcgacctctcctgcagcgggccggcccatttctacacaccagtccatcccgctttctgttcagagatctcggacgttggacctgaggcccgagccgggtagccgagcaaagcgagagctcccctctccctgtctcctcgtctgtgactgtgcgccgccatcgcccgtcgaccagcgccgtccgcccgctcgaaaactgagacgcacgctgcccgcgcatcgccgtggcctgctccagtctgtggaaaagtgacgaaccaactcggggaattctactctcgaggccgccacctccgcctccgcctccagccctccaccgactactgtctggaactggaagtgtaccactactattcaattggccctagccctcgcatagcacgatgccgccgccgctgcttgagttcgcgatcctcgccactgcctgcaggttcagcaagccccttaccgttctcaggaggcttggcgttcttggcccaccaaccgttcgacgcaatgccgcagaggcgttcgtgccttcaccgtttcgccaggttgtcgttcagagtggaaagcttcttgggacaccaaggttctgccacaccactgccggcatgtcagaatgtctcccggacgtctacgccagtcaggtactgaaggttctcaagtccaccagtgctgacaacacggatctcagcggtgctcttcatcagttcgcggtccacatggatgaggatattatcctcatggtcctccagaagcagcggtccaactggcaggtcgccctggcattcttcaactgggcggcaaccctgccggggtatgcccacgggtcaagggcctacaccgagatgctggacattcttgggcggatgaagaaggtcagacacatgaggcagctgtttgacgagattcctgaggagcgacgtcaggtggtcgtgacgaataagatgtttgccgtgctgttgaaccggtacgctggtgcgcacaaggtgcaggaggcgatagaggtgttctacttgaggaaggattacgggtttgagcttgacttggtcgggttccagatactactgatgtcgctgtgcaggtataagcatgtcgaggaggcggaggcgctgttccgtgagaagaaagatgagttcccgcatgtcacaaagagctggaacattatactaaatggttggtgtgtcaagggaagcctgagggacgctcaaaggatttggaatgatatcattgcatctaaggttgaacgagacctattcacctttggtacgttcataaacgcattggccaaaaatggcagaattagtgccgcggtgaagctgttcaaacagatgtgggagaaagggatcaatcctgatgttgcgatttgcaattgtatcatcgaccagctgtgcttcaagaaaaagattccagaagcacttgagatttttggtgagatgaatgaccggctttgtcaagccgatgtggctacctacaacactttgataaaatacatgtgtaagataaaaaggatggagaaagtttatgaacttttggatgacatggaagcaaagggctgccctccaaacaataggacatactcctacattctgaagacgactgagaaacccaaagatgtcattgccttgatgcagaggatggagcgaaccggctgcaaattggattctgatatatacaacttgatattgaacctttatatcaaatggaaatatgagaaggggatgcaacagatatgggatgagatggagagaagagggtcaggcccagatcagcggtcgtttactattatggttcatggtcttcattcccaaggcaagctcgatgaggctctgcagtattacacaacaatgaagtctagagggatgattccagaacctaggaccaagatactggtgaaagctatgcacatgaagaaggacggggctgccactgaagatgactcggcaagtatggcagggaagcatctaaaattggatcatcgttcaagactattcaatgttcatagatagtctgcttccaggtctttgttctataatctgagcaggggatgctgtccatataggtttatgggttgaaagaaagaaaaacagttcttttttctatgggtgtctaaatcacaatggctgcaccttgggctaaaaagaatcatcagcatagattcattggcaatatgatttctcagtaacttttgctcagactttcagtgccaggctatgtcctc

SEQ ID NO: 24016 - DNA, 151 bp, Zea Mays
gaggttacgagttcgaatctcaccatttgcaaagtatctaaatttgattcaaaataatagtgaaaaatgatagggcaacgtatctaaatttgattcaaaataatagtgaaaaatgatagggcaacggataaggtaataggtaggattggag

SEQ ID NO: 24017 - DNA, 68 bp, Zea Mays
gcgatataaactgggtcgaattaaacgagattgataacagtatttggacatgatttgatttggcgaat

SEQ ID NO: 24018 - DNA, 1974 bp, Zea Mays
ccggtctgaaactctgaatctgccaccgacaagtgggttcgtccaccgcaccttctcccttcttcgtctccgtctctcccagccccatatcaacgggggacggctctctcgccattctccatccgaaaaacccatagaaacttccctcgtttctctctcctcggccccgcgggagcgaaccattatcagtcgctctcgttggtccggagcagcgatgcgcaccgcctgcctccgccccaccattcgaataaaaccctcccctccgcctccctccttccgccactcctaggcccattcccacccgcgccagcctcggccgccgcggccgcaccacccacggtcccgcctcgccgtggcatgagaagatggccgcgtgctccaggggcctcgcgtggccgccgttcgatctgaccacggcgaggggggcggcgtcctggccgcgccgccgcgccacgatccggtgctgctgcgccgggacggacccagagccgcggaggcgactctcgagggcggccgcggccgcgcccgagcgtgccgaggagtggcgcgtcgatgggaacaagccgtctgccgcggcaccggcccggcggcgcgctagtctcaccgccatgcccccgctccccttcccggcacctcgttctagaagacagttcaagcaacaggacttctacccacggtgcacgccgaggggcccggctcctcaatcctgtgattccccacccaagagagacactggtattgctagtgagaaggaatggggaatcaacttgctggacgaagccgtcaaggagtctggaataaatgaagatggaagcacttggtatagggagagtggagaagatactggcgagaatgggtaccgctgccgctgggcaagaatgggaggacagaaccatgatggttccaccgaatggaaagagacttggtgggagaaaagtgactggactggatataaggaattaggtgcagagaaatctgggaagaatgctgaaggtgattcttggtgggagaagtggaaagaagtactgtaccaagatgaatggagcaatcttgcaagaatagagaagagtgctgaaaaacaagcaaaatcaggtgcagaaaatgctgggtggtatgagaaatggtgggagaaatatgatgccaaaggctggacagaaaaaggtgctcacaaatatggaaggttgaatgagcagtcgtggtgggagagatggggtgaacattatgatggccgtggatttgttttgaaatggacagataagtgggcagagacagacttaggcaccaaatggggggacaagtgggaggagaaattctttgcaggaattggttctcgacaaggggagacatggcatgtatctcctggcagagaacgttggtcaagaacttggggagaagaacactttggtaacggtaaagtccacaagtatggaaagagcacaactggcgagagctgggatttggtagtcgacgaggagacatactatgaggcggagccccactacggatgggccgatgtcgtgggggactcgacacagctgctgtccatacaacccgtggagaggccaccgggagtgttcccggccatcgacttcagctcggcgcccccgccaaaggacgctccgccgggcatgcctccttcccctctggatggagggaactagagctgccagcacaagcgaattttttctttctagaggctccaaattttgcctgtaagggaacagcattctttgtaggaagttaatggacccaatttcctgcgttcattggttggttcactctctgctacgctttcctttcctcccaaacatgccgttgcgttcctctggttggcgaccgggtgaatgcaataatcaaacggcccacccgtggtttgtattgctcgctgaggataaagcctttgttctgccttcaaggcagtgttggaaactcggccattttcctcgcgtaagggacagagattttcactccgaa

SEQ ID NO: 24019 - DNA, 971 bp, Zea Mays
caacgccagttgttcctccacacacacctcctgctcccctcgccatggcatggatgaccgctgtatctgctcctgtcgtgctcaagtcgtcacaggttggtgggttgtgcgcgcctagcgataagctactctttggaagatcagatggtcatttcatggactggtctaaacgtttgaaggttgccctgggtgctgccagaggtctagctttcttgcatgatgaaggaccctttcaggccatgtacaacgagttctcaactttgaacatccaaatagataaaggtttcactgctaagctttcaggatatggttgtgttggcttcaataccgaggagatatctaatgcacctgtgcaaaccattcggtggagaccttggagaagggtttactcactcagtttgtctattgctgcaacaagtcggggctggaccgttccaaagtaaatgtaaatggaggcacgattgcccttggacaccctttgggtgcaacaggtgcccggtgcgtggctactcttctaaatgaaatgaagtgccggggcagagactgcagatttggtgttgtcaccatgtgtatcggatctggaatgggggcagcagctgtgttcgagctatgttcggcccggctggaggtatcgaccatcactcgtcactgtaacccgatggtgatcgacgaccgtgagcttccatgttattgcgttctgatacttgagacttttattataactatgtatgagatattgtctcttattagtactggatgatgagatgtgtcttattatgactatggatgagacttttgtgatgtaattgatgagactatggatgagacttttgtgatgtaattgatgagactatgaatttaaatattgttatgtgattgtgtgtgagatgtgttatgtgaaaatatgttgtgttatatagctgttgatatatttgttatgttgtggaatgtggtgtaaaataaaaataaaa

SEQ ID NO: 24020 - DNA, 217 bp, Zea Mays
aacatatataataacaaagtgcatagagataaatgtcacaatataatcagagtatttattacatagcggaagtcttacaaaataaaagatatttataacaggatctaaaatccatccttggcgccagaaagtcaactgggagacgacgacctaaacctctcacgaacaccgcgcaacatccaccatgcgcctcatccagtggtacctaatcttgacc

SEQ ID NO: 24021 - DNA, 813 bp, Zea Mays
aacaattgcaatgatctatccccatcacgatgaaatttcccaagattacccgggcctgtcggccaaggctatatactcgttggatacatctgtgtagtgcgcgtgcggcccagaacatctaagggcatcacagacctgttattgcctcaaacttctgtggcctaaacggccatagtccctctaagaagctaactacggagggatggctccgcatagctagttagcaggctaaggtctcgttcgttaacggaattaaccagacaaatcgctccaccaactaagaacggccatgcaccaccacccatagaatcaagaaagagctctcagtctgtcaatccttgctatgtctggacctggtaagtttccccgtgttgagtcaaattaagccacaggctccacgcctggtggtgcccttccgtcaattcctttaagtttcagccttgcgaccatactccccccggaacccaaagactttgatttctcataaggtgccagcggggtcctattagtaacacccgctgatccctggtcggcatcgtttatggttgagactaggacggtatctgatcgtcttcgagcccccaactttcgttcttgattaatgaaaacatccttggcaaatgctttctcagttgttcgtctttcataaatccaagaatttcacctctgactatgaaatacgaatgcccccgactgtccctattaatcattactccgatcccgaaggccaacacaataggaccggaatcctatgatgttatcccatgctaatgtatccagagcgatggcttgctttgagcactctaatttctt

SEQ ID NO: 24022 - DNA, 271 bp, Zea Mays
cgtaccggcgcagcatggtagccatggtaggcgatgtcagtggagaccaccgccggaccgtcccttgttcttctcgccgctgcagtgatgatgagggaggcggaggcctggaggagcagacgagcgatgcggtcccgatcgctcttgcacggccaccgcccagtgccgagcggctcgttgccggacagcttcctgaacggacgcttggagaaaaagctggggataatgccgaagcacaaggatggttcgattagggcatgtagagttttga

SEQ ID NO: 24023 - DNA, 1433 bp, Zea Mays
gataagttggcgggagtaatgatcgggtgatatccatggccagtttgtcgaccttctgagattattcgatttgggtggttatcctccagcttcaacttacgtattcctcggagactatgtcgatagaggcaaacagagcctggagactatatgcttgctgctggcgtacaaaatccggtaccccgaaaatattttcctgttgaggggtaaccacgaggatgcaaagatcaacagagtctatggtttttatgacgaatgtaagaggaggttcaatgttcggctgtggaagatattctctgattgcttcaactgcctgcccatcgcagcgctcatcgatgacaagatactgtgcatgcatggtggcctctcgcccgaattgactagtttggaccagataaaagatattgagcgacctgctgagattcctgattatggtctcctgtgtgatctgctttggtctgatcctagccccgatggagaagggtggggggagagtgacaggggtgtctcgtgtacgtttggtgcagataaacttgtagagtttttggagaagaatgatctcgatcttatatgccgagctcatcaggtggttgaagatggctatgagttctttgcacaacgaagattagtgacaatcttttcagctccaaattattgtggagagtttgataatgttggcgctcttttaagcatagatgagagcctaatgtgttcatttcagatcctgaagccaactgatatgggtccaccgcatgcaagaaaacaaattccaaataagccaacaagagggtgaagccttggaccagcatccaatacttccagttccagtatcatgatgatcgtcagtcagctcaaagggggtgatctgttgtttggatagttggatccaccagggcctgacattagacatccatcagccaattaatccctttagccaccctttactcgtgtcttgggaggcggcttggctgtaaaggatattctgtacagcatttagttggattcaacacatcatctgttttactgttcttcctgccggcaagggacctcattggcagcatgacatacaatagatgttagtagtctcaatttgttttccttagcttctgccttgcgtttttttttttttggtgcgggacttgatgtatggtgattttatatctttgtaatatgtagatgttgcaggaaataggtctgcacaaacccatcagcagcaccgccccccccccccccccccccttcctttcatttcttttgtggacctggaagatgtgtgaagctggtaatgtcatgcaatgcaaggggaggaacgttattgccttgttggcgacgggatttagtccacagtattctcaatctctcctatataaaccaccatgcctcacgtgcgaaaaaccatgtaatggactggcacaattggccgagtagtccgt

SEQ ID NO: 24024 - DNA, 2838 bp, Zea Mays
ctcttgactatcagaaccaatagtagcaagatgatgtgctaccttgttacatattctaggagcaaacaacaccttaacatcattgaaacatgatctatctcataaacatgtacaggaggggcaacggtggtacacttcaccctctcatggcgcccctgggggcgattggcgccgccgccgccagccctggtcgcccgcatccggttcggggggtgctccgtcctttctccgcgggcggggctagcgctcctctccgtggtggcctcgggtcgtccctccacgcggcggactcggtgtccggtcctctgcccaaacctcttctagagccgatctgaaaagtgctctacgccggtgctgcctgaagatccgcatagtctgctttcggcgctgcgaatccaggcggctgaatcatccgactgtgatgcagtctgctcgccgtgtttccagtttacctgcgtggaggatgaggcattgaagtcgggcagcgttcggtcccgtcgtcgtgctactgatgactctgctgcgccgcgcgtgagtggaatgcctctccattccgctaccggggtcaacgatgggggatgggaggttgttcggccgcggttttggtggcgcaaggcattgaagaatcctgtgagatctccacgaaatcttcaactggatgtgaagggcaccaatcttttcaaattgaagctcaagggtaaatgctacaactgcctctcaccggctcatctcgctttctgctgctcggctcccacgcgctgttggcagtgcttacaatccgggcacaaggcgcgatattgcaaccaaaaagtcagccagagaacattcaatgctgctcaatgcttccctgaaccagccgtgctcgcatctaagagttccacctaccaggaggtgctgctaaagccagacaaactgcataagtatcaggatctgcctcatgtgaactcacttggtcatccgcccccatcgaccaaaaagtcctacctccaggctgttctggaagaccacggtatggaggcacgctaccctggtgaccctcgtgtgaggccagcgcgcgccttctgtgcggtctcggcgaccggctctattcgtcgccggagagatgagttgattgacacggccgtcgtctgctccttcgacggcaacagccacgaggttgacattctttccgcaggtgatatgctgagggagaagttcagcttacaacacggtcagtatcaactggtcaagcatttccctgagcaattctttatcatcttctcggaccctaggtcgaagcagtgggcgctggataggagatctgtctcatatcgtggtcgaattttccattttggggattggtctgaggacagctacgctagaaaaacaaaccttgaatttagagttaaagtccgggtcgaagggatctcggtgcactgttggggggaagatgtggcttcaaaggccttgggcaagagttgtgcaatccactatgtgcaagagcgcacaaggcgtagggagcgtaccaggtcttttgacctatgggcttggtgctctgacccgtgtgacattcctaaagaggtcttgcttacggttttagaaccagacagggaacttccacctatcagcacgcccttagctcttgttggtgctcagcaagatgcccctgctgatctgaaagctggacatgtttacactcttcgcaaccacattgaggtggtggaggatctctctttcctccgtgggaggggttccagggggggtccgcctaatcgcaagcagcgcatggagtttatttggagctatggcgccccagattcagtgggtgaaaaaagagaacgggtggaagctgttagaggaagagagattgcgcgacgggactggggtcatgatgatgatgatgatggggattttcagcgtagcaggcgctgcggcaaccgccgtcatcgcagcttgtctggttgggcgcgctcgtcgcgatgtcgagggggcatggacgactgttacagttccaatgacaagcagcggcacttaactccctttcgtcgccatggctgggagtcgaagctgtcttctcgctgggtacccaaggtgaaggtccgatctgtttcttttgcagaccccatcgttaccgctgtttggccgcaggaggataaatgtgggcaagctgaggatattggtgacaggtctggttcgatgggcgctgttattctggaacctgtgcgcagccctgctacaaccacatgcaagctggcgaggcatttctctaggcctttgaccaaggaacaaatggaggcaattatggagctggcaactctggggaaggaaaaggaagggatcaagaagaagggcagcaaggtgacgcccctcaaggctcctattatcgaggcttctgagatgctataagttgtaatttgagttgtgggggtagttctagtgcatcatgttgtgtcgctggtgtacttgcctgtgggtcgcccaggttcttttgctggctgtttcgtgtgccaggttgttgcctgggcagcggtgtttgtttctttggttggtattttcggtgtctctatctgtcttagtatctgttgtaagacgctggtcttttgcttctggaagcaagttacggatggtggaatcctggttggctcctgttcttctctcctatcctgtgttccccatgtgtgacaactttttaattagtggagctgttttggattaatgaatatcaactgttgtattctgtcctggaatgtgagggggctaaatgaccctgccaaaagagaaagtgtgaaacaattgatcctatcttctggcgcaactattgtttgtcttcaagaaacaaagattatgagctggacctgt

SEQ ID NO: 24025 - DNA, 1114 bp, Zea Mays
tgatttcgacaagtgctcagcattacctgcatcctgtacgcagaatgtttataaagatgaagattcatcgcatgaggaatcctcctatagcttgactgactatgtatgcttgaagatacctgatggatcattaaataaagtaaattgcatcggtgtgataaagggctctggtaactgttgtactaccctcagcatgatgtcactttcaggttttctgttgcatatacctgacggatatgagtgtgttgacctgtcactttataaggacaaccaggtagttttactactgagtgaaacgtcttgttctgatagccctggaaaatcttggatggtgatgctgcaaatagagaacttttcctttatgccactctcaggaacattccctgcaaatatttacagtttgcaaaaactggtggcactcgatctgcaattggacacagattatgggaaagttcgtagcatacctcacaccgtatctactccatttgcagttagtgcatcgagaggagtagcctgtgtcttttcatcccggaggcatgccttggtttatatccttgatgaggatgaggaagcggagggggatgaaacttccgatatggagtgattattatccgattccttcaccttcggctcagccatttcagcttcaggcttcagcattgtcttatgtcttgttgcaatggaggcagaggcccggagatatcaatatgtacggaaacgtcgtctcattttcacggcaatgcatgcccgggttcagaagctacgtcgcgtggtaacagcctaacaggttggacttcatcgtggttatttggaaagcgagcaaaattgtacacccatttctgatcgtgttgtgttatacgagtgcttgctagttgtgtaaaaaatctagaggtaacgtcaacgtgcaaaaaaaaagggtctgtcgcaaatcttgacggtcactagagctatcgcatttctaatcgtgtttgtgttatgtggattcattattttattgttcgagctgctaatgtacttggtaaaatacattgttgactgaactcgtgttgcgccttcaactcatgtttcctttcatcaaaccataggcatatctaagaacaagaaaacatgcctc

SEQ ID NO: 24026 - DNA, 4012 bp, Zea Mays
actttccaggccatcgtctccttccccttctttcaccggcctcgagtcacacgcgtgagatctgtgccttccgccgcggccacatgccacacaacgacgcccggcgagcttcaccgcgatagaggtaggcccgcccgataccaaggaggatggcggcagtgggcgttggtgcagcggacgagcggtgggcttcgttgtgcaactgcgtggtgaacttcttgctggaggagcggtatcacctcacggcgctagagctattgcaggagctccaggaggacggccgctccgcgcacgccctccgcctccgcgctttcttctccgacccagcgcttttcccgcccgatctcgtcgcccgctcatcctctgcgccgcccggtgctgatccacagattttgctagaagagaaaatagcagcagaagaaaagttggcactcacggagtatgatctgcgcctagccaaagaagacctttcacagttgaagcttgaattacaaaaacaaaaagaatcatctcctgatgattcaaatgggctccttttgggtgcttctatacgcgaaggatatactaggcaacaagaaaattgggatgtgaaaatttcagcattaggccctctaaaggataatgaacgaaaagatcttaattgcgctgtaaaagaatacttgcttttggcagggtatcgacttgctgttatgacattcattgaggaggttcctgatcaagaccttgatgtttggccaaacagttcagcttgtgttcctgatgcccttcgtcgttattactatcagtatctttcttctactgcagaggctgcagaggaaaaaatatccatacttcaggaaaatgaaacattactcaaggacaatgaacgactcaatgctgaaaatgattccttgatgaagagcagggaaggagctaatagtcaggttgccgctttaaggaagtctttggaagctgcacacaaggatataaaagacaaggaaaaaatgattcaagacttgaggcagtcactggatgtccagaggaaggagctgaatgactgcagagctgaaatcacagccctgaagatgtacatcgaagggactcaatcaatcaaacaattgtttgttggaactagtgatggtgtaaagtcgcattcctttgctaattctgtgggagcatcatcattgaataatgaagatgaagattcaaaaggatctgaagccataacaaataagctagcatcagcagtaaatattactgatgatacgcagaaagatcgccaagttctagaaagtagcgctgaaggttcctcagtttcagaaactccagtgtctttcacagctgttgagaatgacagctatggtacatcaaaagaagataaatctgtgtcaaatatctcatcgaataatgtatgttttcagagtaatctgcatggagcttccatgactggtaaaagccaggggagttcagatggcatatccatgtatttatctattgagaaactagagagcccaagtaaacaaaaatcttcagataagattgctttggagactataaagatagtttcagatgcacttccaaagattgttccttatgtgctcataaaccatcgtgaggaacttcttccattgatcatatgtgctatagaaaagcatccagatagcgatgtacgggattccttgactcatacattgtttaacctgataaaacggcctgatggagaacagagacgcatcataatggatgcttgtgtagaattagcaaagagcgttggtgagatgaggacagaaactgagttacttccacaatgttgggagcagataaaccaccaatatgaggagcgcagattgcttgttgctcagtcgtgcggtgaacttgccgtttatgtccgtccagagatacgagattccctcattttatccattgtgcaacaacttgtcgaagatgctgcaacagttgtaagggaagctgcaacacataacctggcattgcttcttcctatgtttccaaatctggacaaatattataaggttgaggagctaatgttccaattggtctgtgacccgtctggggcggttgtggaagttgcactcaaggaacttgttcctgctgtagtaagatggggagataaattggatcagatatcaagagtactattggctcatatcctggcatctgctcagcgatgtccacctatttcaggtgttgaaggtacaatagactctcatcttcgtgttttaggagaacaagagcgctggaatattggtgtccttcttcggatgttgactgagttgcttccatttattcatcagaaagctatacaaacttgcccctttgcatcagctgatccaacaagctctacaccagagaacttctcagcatcctgcctaaaatcatatgcaacaggtgactctgagtggtcagcatttgagtggatgcacactgattgcctgccagatttgatcaagcttgcctgcttgttgcctgtgaaagaagataacttaagaaccatcatcacaaagtacctcttggaagtatctggactctacggtaaagattatctggagcacattatgctacctgtatttcttgtagctgctggtgacattgatagtggcgattttacctattttcctctatcaatccagccaaaagtccgtggcttgcgtccgaaaacttcaactgctgaaaaacttgccatcatgtgtgtcttcccattattgttatctggtattttgggttctccttccagtcgtcaacagttggaagagtatctgagaaaagtacttatccaaaacaccaaggatggttcattttctatgcatcatactactgagatcattaacgcagttcggtttctttgtgtcatctttaacattttgtgggagatggttgcgagctcggataccagcctgaaaataaatgctgcggctctactgagagcacttgtaccctacacggatgtgaaaatagcatcaactcatattttgccagcacttgttacccttggctctgatcaaaacttgaaagtaaaatatgccagtatagatgcatttggagctgttgctcagcatttcaaaaatgacatggttgttgacaaaatacgcattcaaatggatgcttttcttgaagatggatcacatgaagcttctgtttctgttattcgtgcacttgcagtagctgtacctcattcaacagataggctacgtgaatatcttttaaccaagatatttaagatgacatgcatcacacctgtcggcaatgatattgaacggcgtcgtgaaagagcaaatgtactctgtgaagcgctccgggctctggatgctacagatcttcctgctatgggtatacgtgatttgcttctgccatcaatacaaaatctgttaaaagatctggatgctctagaccctgcgcacaaggaggctttagaaatcataagccgggaaaggtcagggggtacgctggaaagcattagcaaggtaatgggggcgcatcttgggattgcatcatctgtcagcagtttctttggtgagaacagtctcctcacaaagaaagaaggtggcgaggaacatgatcctgctggccccaccgctcctgagcaaaacctgcaggctcagccagagagcacgaggtttggtcgcataatgaggagcggctttggagacatattgcgaggtcaaagcaaaggacagtgatgcacttagattgaaatgatcaattacatacatagctgccgataccacattctttgtttgtaagttgacagaatatacctcaagggttgtatgttatttgccgagataaaaaaaaaggatttgacgttgcaaatctagcatcaaacttcctgtatgtaagttgcctgtagttagctgctcatttataagatgctaataattgtgtctttgtttcatttgtttttataaataaaatatataactagatatgagacactttgcccatcttttctgaaatttggatgttatagttggctgacatcatgtaattgatctgctttggttgaaggaacggtggg

SEQ ID NO: 24027 - DNA, 7156 bp, Zea Mays
aggattggattggatctttgcttcctttctcccgtgctgtgatttgtttggtgcagtgtgggctagttatctactagacttgccactggtgcagattccgttgatcccacatctgaaaagcaggggagtcgacgaccctcatggttttgaggataatatattgcatctctgcactgttctaagcgtgaggaagtaaagcattatttattggttggagtagtttctgttgctatccggcaccaatggcgactttggttcgtcatgattcaaggcagtactcttggtggtgggttagccatatcagccccaagaactcgaaatggctccaggaaaatctcagcgacatggacacaaaggttaaagcaatgatcaaacttatcaatgaagatgctgattcttttgcaaggagagcagagatgtactacaagaaacgtccagagctaatgaaatttgtggaggaattctatcgagcataccgtgcgctggcagaaagatacgatcaggccactggggcacttcgtcaggctcacagaacaatttctgaagcatttccaaatcaaatgccgtcaatgtcagacgagtcaccctcttctttcagccaagagatggagcctcatactccagatatgtctacttttacacgtgcggcatttgattctgatgatcttcagaaggatggagttggtatgtcaccacagcgtttcacctccaagagaaatggtacacaccctgaggaaacaagtgcattgtcaagtagaaaaggtctaaagctgttcaatgatttgtcatcgagtagtgaaaatgctcctcgtgctggttttgatgggaaagtacggaaaggcctaacctttgaaagcccagaagttaaagggaaagatggtatcagcaatgagatggcaaatttgcagcaagaagttgcaagactattatccgagagccagaatctgaaacagcagatgctgtcagaatccgagcgggcaaacaaagctgaaaatgagatgcaaatgctcaaggcaacagtattgcaattaagtgctgataaagacacatcacttacgcaatataatcattcctctgagcgaatatctacgttggagtccgagctcttgaaggcgcaggctgacctcaagaagttaactgatgaaatggctgcagatgtccagaagctaattaatgctgaaacactcaatattgctatactgtctgaggctgagggtttggatcagaagatgaagatgcaacaacaagaactagaacaaaagcttaaggaattggagagtttccgctcaagcttccaggaggagcatgaaaagcgtatgcaggctgaaagtgctctactttcccaggggaaggaacttgctcaatctcatgaagaagtacagaggttgactatagaaataaagatggcgaatgaaaagttgaatgagctcaagcagaccaaggaggaccttcatgacactgtttgtgagctgaagagggatgttgagcgccttacagaacaaaaccagtcatctgaggtgcttatacgggaacttggtgacgagataaatacactcaaggattcaaaaaatgaactccaaagtgaaataaaaagccttaagagcaccatttcacagctaaacactgagaagaatgcagctgcgcttcaacaccagcagtctgtggagcaggtttcggtaatcgaatctcagctgtcaaagctacagtcagagctagatgagactgagcagaaagtacagttgctgacacaagatcttgaaaagaaaaaagaagaagcggagaatatccatttcaagctgcaagatgaatgccataggcgtatgcaaattgaagcaactcttctcatgacagagggtctacattcccagttgcaagaagaaatgaaaacactgacacaagattttgacggatcaacaaagaagcttagtgagttagaaaataataagttagacctggagagcacactgaaagaactgaataacaccattttaggtttgaactcggagaaggatgcagcactccttcaacaacagcagtctttagacaaagtatctgatttggaattagaactctcaaagatgcagttggaaatggagaagtctgagcaaaaaattctcttactggagcaagaaattgcacggaagactgaaagtgtcgacagcttggagataagttttaaagatgaatgtgagaagaggctacaagcccaaacatcgcttgtgtcattggagaaaatgtattgccagtcacaagaagatgttagaaggttgcagatagagattgagaagcagaatgacaagttgaatgagttggagaacttgtcatctgaacttaacaacaccatcctacttgtaaacactgagaaagatgcaaccctccatgagaaccagcagtccttagcgagaatattggatcttgaatctgaactcatggtcttgaaaactgaactggagaatgttgaaaggaaagttcacatgatagagcaagaactcatatataagaaagaagaagcggataacctccaaattagcctacaagatgaaactcaaaaacgggttgatggtgaaacatctcttcttatgatgaaaaatcttcattcggagtcacaaaatgaagtgagagggttggcactggaactcgagaagctgaatggtaatttaagacaggtggagaacagtaaggttgatcttgaaaacattgtaaccaagcatacggaggaaatccatatccttcgtgaacagaatctttctactgagcttatgataaaggacctccatcttgaattggatgtattgaaggatttgaatgtgaaacttcaagcagaaatggatttacacaaaggtgaaaaagaagtacttcagagagagtttacttctcaaagggaagagaaggaaaatctagaggggatacaccacactctggtggatgagatggataccctaaaaactactacaacaatgaaccagaagttgattgaggaattgcaaatcacaaacttaaaactgaaggaagtgtgtgcaaggagtgaagttgagaaggcacttctctcagaaaaactccaagaggtggagaagctatctgaagaatattcactcttggagaactcactttcagatgcaaatgctgaaatggatgcattgagggagaagataaaagcacttgaagcttcagaaagctctctcaaggatataatttcctgtcatgtttctgagaaggctgttcttgtatcagagctagagatccttggtaaaagattatctgatgctttagagaacaaatctatcttggatatctcattatctgatatgaaactagacctagaagatttgagaacaaagctgaaagattctgaagaatcctgtcagtatctccttgcaaataactcagcactttctggtgaactggatgcattgagggagaagataaaagcactacaggcctcagaaaggtctctgaaggatgaaatttcctgttatgtttctgaaaaggttgttcttgcatcagaggtagagatccttggtaaaagtttatctgaggtttcagagaagaattctatcttggatacctcattatgtgatatgaaaactgagttagatgaattgagaacaaagctgaacgattctgaagaatcctgccagactcaccttacaaataattcagctctttctgctgaaaagaacaatctgttctctcagctggagagcattacattggccatgaaagcactagaaggtatgcacaccaatctggaacagatgcactcctctgtatcaagagagaaggattttgcatatgatcaagtaagggaactgcaggatcagttgagaattaagaatgaggaatttgaagtgttagcaaagtcacatcaattgcaagcaaacagctatgagatacaaatttcttctctgcaagagaaaaaccattatatggaggaggtgcttgaacaggaacagcagaaaaacgtaaatgcttctattagtacagttattttggagaactgtttggtcgatgagcaagacaagaaggctgctcttttcactgaatgccaaaagtatgctgtggaaaatcattcagccaatatgttggtttcacagttgatgggggaagctagatatcatggggaggagagaaaaacattgctaaagcacaatgaaaaactgaggcaagggatttcaaagcaaatgaaggttctgaatatctgcaaagatctagcacctgctgatttagctgaggacgaagttctgttgcagactgttttagatgaaaccattaacactctgagacttaaggatgaaactgaagatgtgaataggctcatgaacactgagttctcagttctctcagtagttttgttgcaattagggatggagctcagagatctgcacttacagaagtgtgccattgagaaagaagtggagagtggagaaacagagttgctttgtttgcaaaacaaaaaccaacagatgttggaacagaatgaacaactaaggaatggattacaggaaagcagtgaaagggaggaggtgctgaaaactgaagtattcatcacacaagagaaactatcttgcttgagagagtcctaccagacatcacaagatgtaattttcaacctgaccgaaaaaaatgagtccttgtctaaggaataccagtccttgagtgagaagtacaattccttggaagatgagaatgatactgttcttgaagaatgcatgatgctcgagaacctgtgcctgttctttaggggacataataatgagattgcatctgcattggcttctcttaccaatgagatggctttgttgagtttggctaagagcgatcttgatcttcaagttgatgagctgagcagaaggtcagtggcgcatgaatcagaaaatagtcacttaaaggagtacatcatatgcttggtagagattctcagaactcgattagtcctttcagagtttgatttggacaccaatcaaagtgtctgccaggagttggttgttaaacttgagaattgcatgacacagctggcgcagaaggatggtgagctaatggaagcagaggaggaagttcaactattgcaagaaaagaaccaggaactctgtggagttgttagatctctacaagttgcaactgaaggtgctaaagtggtggaaggagaactggagaagaaaatcacaagactgattgaacagtgttcttgcaaggatgtcgaaattttacttcttcaccaagacaatgaggcattgcaatcagaagttgagcaatgtgagagggaatttgttgttctgatggatgatgcaattacctcttcagtgaattctgcggtgtatgaagaaacagcattcaagcttatgatgaatggtaaagctacagagaatagagcaatatccctaaaggagttgctaatgaaggaggtctcttcccgagatgctcacattgaggagttgcagaaaaagttggctggcattcaggacgaacatgcagaactaaaagctgagttgaacacacatctagctctcgtagcatcattggctgatcatgtcagtgtgttggaagaagattgccgttctctgtcaaaaccctgtagtacagaagacaaagaggaaaccgcatgtgtacatcatgttcaagagggcaatgatgggctggaatctcattgcttacccaaaggaactccagagttacaagggttgattgcaagaatagaagcacttcaagtagttgtatcaaatgctaaagatcgtcaagatcaggagtcagctgagtctgcagctaaattggcggcagtaagtgcagaaattcaagaccttaaagcaagaggtggctcacgcatggagggaaaagaaatatattctgatcatgagaaacaagatgttgagatctccaaagggaagcaagtccagatcatgaaggatattgagctggaccaaatatccacttgtccaccatatggtgctcgagctgccctctatccgcttggaactggtgcaaatgccgaactcgatgacgatatgcttcagctgtgggaggctgcagagaggagctgcaagaaccaaacggccaagtcctcgtcatctgagcacgacatacaagccgtcgaggatctgaagagtgagcacccttcgtctgagctagcaaggggaagagaccttggaatcaataagctagaagcgtcgaagggagctgcagagcctcatgaggcgtggagcaagaacgtacttgagaggctcacttctgatgctcagaggctgttgagcatccaagcgagcattgaagagctgaagcagaaaatggaggggcagtcaaagggaaaatcccctatgaactctgagtacagcagtgtgagcgctcaggtgcatgagacagagggccatgtcttggaacagatcaatctgaacaacaaattgactaggacggctgagaactaccccacactgtcagataatatgagcaccgagcgagaagggtattccagcaggaggaagatctccgagcaggtgcagaaagggtcggagaatgtggcaaggttggaactggagcttcagaagattcagtatgtcttgctgaagcttgaggaagagcacgagtacagaaggctcaaagtctctgataagcgcactcgcgtgcttttgagggactatctgtatgggaggaaggaccgcggtggcgggcagaagaaaaagaagagggtcccgttctgtggttgtgttcgtccgaaatcaagaacagagccgtagcctttctttttgttcgacctgcacctccaagtggtagccgtagtccgaaatcaagaaataaaacaaaatcgacctgcacctccaagtggttggctaagtgtcgcctgtgcattggaagaggaggtggtgttcctaggatccctttgtaattgagttagcattttagtatcttttttcttttatttttgaaactagcattatagtatcctgatgaagaagcttatgtactaaattttttgttttcctgtctaaatgaggccattctggctagtttaatgcgttaatactgtcgtatatcaaggcgttctctttccatctataatagcttcgtgtttacagcccaagcagtgcattttgcttccaggttcagactgcagaagcaaagcaccgggactagtaagtcatttctttaatattgatgaataatctca

SEQ ID NO: 24028 - DNA, 2248 bp, Zea Mays
cagcagagatcttctccatgcttcctgacattcatccacatgatctatttaaagttgaaagctgagttcattttgttcatctgcagtttaagcaaaattttgaaaaaaaggtgcacctgagactatccaagagagattagttgatttacctgctgcatatgtggagacatataagaaatacacacggcaaggttctcgggtcttggctcttgcatacaaattgcttcctgagatgcctgttagcgaagctagaagtttggaaagggatcaagtagagagcgacctaacgtttgctggctttgcggtcttcaactgccctataaggggtgactctggtgctgttttacaagaactcggacaatcttcccatgacttggtcatgatcaccggagaccaagcgttgactgcctgtcatgttgctagccaagtacatatatcttccaaacctgttttgatcttgacacggataaagactggcggttttgagtgggtttcgccagatgaaactgatagagctccatatagtgctgtggaggttgcagtgttatcagaatctcatgacctttgtattaatggggactgttttgaaatgctacaaagtactgaggctgttctccaggttatcccttatgtgaaggttttttcacgtgttgctccagaacaaaaagaacttgtactaactacattcaaaagtgttgggagggtgacactgatgtgtggagatggaaccaatgatgttggtgcactgaagcaggcacatgttggcattgctcttttgaatgctgaaccagttcagaaagtcaactcaaaatccaaagctgaaaataaatctgggaaattgaaaaaacagaagcctggtaatgaagcatcatcacgagtgactccggcaaccaatagttctgctaaagcatcgagcagccgccccttgactgctgctgagagacagcaagaaaagttgcagaaattgttggatgaaatgaatgatgaaagtgatggccgctcagcaccaattgttaagcttggtgatgcttctatggcttcacctttcacagcaaagcatgcctctgttgcccctactcttgacatcatccgtcaggggagaagcaccctagtcactacacttcaaatgttcaagattcttgggctcaattgccttgcaacggcttatgttctcagtgtcatgtacctggatggtgtcaaactgggcgatgttcaggctacaattagtggtgtctttactgcagccttcttcctcttcatctcccatgcccggccactccaaacgctgtctgcagagcggccgcaccctaacatattctgtgcatacgttctgctctccattcttggccagttcgccatgcacatactcttccttatcacagctgtcaatgaagcatccaagcatatgccagaggaatgcatcgaacccgactcagacttccatccaaaccttgtgaatacagtctcgtacatggtgaacatgatgatccaggtggcaacctttgctgtaaactacatgggccacccatttaatcagagcatatcggagaacaagcccttcaagtacgcattgtatggagcggttgctttcttcacagtgatcacatcagatatgttcagggatttgaatgactacatgaagcttgagcctttgccggagggaatgcgtggcaagttgatgttgtgggctattctaatgttttgtggttgctacggatgggagtggctcctccgatgggtgttcccagggaagatgccggcgtgggagaagcgtcagaaacaggcagttgcaaacttggagaaaaagcgcgactagaatccttttttattatttgcactttattctttaccttttgctgctgcccattggttacttggcagtacatactgatcatgttttgtcatagttgcattctaatctgtagcctaggggaattttttggagtgtaggccctaaatgataggaggatacacagggtcggcactttgcatactggtcagcaggattattaaaactttcagttacaatatgaaatcttatatttagatggcaatgatatcggatgatgtacaatgcaaaatacagaagctatcttaggctttcattcttttgctgttatgatcttagtggccctttggaggtacattgtaatgtcgatcattgaaaactcgagtttctgggttgtttcgaagaagatctgtttcagtgtatcattagttgatttggtgaaagctctgcttgataact

SEQ ID NO: 24029 - DNA, 914 bp, Zea Mays
ttaaatgttttattgaggtacatttgtggaagtatcgtaattcctataaaacacgaccttccaaatcatgcggcacggccgcacgggtgctgctattgtgtctcttgtcacacacttcaatctgtgatcttgcaggcaatatgtttcatttcgtttgctgatgttcaagccttttaatggggagattcttgttgggaggattactggatatgacgataagggattgcaggtttcacttgaattcttcagtgacatttgcatacctggacacttgatgcagtttggcacagtaaggggaccagatggtaggtggatgctgaagactgaattaggcgatgagctttatctagatctagatgacgagataaggttcttggtttctagcacaaaatacccgcctataccaattgatcaaaatgaggatgacccaccatttgctccaatgcagattgttggaagtattaaaggggatggccttggtcttcttgtttggtgggcagctgatgaagaggagggggaggaggcggcagaggaagagcaatagcatcgtgttgcttgagggctcacttcgtgtaatttacagaatcagcctggtagcatgtgtagtgtaggggtcaggttcctaggagaattatgtatgtatgcaatcccctgaaattttctaaatatctgtgagctatatataattttatagcgcagagatctctccctgtaagagcatctccaaaagctccccagaagtctcctctaaatctattttttggggaaaaacacaaaaacatgtctccaacagttcccctaaagcgccccaactttttcatagcccttaaaactccctcgtttgtagctacaaatgaggggtttttttgggctccccagaaacaaactgctgctttaagggatctgttggagaa

SEQ ID NO: 24030 - DNA, 2355 bp, Zea Mays
gtttgtgtgactgtggtgtgatctgtggctgactggctgtggtgtcaagtgtgatacagagagagagagagaggcaggcagctgcgtctgcgtcgtggccggcgcggcgctgcgctgcgcggaaaccaaatcctcagctccggtgttctctccaatctccatccatccatcctcctcgcggctcgcgccccgaaaaatggcgccaacccctccccagtctcccgcgcggcgctgccccagctatttccccctcccctgaattgaccccagccgcgcctcccaaaccctaacctaacccccgccccctgggccccggccatggcgtcactgcccaagccgccgccgccgccacgccccaagacgcggggcaactacaactgcggccgctgcggccagcccaagaagggccacgtctgcgtcggccccggccccggccccggcggcgctgcgtcgccctcctcctcgtccggggccggaggggagcacgggctgcgccgcgccctctccttcgacgaggccggcacgccgtcctcgccggagaagaagcccaaggtggaggacgtcgacgaggcggagctggacgaggaggccacggtggacgtgggcgcccgcgcggtgtccagggaggtcatggcggaggttctgcaccgcctcggtccccgcggggtcatggccgccgccggggtcagccgaggctggcgggactgcgcgggccgggtctggcgcgcggccgaggagctccgccttcgcgtcctcgcctcctctggcgccggcctcctcgccgcgctgctcccccgctgccccgcgctctcccgcctccacctccggatggaaagtgatgttgatggcactaccctggcttgtattgcattttcctgcccaagtttaagaactctcgagattaccatggctgctgatgctgtcaacaggatgactggggaggatctaagtcgttttgtttcggagaagtcttctctctcagccctcaaaattggtggttgctctaatttggatattcttaatctgtgctcttcaagcctttcaattctttggttgtcagatctttgttccctttcgaaatcggttatgaactgtcctaatatgagcgagctatcactgtgcttcacagaacatagtagtgattgtaccaatctgattactttgatggatggcctaggtcgtacatgtcctaacttggaaaaaatgcacatatcatcaaaacaattatctaatgaagctgtatgtgctctagagaatgctaatctcaggggactgttcatgctatccctgattctaggttcaaaaataactgatgcagctgttgcatctattgttcggtcatgtgcaagcttggagttacttgatttaagtggatctagcattagtgacaatggtgttgggatgatatgtaaagcataccctcgtactttatcaaggctgctccttgctctttgcccaaatgtgaccacacgtgggatccagctagccacagcacagttgccatgtcttcaactcatggactgtggaatgagcctatgtgctaatgtgaagaatgaaaaagagggtccatattttggtgaaatcaatggaggtattagaattattcgaaaactgtccatcttaaagaggcaacctattcaccaaaagcttattataaagcatgggaatttgaagaagctcagcctgtggggctgttctgcattagatgctctatatctaaattgtccagagttaaatgatctcaatcttaactcttgcacaaatctacatccagaacgtctgcttcttcagtgcccaaatttaaagaatgtctatgcatccggatgccaagatatgttgattggagcaatcagaaatcagttgaaccatctcttccatgcaagcggctagcggatggctccaaacgggttcaactccctcagttcctaaagcagcagccgtcgaaggacaacaaattaattgaattgagccagacccagtgcactgtgcatcttggttcataataacaccaccagagccagttaacggagcattgtacacaccgaattatgtgaatcatgcaccacataacattatcaattcgttgtatacttctgtattgcatcagaacctgtagtgattgttgtataagctgctaattgctgcatggacatgtctgaatccatcatggatttcttgcgaccgttagtctgttctaggaaacattatataggaataattcgtaaccatgacccgtattctctagggaaaaaaaataatgatcctaggtcactcattttggttggtgttattctgttattcttccgcatgagctatctatggactttggttcttcaatctctacttttaaatagg

SEQ ID NO: 24031 - DNA, 1238 bp, Zea Mays
cccactccgtcgcgcactcgcgcctcctcaacttcgtctgcccgcgagccgggaaacatttccctcagatccaccggccctggagctcccgccgctccactgtaagacccgcccttgcctccgcgaaatcctgcgacatcacagacgagccgggggtggtggtgggggtgggggagcggaggtaggtcgcagcagccatggcggccgcagaggagaacagctcgctgttcctgattttcgtcctcaccatgatcgcgctgcccctcgtgccctacacgatcctgcgcctgtgtcgcgctgcctccgagaaggtcaagaccatccactgccgctgttcgggttgccaccgctccgatatccaacttgtccacgtgcagtaacctaacaatccttctgctctggattgttatgatattgctggtttactacataaagcatgttagccgcgaggtccaagtttttgagcctttcagtattcttggactggaatctggggcatctgaatctgatatcaagaaatcatataggaggctttctattcagtaccatcctgataaaaatcctgatccagaggctcataagtactttgttgaatatatatccaaggcatatcaagcattaactgatcctatatctcgagagaattatgaaaaatatggtcaccctgatgggcggcaggggttgcaaatgggcattgctttgcccaagttcttactaaatattgatggtgcatctggtgggataatgcttcttggaatagtcggattttgtatattattgcctttgatgatagctgttatttatttgtcaagatcgtcaaaatatactggaaactatgtcatgcatcaaactctgtccacttactactactttatgaagccatctcttgctccaagcaaagttatggatgtcttcatcaaggctgcagaatatatggagatgccagttcgacgcagtgatgatgaaccccttcaaaaattgtttgtagctgttagaagtgagttaaatctggacttaaagaacattaagacagaacaagcaaagttctggaagcagcatccatccctagtaaagatggaactgctgattcaggcacatctcactcgtgagtcatttgctttgaccccagcacttcttaaagattacagacacatgcttgaacttgcacctcgtcttttggaagaactcgttaaggcatacagtagtaatatgttacctgatgtaggcagaatttcaag

SEQ ID NO: 24032 - DNA, 1309 bp, Zea Mays
gcaatattgctttgttgtacttctgatgaatgcactgcaaggctttcaagcaacgctgagtaagtcgcctaatgatcctactgctcttgagggtgcagcagtatcgttgtccgaactaggtgagtatgagaaggcatcaacattccttgagaagctaattaaggtaatccctgataaagcagaagcataccgtttgcttggtgaagtaaagtttgaactcaaggattatgaagggagttcatcatcatacagaagtgctttatcttcatcagataatattgattttgaagttctccgtggactgacaaattcattacttgctgctaagaagccagatgaggcagttgatataattctgttatgccgtcgaaagttgaatgaaaagagtcaaacaggactagcagatttggaggctacaaatgacaatggtcgccaaaagcctcaagatattgacccgatccaagttgacctgcttttagggaaggcttattccgattggggtcatatcagtgatgctatttctgtctacgataagctaataactgatcatcctgaagacttccgtggttatttagcaaagggaatcatattaaaggaaaatggtaaagcaggtgatgcagaaagaatgtttattcaggcaaaattcttcgccccggaggcagcgaaggcactagttgatcgctatgcgcaaagatagtcgataagagattgaatggtgttgttttaaaccaatgagatcattcggattccagaaaaacgatcaacatgtttggaacgtcttgtatgatagcaacattatgggatctgggacattttgaattgtattgttttagaacaggcctgacgcagtatcgaaaaaagccttcccactgagacaagagattctgggttcgacagtctctgaaaaaatgcagggcaagccctgcccttggttattccttctttctgaaaaaaatgcagggtaagccttgcccttggttattccttctctctgaaaaaatgctgggtaagccttgccctgggttattccttgctcagacctcgctcacgcggaagccgccagcagcccttttattgctttagaacagcagaaatgaaacatgtatgctttgcctgggaacaatgctcagttaaacattttgatatacgtgtttagtccattatataaaaaattatttcgatgtgttggaacaaattgtgttgtcacggcacgagcctcagtgttctccatatccataatcacgtgaaatatgatcgtggttgaggtaatatatgtcatcttgccatgaatagttagggtcatatccct

SEQ ID NO: 24033 - DNA, 4260 bp, Zea Mays
cggggaaaggagaaaaatccacctcgccccttttccaccaggtcccagcccaagcctcttcgcctccgctagtacgcctccatggacgcgtaccagcaccagcgacgcttcgccggcgccggcgacgcaccgccgccgccgcctcacccctcccacccgagcgctcagtggtacccggcgcccccactgccataccatcctccccaccccggacacccctaccctccgcagcaccaccaccagtgggccccgccacccgacatgcagcaccagcaccatccgccgctgccgcagccctacgtgtaccaaccgccacccccgcccatggcgatgcagcaacagccgcccccgcctcctgggaacccctggccccctcaccacggcgccgggcagcacccgccgcctacctaccctcctcctccgccggggcaggcttggaccaatcactcatgggctcagaatcatggatatcaaggtcatgacaatgaggaagattgggctacaaaggctaaggcatgggttgctgctaaatctgttatgggaaaccaccagattcaacagcatgccatatccacaagtagaactgaaggtcatcataatggttaccatgatcagtatcagcaaccagctggtctgccaacagaagttacagaagctttgcacccaccagtacctcaatcaagtattgatcatgtgccatttccaatgacaggtcaacagagagaaacaaaccatttattaggtaaagtatcttattgcccttgatctatatattttacttatggatgtgtaagtttcagaatggagctgaagattatattgcagatagaggtccaatggtgtctccagcaaagaattttggttcattttcgtccacctatgagcaggaggtatcttataattattcttctgctccaggtatgccttgcttggcaatttaatttctttgcgcagcctgaatcataaaaggctggtcgctctgggtatgttaccagattcagttgtggaaagactttaaatctagagcgtcatttattttagaatagaaagtctggtacacttaacctatctctgtgatacttagttagcagtacctgttgtgagtactcattgcgtcccatttgaagcaccgttggttatatctattgtgtttgcctctatcaaatggagggaagaggaagacaaagacacgtattagtggttaaatgtatcaagatgttgacttaatggatcttttcattactgactataattgtatatcaaggattcaatagttactagcggtggtatatcatgtaaatgttatgtattgtccttaatgctgaaaaaaggacagacctagtgctggcggttcccacatgaggggtctgtggaaggaataatcgaggcaagccttgctcctgcattttgcacattcgcagagaatctgtgtcgaacccaggaccttttagctcagcaggaaggtttctaacagctgccagacccgtccttaatgctgaaaataagaagaaaaaactaactggtgcaatatatttcattgatggtgtttttactgtaaaataaagtgcagaagtgtacatttctttaaatgatcacttctacaatgtatttgagcattcatccttttctgctatatatagagctgaactcatttgtttgtcttgcataaagtacaatgatcatgatgagtaatattttttgtaaagaaaattctgactttgactttaccatgtaataataggtactgggaataatatgcttcaatatccaaactctcaagcacagccatttccaaccacggcagctgttcaaggtggattctcacagggttgccttagtatgcctgttcccttgacagaacagcctctttttgggcatgaaagacagccaattgatccaagtgaccaacctttggaatttaacagtaggaaagctcctgatttggcagtacatataaatgtcaattccaatatcccagctcctcaaacactagcacctaatcatgatgtagctgcaacctctacacattcatggacgccatctgctacagtagggtacctgcctcgagctcctgtgccaccacaaacagcacagatggatccttctgtgcatgctgcaccactttttggagcagcatctagttctagttatgtttcacctgcagcatttggtgttggtaatgtaacagaagtgttccctacagatccaaacactccttttagtgttgcagataaatcaaagaaacctccagtacctaactggcttcgggaagaacttttaaagaaaaaatcggaaccactgagtgcttcagcgcaaaactcagaaaacttaaatcccatggaagctaatgaggcagtacagacaataggaagacctgaccaaagtgacagcagaagcaatgattccgctaaatccactgaagacgatgacgatgatgaggatgaaattgaagcagctcgaatggcagcaatcaacaaggaaattaagcgtgtgttgactgaggtccttttgaaggttactgatgagctttttgatgagatagcaacaaaagttctaaatgaagacgactcagctgaatccaatgaagccactggtgttttcggatcaaaggagactggtctgggaagatcaagagccaaggcctcggctaaagttgttctccctgctaagtcaacaaatagttctgatcataaagatagtactgggttaagttcccctaaaggtgctcttctcggcctggctagttatgattcagatgatgacgacgatgctgacactgacagcaaggataagatgccaatatcaaatttatcttctaaagataatgctggtgctgtaaatactgaaggtgataaaagcactcttggtaaaagaaatgggaatcacaatgaacagaattcttcacttggaagttctccatcaggggaagatcttaaatctaataatcaaaactttcaaaggaatgcgaatgcagaacctgaacaaatgcatattcgtgatacagagaatggggagttccgtttcaaggccaagactcgtactgagccaaagggtgcatttgacagaatggatgagaaggcacatacgtatgcagaggtagatatccagaacagaaaaacctcttttggcaataatgctgaaaagcacaatgatttggaaagcagtcacagacattcagaaaagagcagcaaagaggactttgttaatgagttgaaggctgatcatacaaaagaactcgaatattctagagcagaaaaatataataacgatgacaaatacagcatgtatggaaatattgacaaaaggggtagctgcaaggagggaaaaggttctgatagtgctgcaaagcatgaatccgatacaagggagccacattacagaggtaactctaagcttgatggtgcaaagggagattggaaggatttgccgaaggatagagagagaaatagagatgatagaagggggaaaggaaaggatgaaaaggacgacaggttaaggcagatgacaagtcataacagcagaagttcacggtcacgatcaccaagggggagaagtcgtactagaaaggagaactcacatgttcgagggagtgtttcaagtgatgagccttctgatagtgtgaaaaagagaaagcattattcccataaaaccagcatgtcaccttcacccccaaaatctagaaacagacgaatttcgcggtctccacatagcaagcattctcaccgcaggcattcgccttattcatcggctggcaggaagaggcggtcgagatcgagaactccggtcaaaaggagatagaaggcatggacagtttatccgacgagatctttgcctaaacattcctctgaaacaaccaaagacatttttgcggttctgctgttgtctatctagtgcgtcttttgctccgacaacataatggtagaacagcattcctacagtgacaaacatgaaggcgaggactggatgtaccttgatataagatgcacattgaactgtatcttgtttgatagatgagctatataactagctcacgcagctggctgtatgatctgtagttcccccgttatctgaattgttcatgtattaggccatgtactgctcagcagagctatgtagttagttgcacttgtatgacttcagcatgcctgttgccagttgtttgtttgtctatgcaggatttttttcccgtttcctacttttttgataaaaataaactgattcctgtgaaatctatatatgatttctctcaaattcctgcca

SEQ ID NO: 24034 - DNA, 3460 bp, Zea Mays
cgggggccttggtgcggacgatgcatggccgaacgtggggcacgtgactaggggagaataatggcctggttatctctaatgacaacacattgaagcagaccgtggaggtagaaaaacaggggaggcaaggtaaggaggtcttagtggttcatgaattggatgagtcgaatgaggattctgggtcattggatgagccgccgggttggcttcctgacggttggactatggaggtttgtcaagaagacaatggctccatctacaagtactacacttccccaatgtccggatacatgttcacatcaaagatggagacattgcattatcttttctcaggggtggaagaacgcatgttggagttgcaggcaagcgccgaggacaacgagcttcatgagtcacatacatggcttccacgtgggtgggtgattgaagtcagagccggtgggaagaaaatggacaaaatgtacaaggtaggttggagatttgttgcacaataacatctagggatgcaaggaggcttgtccgtgaacccactaacagccttaatttttgaagttctccgcggaacccacaaaaatcaagcatatttgcaggttcacggataagctcacctgtgtgggcctttcattacatccatatggtgtggtactttactgcaactatacatattggatataaaaaatacaacagtcttccaataagatgtagctggcaagacaagatgttcccttctaaaagcgagtacaaaaccgaaagaacaattggggtaggtattggctgcaggcacacactggcatgcttggtcaggagccaaggtgatgaagcttgatgtcacctcaaccttggatggtggctcatagcatcctctggttttaccagatagatgcagaggatacatgtcatggagggttaggtgagtgaggcaatgccacagctgtggatggaatggaagaagatatccaaagaaaaaaaataaagcaggagttcacttgtgactctctcaatgcttattattttcagctcaacataaaccatgatatcaatcaacattgtacacgtagttaccatatcaatggaattctagggttcaaggggatcatctgcagttgtttgaatggttgaaataaatcttctcttttataattcagggttgaattttatgtctttaagagtgggtgttgttagaatacaagtgaattgcccatctcttctatcagcttgagcttttgggttgaattggttggataaaagattgaagtctcgagttcgaatcttggttagcgcaattaaataaaataattgttgcttgcttttattccacgtctgaggcttgagagagcctcggcatcaggagtgttagaatacaagtgaattgccatgacttaatttgtgtaggggcaggaggtataaatctttgctcgttcagaagaaagctgttaggttgagagtgaggaggaagttttagttacatggtggatatgttagttccttggaggaaattgaagtcacacaaacgttagatgagatatgagcatatgacatttctttttgttttgaagcttatgccttctgcagttttatgttcacctacctactgggcagcgattcttatcaaaagcatggtggatatgttagttccttggaggaaattgaagtcacacaaacgttagatgagatatgagcatatgacatttctttttgttttgaagcttatgccttctgcagttttatgttcacctacctactgggcagcgattcttatcaaaagcagaagtattgcactttgttaataagggcatggtttctacatgtgatatggatgtgctgtgcgacactagcactgatgataatatacttgctcatgtggaattcaatcctgatggtttaccagatggatgggtgaaagaaacgatatctagaaagttcaatgatggaatcagaaaagaccagtactataccgatcctgttagtcaccgtgtatttcgcacgcttaagtctgtattgagctaccttggaaccggagaaatatctaggcattcctatttaccaaggagaaatgtcattgacatgtattcatttgataagtgtgcagatctgcccaaaagcatggtgaaaagattgaaagcaaaaggacaagcaaagaaaaaattcatgagagcacaggttttagacaaggacttatctaatgggcagacttcaaatcactgtgaaggtgctattgggttaactcaatctgacccggaaggagataagtttggatctatggaagcggcatgcgaaaaggggaccagttcagagactatgaaacagcgaatagggaggccaaagaaaatcttgaagcaaacaaatgatagcatttcggatcgtgacaagggttcacatcaggagcacatcgaggccaaagaggaagttgatatctgtggtgggaaagacttgacgcatttgaaaactctggagcgtaccgaggctcagaatagcacaatgataaccaaggaagtaaacaacaacgacacagcagagaaaaacctatccaagatagagggagacaactcggatctggtaaccggcacgggtttgcacaagcaagagaatagcagattaactgaagttagtgagaaggcaacattctccacaggttacaaattttacaagaggagaagttgcaataagacatgaggttcaagaaaagcataaaattagatcaagttatctggtcagtagtccagaatacaggcactttgttatactatcaaggaacgttcttgcggcttctgtagcaatcaactcaactgtgagcagttgtaaggagccaggctattttgcttttcatatcctaactgacgctcagaacttctatgccatgaaacactggtttgccaggaattcgtataaaaatgcagctatctgtgtcataaactacgaagcaattattttggagaaacttccaaagtatactatccggcagctgtatttgccagaggagttccgtgttctcattaggagcattaagcggcctactgaaaacacaagaatgaaatacctgtcactgttcagcccctcacatttcgttattccagaaatattcaagtatctaaaccttgacgcatccacaacgttggaatatatatgtactcatattcggattatagaatacaggcttatctgtagaaaattaatataaaaataacaaatttgatgtttgtgtactgatgctaacacaggaatatgggaatagtttttttttcatgtgcttttatataaaatcaaactggtgagactacaaaattcatgtattaatttatataataaccttgcattccaaataggccatcgtataagatagtcaattccataggagttttaaaaaaattaatacgtaagattcaataatttattccagagactcttagaaacctctggcagcaaaagccccaagacaaaaaatatacctaatgagttattt

SEQ ID NO: 24035 - DNA, 1835 bp, Zea Mays
gagcagagctgactctgccgcttgttgcccgttcttggctgctgttgctggcgagagcgcgcaggaggagcggctgatttttgattctctctgtccctccctccctcgcttcgctcgcgcggggtgcgtgcacgtaccatgagaagatgatgcgcgccaggcccaaaggtacattcgccgacgcgatgagggagagctcccctcctcctcctccccctccggctccggcttcggcagcggtgaaagaggacgagtgggaggtgcggcccggcgggatgctggtgcagaagcggagccccgacgccgacgcccccgccggggcgcccgtccccaccatccgcgtcaaggtcaagttcaacggcgtgtaccacgagatctacatcaactcccaggcctccttcggtgagctgaagaagatgctgtcggcgcggaccgggctgcaccccgaggaccagaagctggtgtacaaggacaaggagcgggactccaaggcgttcctggacatggccggcgtcaaggaccgctccaagatggtgctgctcgaggaccccgccgcgcaggccaagcgcctcctcgagcagcgccgcaccgacaaggcggagcgcgccgccaagtccatctcccgcatcggcctcgacgtcgacaagctcgccaccaaggtgtcggcgctggaggccatcgtcagcaagggcggcaaggtggtggacgctgacgtggtcgccctcaccgaggcgctcatgaacgagctggtcaagctggactccatcgccgccgacggcgaagtcaaggtgcagcgacgaatgcaggagaagcgggtgcagaagtacgtggagacgctggacgctatccgcgccaagaacgcggcggcgcccaaggccaaggccaaggccaacggcgacatgaatgggcacgccaaggcccgcgcgccgcaactcccgccgcgcccgccgcccgtgtcgcagaggcggaacttccagcagccctccccggcgccagcgccgcccacgcagggctgggagtcgttcgacctgctgtcgtcggtgccgtccacgtcctcggccaccgtgaccaccaccatggcggccgcgaccaccaccacctcgccggccggcgtctccccgatcccgcggttcgactgggagctcttctgaagccctccctcctcgcggcgcgtcggcgtgccggttggtcgatcagacggcgcatcattgattgggttctgggggcttctgttttgtggccttgtgggagccgggcacaattattggtggccaccccgcgtgggcgtgcctgccagtccaggcgcggcgggaccgacgggcgccggccgaccagtgagggtgctctgctcgactgattcgtgactgggtgcgctgtgttatgtctcgccctcgcgaaaccgtgtgtagtgtgtgcttctctatttcagtcaacgcttcagtacagtttcaatttcattgcttcgaatgctaacatctttttccttctcgatttggaaattggcacatctcacctgactcagcaattattttttttactcttacttatgccaatatttaggcggtggtcagaaacatttgttagttttatatgaattgattttacttaggaatgaagggagtatttagagttggtttgtaaccacgttttttttttttgagttttgagtaaccacgtcttaataaaattcagatgttagtagctttttttttgaaccaggtgttagatacttatcaacatagtttgtattagtgcatagttacgtctaactaaaaaaatacgtacaagccctcatagaaaagcacaagtcttatcccttcgtctaaaataaaaac

SEQ ID NO: 24036 - DNA, 2615 bp, Zea Mays
gcggccgcaccgcactgcagcatcgacgacgccccggcgggcccgtccctatcaacccaccccgcgccatagaagcaggcgaaagcgagccccgggaactcactcccttccctttcagagctcacagttcggagtgggaggaggagaggagacccacacactgtacccggccacagaagcagctactacagcaggagagggagaggaggccggcccccaagatctccgtccgagaagaagcgagcggcgacggcgagacgaggcagagagtttggtgactgcagaaggattcggtgaggaatctcgtcatgcagacttcaaaaccaagctctctttgcaggagtgggtcttcagatgccccgcagaggacttctccaaggacaccgcgggcatctcgtgtggccaaaaccggagggaatgaaaccgattctacaggagttaccccgacaagaacgcctacggagaggagccctaaggttactgagaggcggtctccacggagcccaattactgagaagaagcgcccaagcaggctatcggaactggagtccaaggtcagccagctgcaagatgaactgaagaaggccaaggagcaacttagctcgtcagaggcacggaggcgccatgcgcagcaggaagccgaggaagcaaagacgcaagagcaggctgcagccgcctcgaagctggaggagttgcagcgccagcttgacgagttctcagctgcggaggaatcccgtctccaggaactgcgcaagatctcgcaggaacgtgaccgtgcctgggagtcggaactcgaggcagtgcagaggcagaaatcagcggacgcagccgcgctcggctcggccatgtccgagatccagcggctgaagcagcagctggaagcttcagcagagtctgacgcggcccgcgcgaagcagtgcgagtacgtggaagctgagatcgagggcttgaagcaggagatggagatccgcctagcgaccattgagggcctgaaggtgaatgtcagcgagagtgacagggctgcggctgaggcaaatgccacggtaaatgagaccaagcagcagctggagacagcgaaggccaccattgactcacttgtagctgagggcgtccgcatgcaggaatgcctgaggtcgaaggacatggagctcaatgagtccaaggctctcgtggcatcgctccaggaagatatgaagaagtcacatgacacggacaatgccaaggccaaggccaatactgatgtccgctctgagactgaggctctgcagaaggtgctggtgaccacaagtgccgccgacgccaatgggagctgtggaagctatgacccagagatcgaacagttgcggactgctcttgaggtcgctgagatcaggtaccaggagcagcaaactcggatgactatcgagactggaggcttgtacgagacattggagagtgtgagggccgagtgcgcccgcgaactgtgcgagctcaggctggagctgaagaacaagaacgatgcactcatggaggcaatggcaggagccgccgcagatcctcacaggccagacgcgatgcagcagccggagctggaggcgaagctgatgaggtccatcaccgacgcggcggagctgaaggcatgcctgatggacaaggagaacgcgctgcagagcctggcggaggagaacgaggcgctgaaggcgggggcgggcagggcggaggcggagctgcggcgcaagtacgaggcggcggtggcggagctggagctggccaaggccgcggagcaggacgtgcggatgcggctggggctggtgacggacgaggcggacaggagcagccggcgcgctgcgcgggcgtcggagcagctggacgcggcccaggcggccggcgcggagatggaggcggagctgcggcgcctgcgcgtgcagtccgaccagtggcgcaaggccgcggaggcggctgcagccgcgctcggtgggggtggggggaaggacggcaacggcggcacggtggagaggaccgggtcgctggggcccgagtacggcagctccatcggcgggaagctgatgagctcgccattctcggacgacgtggacgaggagtcacccaagcggcgcaacggcggcggcggcggcggcggcggcgtgctgcgcaggatgagcgggctctggaagaagagccccaagtgagtgagactgagatggggtggacggggtccgggatagccgtaggtgcgaggtgatgcaatagcagcagtatgagtaggagggatactggtgaatgctgcagggaagacgacgacgctctttctggacaagacacggagacacagctctagtctaggtggtaggaagcatgatcgtctctgtctgataacatttggctggtacttgagtgaacctcgtgtcgaggagcagctgcttttggctgcctgttctgtaccttactatgcttcattcagtcaaaaaaattcccacatgtgacatgttcttggttcttttttctttttgaagcgtttttatttcattttcccttcagaagctatgctgtacatctaatacgttacttgcctggctgatgatttggatgtatgtatctgggcagtatcactgcgcgttctctcagcgcgatttcac

SEQ ID NO: 24037 - DNA, 3698 bp, Zea Mays
ccggcctccagcctccagcctccaggccagcaagcaaacagtagcgcagtatatattggcaaagcatccctttctcgtttcctcgctcgcagtcgcaacacgtttccacgccgtccctccgcttacccggccggccatccccattcccatccttttctcctcctcctcctcagccggccaagctcgctaccgcctcggcgctcctcctccggctcggaatgcgcgatgcgagggctccgcagctccagcagcgagcccatggcggcgtcggcgtcgtcgtcgtcctcctcgtcctcctcgcaggcgccgccagcggccagcagcaggcgcagccgccgccggtagtacctccggcggacctgccggacgtggagaggcagctcaacaacctgaccaacgacatcgcagtcaccatctccgacaagttcagcttctgcgttgccgacctggaggaggactggaacgaggccttcaactacacgtccgacctcagcttcgtggatcggtgcctcacggagacccaaggcgacctggtccagcgtctatgcacgccggacgaagtgaagttctacctggcaagcctgtacgaccgcgacggcgacaagaacatcaacctcaagacgaacataaactgcaacatctcgtcctgggggagggggtgcgacgccggatgggcctgcgccgccgacccggtggtcgtcgttcgggatcccaggaacggcgtcccgctcagagcgaggggctgccaggcatgctgcgagggcttcttctgcccgcgcggcctcacttgcatgctcccttgtccgctaggctcctactgcccacgcgccacggcgaaccagacgactggcctctgcgacccgtacaagtaccagatcaccccgaactcgacgaacggttgcggaggcgctgacatgtgggccgatatccagagcaccgaagagatcttctgcccggctggttaccactgtccgagcacaacaaggaaggacaactgcagcactgggcactattgtaggctcggttccaccgctcaagagaagtgcataataaagggctcctgcgatgagaacacggagaacgaaaacgtcaagatccttggagcttgcatagtgggtgctctgtgcctgctgctactggtcatatacaactgctcggacaagttcctcagcatccgcgagcggaggaaagcgaggtcgagggagaacgccatccagctggcccggcagcagctgaaggcgcaggaggggtggagggcggcgaaacagtttgcgaggaggcatgtgagcggcatgcagggccatctctcgcgcacgttctcgagacgggtgtcgtttcggcagccggtggacccgcacagctccagccgcagggtgcaggaggcgccgctgatgacgcaggagatgtcagactctgccgtgtttgcgtccgagagcaggagcgagatcacggaggtggtgatgccgtcggttgttgtcgacgtcagcgacggcggagaggtcgtcgtggtggacacgaaggaggacaagcctgcgcccaagggaaagcacaggtccacccatacacaggtgttcaagtacgcgtacggcgagatcgagaaggagaagttccagcagcagcaggagagcaggaacctgaccttcaccggggtggttgccatggccaaggatcagcagagggagataacgaggccgttgatcaaggtcgagttcagggacctgacgttgatgctcgggaataataagaagaagaagctgctgaggtccatcaacggcgagctccggccggggcgtgtgactgctgtcatgggcccgtcaggcgccggcaagaccacgttcctcaacgccgtcaccgggaagctcaacggctacaagatgacgggctctgtcctcgttaatggaaaggacgtcaacatccgctcttacaagaagatcattggcttcgtgccgcaagacgacatcgtccatgggaacctcaccgtggaggaaaacctctggttcagtgcaaagtgcaggctacctgcaagcatgaagcatcgcgacaaggtgctggtagtggagagagtaatcgactctctggaccttcaggggaccaggaactcgttggtgggaaccgtggaaaagcgcgggatttctggcgggcagaggaagcgcgtcaacgtgggcatcgagatggtgatggagccatcccttctaatcctggacgagccaacgtctggcctggacagctcctcgtcgcagctcctcctcagagctctccggcacgaggcgctggaaggcgtcaatgtctgtgctgtcgtccaccaacccagctacacgttgtacaacatgttcgacgatctgatgctgctcgcgaaaggaggcttggtggtctacaacggccccgtaaagacggtcgaggagtacttcacgacgactctcgggatccatgtccccgaccgtgtcaacccgccagaccactacattgacatccttgagggcatcgttaagcctgagtctgctggcatcatcaaagccaagcatctgccagtgcactggatgcttcacaatggttatgaagtgccaagcgacatgcaggacgatgccaaggagatcggcgaacagaccccacagttgaggtccggctcctcagtttctgctggctcaacccctcactgcctccccctcaggaacgccttcgcagaagagcgcgaccgtctcgagcaacatttgtcgaaacccaaggacctgtctagcagaaaaacggcagggatactcatgcagtacaaatactacttgggaagggtcacgaagcagcggctgcgtgaagctaggctgctcatggttgatttcctgatacttggcctagctggtatctgcttagggacgatagcgaagctcagtgacaagacattcgggatgcctggctacatatacactatcattgcagtttctcttctgtgcaagattgcagcactgcggtcattctcactggagcggctgcagtacttcagggaaagagagtctgggatgagctctctggcatactttcttgctagggacacgattgatcatttcagtacggttgtgaagcccatcatttacctgtctatgttctactacttcaataacccaagatcaacgattgccgacaactacatcgtgctcctcgcgcttgtgtattgtgtgacggggatcggatacactttcgctatctgcttcagtcctggctcagcgcagctgtgttctgcacttgtaccggttgttctgaccctgttagccactcaaaagagcactccgacattcatcaagagactgtgctactcaaaatgggcgttggagggcttcataattgtaaatgccaagaagtatcctggagtctggcttataactcgctgcggcctgctgttccagaatcagtttgatatccacaactacaagctctgcattctgattttgttcatgtatggtctcttcttcaggatggtggcatttgctgcaatgattttactcaagaagagatgaatgtagtagtttaggtgtaccgtttagttcatatctaatttcttcattcatttgcacatgtgtaaatcatttcggatgagaggttttatagcactgaccagtgtacagatgagaaaaaaaggcaaatacaaattcagattttttttggcattattctttttatattaggtgtacatccccatctctgaaatcctg

SEQ ID NO: 24038 - DNA, 486 bp, Zea Mays
cttcttggactcttggaaaaggtgaagatcaatgcacctcatttctgccctcagttgctcatggttgatggaaatggattgctccatccgcgaggttttggtttagcttgtcatctcggcgttcttgcagacattcctactgttggagttggaaaaaatctacatcacgtagatggccttaaccaatcagaagttagaagactgctcggatcaaaagagaactgcaacagggaactggttttgttgactggacagtctgggacaaaatggggcatggcggtgcgctcctgccctggttcgtcgaagccaatctacgtctcagttgggcatcgcatctcacttgattcagccacggcgatagtgaaatcttgctgtagataccgtgttcctgagcctacaaggcaggcggatataagatcaaaggtcttcctgcagaagctccaaaagccacggcagtgacaggacttcctttttgttttttttcct

SEQ ID NO: 24039 - DNA, 1716 bp, Zea Mays
ccgacgcctaccgcgccgccaagggggaggccggcaagaacgaggtcgccgcggatggccacaagcctggccccgtgccattcttcgctgcgggtattagctcggtgcttcaccccaaaaatccatttgctccaacattgcattttaactaccgttactttgagacagatgcacccaaagatgcacctggtgcaccaagacagtggtggtttggcggtggtactgacttgactccctcatacatcattgaagaggacgtgaagcattttcattctgttcaaaagcaagcatgtgataaatttgatccaagttttcacccaagattcaaaaaatggtgtgatgattatttctatattaagcaccgtaacgagcggcgtgggcttggtggaatattttttgatgaccttaatgattacgatcaagaaatgcttctcaacttcgctacaagtgaaaccatttgctagaatgattggatggaattatttgtattcagatgtggagatgtctgatgcagggaacaacaggtctaagaccttcttgaggccacttggcagcattagcaagaagaaggtgcagcttcatttgaagatcaagaaagacaagagaaaagctaggaagaagggaaagttttcttttaagaagtagaggagtgtatgataaatcatgcagttttgttcccagtttgtaaaacaaacgcactgcagtcatgtcatgtggtgcacctacctaagtccattcgtgggtgacctactattaaatatgttgaaatgggtacgaaaaaaggatagtgctgacctatcagctgtttctgttctgcgggtataaatgtcaagtactcaaattgctgagatttggtttcattttcacattgtatcgtggtgaaccatgtttggaaacaatggccttgtttggcacagctgctgcttgttgaaaaactggtaaaaagcagcttctgtttgttggctgtttttagtgtattttgagaagcagctgaactgataagctgctgcaaaagctagctgtttggtagaacttctgcttaaattatgaagaagctgaaaataagctgtgccaaacagggcctgatgtcgagcacttagggagcatatgaactgtcatttgttgtcactcataggcctgctaatggcaaaaaatccaatccactcccacccatacctaaatctaattactttgatatccatcccacacccaaccaaaaatactagaggaaagttaaactcaacccaaaccgacccgtaattgggtggaaacccatggaaaacccgtgggtttagcttattgtctcacatcaagccaactgcatacatattttaaaaatcacattttaaagcagtaaattaatttaaataaaaaagttttcaactacaaatttgtataactcatcatgatgtacattttatatttcgaacatttcttcatatgataaactaaaaataaatttgttcatacgacctatatctctctcatagtttatggaactacgagatatatgtatagaatttgtgcatattgttagaactatcatgtgagatgaataaatgatcaaacaaccaaaataaactttgtagatcttgaaaagttataaaagtttgtagttgacaactttttcatttgaagtcatattgtcaacgaaaattatgcctgaatttaaaaaatttaaaatttgaattttgaaaacaacctcgaaagaaaaaa

SEQ ID NO: 24040 - DNA, 2480 bp, Zea Mays
gccgttcacattgtggggaaacgtacggccattcccgttccccgccgcccctcgcctccgctgcacgcgatcgacgatccacagccaccacctctgcgttccccaccggagcatcttcaccaatcaccactgggctggctcccgcgttccccactggatttctgcacccagcgcttcttctgaaatttagaaggcggtggaaccgtcaaatcaaatggagggatcctcttacgcgtcaaggagctacagcgaactagctgccgcagcttccggaggtggaaggacgctgagggtaataccgctgcggcatccgctgggttctctgtcgacgtcttccacgtcgccgtggtggcgggcggtggtgggaagggctcggggcatggggccgcttgattgggcggaggcggccttgccgtgtgtggcgtggacacggaactacagatggaagcaggacctccaggccgacctcgcctcgggcatcaccgttggagtcatgcttgtgccccaggcaatgtcatatgcaaagctggctgggctgcacccaatttatgggctctacacaggctttgtcccgttatttatatatgcaatatttggctcgtcacgacaactagcagtaggtccagtggcacttgtttctcttcttgtatccaatgttcttgggggtatagttaattcatctagtaagctgtacacagaattagccatattactggcattcatggttgggatattggagtgcttgatgggactgctaaggcttggttggctcattcgtttcattagccattctgtaatatctgggttcactacagcttcagccattgttattggtttatcccagataaagtatttcttaggttacaacgtcacaagaagcagcaaaattataccactaattgagagcataattgcaggagctgatgaggttggtgaaataccacagggtcttcccaggttctccattcctcaaggatttgagcatctaatgtcacttgtgccaactgctgtactaatcactggtgttgctattttggaatctgttggtattgctaaagctttggcagcgaagaatgggtatgagttggactctaacaaagagttatttggtctgggaatagcaaatatctgtggttcattcttctctgcatatcctgccacaggctccttttctaggtcagcagtgaatcatgaaagtggggcaaaaactgggttatctggaatcataatgggcataatcattggtggtgctctcttatttatgaccccattatttactgatataccccagtgtgcattggctgcaattgtgatttctgctgttactggcctggtagattatgaagaggccatcttcttgtgggctattgataagaaagatttctttttatgggcaatcacatttatcacaacattagtttttggcattgagattggcgtccttgttggggttgcattctcattggcctttgtgattcatgagtcagcaaatccacatatagctgtcttgggccgtttacctggcactactgtgtacaggaatacattgcagtaccctgaggcttatacgtataatgggatagtagtggttcgaattgatgcaccgatctactttgccaacattagctacatcaaagacaggttgcgtgagtatgagctcaatcttccaagttcaaacaagggacttgatgttggaagggtgtattttgtgatcctcgagatgtcccctgttacatatattgattcgagtgctgttcaagctcttaaagacttgcaccaagaatacaaagcacgccatattcagattgccatagctaacccgaaccggcaagtgtaccttctgttgtcaagatcgggcatcattgacttggtaggagctgggtggtgctttgtgcgagtgcatgacgccgtgcaagtgtgcctacagcacgtgcagaattcatcttcaaatgcgttgaagctacccgtgcaggcatcaggcgtgttgaccgattctgtttcgactcctaaaccagagcagcagcatcaaaagcagcacggcctcttcaaggacctatggaaggcacaggacagtaacgcggatgctggtggtgaggtgcagccactgctccggcaaaaccttgtgtaatactcctacaaaatacggagtacttcctgggatggactcacgccctcgctggcctatacatatacgtgtttatttatttgtctatgttgttgttaacatggtatcgtggtgaacaaaagaaactgaacatgccattgttactgtggtgtggcgttttttgtacacttttgatacctaaatggaactcctatgatttgggtctggaaagggtgtgtgaagatgttttgttccaggttttggagttccgctcccagattggcttgacaagcatgttaattccatgaactctcttccacaaaaacagtacagctgattatcagttttatgtttagaatgagaaaatagccctggc

SEQ ID NO: 24041 - DNA, 2307 bp, Zea Mays
ttcacagctgcgtgcccacccgatcctcgcttgacaccggggaaatccacggcctgctgctacagagcatcgccgctgagcacactggggtgacagtgacaacccgtctccctctctctcgccagatccccctacctccgcgtctctctgtctactttttttttggggagggggggggggggggggggggggggggatccgcgtcgaggcgaggtctgctctggtcacctctggcgatcctccttcgcccattgcctccgccggtcaattcccttcgctggtactcagagatcggcgccctcctcccgtcttcccacgcttgcgggcactaactcagagtagtgtcgctcaatgaatttcctctaccgaactacgcagcctgcagcgactgagctgccaagaatttcagagcaagatcacaggaatgccttacaaaagacgacttcgacactggagggtctcattgcggacgattcacaccaccagccctcctctgcccacatcgaagatggagctgctaataatgggtccagggatatcagtggggattcttcatctgttgatttgaaaagcccagtcccactggggacacatgccgatgtcatggaagacgaaggatggatcacaattccatgcaaggcacttcctgaaagttggaacgacatatcagaaatggttcagttgcaggctctggaccgttccttcctttttccaggcgagcaggttcctatactggcgtgcctgtcagcttctaagcaagatgtacaggttatatccccctttagaattgctgcagtaatgtctaagaatggaacttctatgcaaaactttacaaataaatctagccctgtcagtgcaaatggtcatgataatggagcagctggagaaagtggctatcaggatgttgaacccaatggtgaagcatctccttcaggacatgatattttggagactcaatctctccttcagatggaggatcataagcagcagatcgaacatgtgttgcgaagatttagagaatcaaatttttttgtccggattgcggaatcagtggaacctctatggtccaagaaaagtgtaacttcaactacgatggcagatgaacgatcagataaccagggaaatagtaagagctcaaggagtaatgtttataataccatttctgataaaggggtttttgatggtaacacatctgggggagttgctcgagatgttgtcaagtgttattctctgcaaaatggagacatagtggttgttttgcaagtgaatgttagcgttaacaaattggaagatcctgtgcttgaagtccttcagtttgagaaaacctcttctgttcagacaccaaataatataagaccaccaccaatatctgaaagtcaagaatttatgcctgaaaaacctgcaaaaaccccagatattataaatgatgggcaactttcgtttagaggagttcctttagaacctgaacggtattctaatattgctcctactcatgcaaaagatatagtcgtattcatcgatgcaattactattgtatttgaggaggcatccaaaggaggtgctcctttgtctttaccaattgctagtattgaggttgggcatggtcacagcttgccaaacctagcactcaggaggggcgaggaacactcttttattctcaaaccagcaactatgtcctcaagggaacggaagaccaacagtcatgcacctctggccttatcactcccaacgatgaccggtgctactttaaatactcatacaccaaaggctggtgagccgtatgctgatctaagcgaccaatatgctgtactgatactaacactcgaagctactaatatgacatccgaaaaccttacattaactgtccttgctcctgaagcatctggttcttcttcagttgtatccttgaactcatctccaaccaccccaaatggttcttttgatggtgttaatgagtcatcaaaaagatctgggctgggaaaagatggaattggctttcgaagattgaattctgtcctagctactccaaaagaaggtgataatggaggaaacagaatgagtaatgcttcaggctgtactcatctgtggttgcaaagtgcagtgcccctagggtgtgttcctgcccgctcaagcaccactgtcaaacttgagctgctaccattatcagatggaattatcacacttgatactctgcaaataaccgcaagggagaaaggccttgcttacattccggagcactccttggagatacatgccacctctgtactggaagcagaatcccagatcatggcccggattgaacggtag

SEQ ID NO: 24042 - DNA, 684 bp, Zea Mays
atgatgatggattccgcggagcatcagaaggtgatggggatcgcgccggcggcggcgcccgcagcggaggcggggagaccgtgctgcgtcgagtgccgcaccaccgcgacgcccatgtggcgcggcgggccgacagggcccagtcgctctgcaacgcgtgtgggatccggtacaggaagaagcggaggcaagagctaggtctcgatagcgccaagaaaccacaacaaaaccagcggccgccgccgccacagcagcagcagcagcaagaggatcactgtccggcaacaagtgcagtcgctgtcagagacaacaccaaaagcagcaggctccaagtggtgaagaaacggagggtcctgatgggagtggaggaggccgcagtcctgctcatggccttgtcctcctcatccagatccacgctgctacatggctaggaactcggcacatcacccaaaaaagggctgctcgttgtgtacatacatatacaggacgcacaaacacaaacaggccacccaggggttccaagccagcgatgtatctgttgggtctatgcttcgtcgccgaaggtcttcaagggagaagcggcttaaaatgtgtgagcaggtatcttcggactcgtatcagaaagggaaaagctacaaaggttgacacagcgccgaagctgtgaagcaggaaagcttcgacatg

SEQ ID NO: 24043 - DNA, 1490 bp, Zea Mays
gcgcccctcctccgtgcgtgccccgcccccgtccttcgctcacccgatgccctgccacctccgccgcgatagcctcccccacgaaatgcccccgtgatgttcgccccgctgcgaacccctccccctagatggaataagcagaggtccaatgcggatccgcggcccccgaccctccaccttggtgtgacagtcgcggctccgtggaggcaacttgctccctcgctcccacctcccacgccgccactgttgtcgccttcagcacgctgcccagcccacgccccccccccccccccgcctccaaatgtggatctgccaccccggccctccaccttggtgtgccttcagcacgccaccactgctgtttgattccttctcctttttgtttaggacgtcgccaaattccatccatctctcagcgccgtggtctcccgatgtggatgggggaaggaggaattaaccgagagcttgctgccgcaaagaagatttctcacatctgagatcgggagaagaaagcattttcaaggagaatagccgatctgttgatgtgcttggccttaagactgcttttgcaaccttcatgggtaaggcaagtaaccttcctcctttgcctctctgatgctatgtgttatgtaataatggcctaaccccatcggtcgcttagtaagttgtcttgtctgttattaacttacattaaaattctgccacaaattcccatcaacaagaaaaacaagaaagatagctactaggagaagctttaatacgctcgatacctggcatgatgagttcctcaatcaatttcaggctggcccatcggatcctcaatgctttctgttcattttggtcgggaacaagattgatttagatggcgggagcaaacggatggtcagttttcctgaatgcgcaagctttctcatatatatatattcgaaataccctgcagtctctttgcctttcccgcaggttccagagaagaaagcgagggaatggtgcgcctccaagggcgatattccatacttcgagacctctgcgaaggaggaccacaacgtcgacactgctttcctatgcatcgctaggctcgctttggagcatgagcatgaccaagacatttacttcaagacagttgtggaacaagtcccggacactgaacagacaagcggatgtgcttgctaggagccagccatttcctggaaggctggaactacgtggatgttactgaaggactggcccccgatatgtttccctcccattttttcttttgagctccagtaactttattactattctgtgttgctctcactggattttagcacttctgtaagttgtcatcttttaaagttaagaatttttacataagtcttacacatcgaacaaatccaccatgtacattaagatgcaatgcttatcgaacactcaagtattatgctcttgtaacctaaattaatcaaaattgggcaatgatcagcaaccgacttgtgctaaggtagaaaaat

SEQ ID NO: 24044 - DNA, 2338 bp, Zea Mays
ggattatctactccatctccatcaagatatttgaagggctgtgataacatcctagcacagcttcacactgcacatccagaattttgtgacaaagttggaggaattctagccatgcatattgatgacttaagggctttagcacctctgtggctctcaaaaactgaagaagtgaggcaagataagtcccattggtcaaccaatattactggcgatatatatggcatgggttggatcagtgagatgtacgggtattcatttggtgctgcagaagtaggtctacggcacaagataaatgatgacataatgatctacccaggttatactcctagacctggcattgagccacttatcttgcactatggtttgccatttaaagttggaaactggtcattcagtaaattagaacaccatgaagatggaataatttatgattgcaaccgcttgttcgatccacctccttttcctagagaggttgagatgatggaatctgacccaaatataaaacgtggcttatttctaagcatagagtgcattaacaccttgaatgaaggactcttgttgcatcatgcatctgctggatgccctaaaccacagtggtcaaaatacctgagttttcttaaaagcaggaggttttcagagcttacaaaaccaaaatactggaagggtgaacaggttgacagcataatgaccatgcaacatgttgcattgtccaaggcaaacaatgaatatccaaaaatacacacccttttctctaccgaatgttcatcatattttgactggcaaactgttggacttatgcacagttttcgtttaagcggacagcctggtaacatcacgcgcttattgagctgtacggatgaggacttaaagaactataaaggacatgatcttgctcccacacattatgttccatctatgagccgacatccattgacaggggactggtaccctgcaataaacaaacctgcagcagttctccattggctcaatcatgtgcagactgatgctgagttccttgttatcctagatgctgatatgatcatgagaggccccatcaccccatgggaatatggtgcaaaacgtggccatcctgtttctactccttatgagtacctcattggttgtgataacatacttgcaaagatacacactcgcaatccctccgcgtgtgataaggttggtggtgtcattatcatgcatatagatgatcttcggcgttttgctctactgtggcttcacaaatcagaggaggttcgtgcagacaaagctcactatgcaaccaacattactggcgatatatataattctggctggattagcgagatgtatggctactcttttgcagcagctgagattaacctgcgacacatcattaggagggacataatgatatatccaggttatgttccactgcccagggcaaaatacagggttttccattatggtttgagatttggagttggtaattggagctttgacaaggcggattggagaaacgctgatgtagtaaatacatgctgggccaagttccctgaaccacctgatcctgctacgatcacgaaacaagatctagatgcacgggagagggattttctcagcattgaatgcgggagagctttgaacaaagccctatacctgcaccataagcgcagaaattgcccccggctagacaccattagcagcacatctaagaaaactgatcaagtttctgcttctaacaaaattgtgagtgttgcacaaaagtcaagaagtataagtagaggaaacatcgaatccatggacgagggaaggttgaagactgtcaagaggactgcagcttctgtacaacctctacatagatcaaggagactggccaggtcttctaggatgtggataattgctgtatgggcattatcaattgtggtgttcctattagtaatctccatgtttttcactgagcaaaggagaaacgcttcgagatctagggtttctagaagtttaaaggctcatgtctgagtattctctttttctaccgacacaatttctgactatagagcagacaatattcacaaactgttactttgtggacgtatataatacataaaaggattttgccaaaaggttatggtcctgggactgtataggctaacatctggtttgagttatcagaagccaaaggactagaacctttgcgaacgtctcctctcttttgtcaaaacttcccgtaaactgctagcatgtttcggtgccactgctgttgtacttgatttaataggttcttttattataacaatactgtgaagttccatatattatttctttcccttcgtgagtgagttggaaaatgtatgagttgaac

SEQ ID NO: 24045 - DNA, 1157 bp, Zea Mays
atatgaatatccaatcgcccccatccatttacccaccaaagagatactgtgacttaacaggttttgaggcacggtacgtggatccgaggacaaagttgcgctactctgatccagaggtgttcaagcagatcaggatgcttcctgatgaatacgtccaaaggtacctggccttgagaaatgcagcagttatcctgcgataacaatacctaggggtagcagtcttgttgcctaactatgctgtagtactcagatgtatgtatactctgattgtatggacgaggttgtttctgaacattgatccttctaaatagatctttcttcctccctattttaaacagatgtattttgatggatttccctacgtgattagagacattatgctgtatattttatgtgctgacatttgggaattgatgtttaaatatactagtcctaactctaaaaatatggtgacaaatgcatcattactgaatgataaggtggaaatggagacagaaaatgttcaagcaattcctgaaggcaatcaagcaccaaaaaatgagttatcaaacagcaacaatggtagtcctgctatggagatttcaccaaatagtgtgcctgataattctcgtcttactgtaagtgatcagatggctacagcatttgttactgtggaatccccagatgctatttcaaaagtagctgcttcaaggatagtttgttctctcccatatatatccaatgaaatattgaaagaagcacaaactcttgagaaggcagtgaatgcagatgaaatggctgatgaaggcttgaatgagatcctacctgatgacaaggatgacaagaaagattgtcaactggaagttagtagtgggcctgtcattttgaatgacagttctactcctgtctatcctgaatttagcaatttcttttatgcaaaagatggaacagaagtttctaacaatgcagtagattcaaaaaataacgcagaacagcatgctttttctaatcagggaaaagggaacatggaggaatgtaaagattctgatggaaacaatgcaagtgaatcgagtgttgcccaaaagctagtgtctgttattgtgctccctgcttcagacacaggcgatgtgagtaactttgtagaaaattcttgtatatttcaagcgaattggttttaa

SEQ ID NO: 24046 - DNA, 193 bp, Zea Mays
cggtggtgaagtctggccacgatgggatgcggtccggcggcggatattggcctccgacgagcaattgttcggtcctccggcccaaaatcccacccaacgaagcaaggtgcgccgaccccacacctgggcgaaggccccaggcctccaattgaaccccgagcggcaacgtgggcaagacacctggcagcggaac

SEQ ID NO: 24047 - DNA, 5130 bp, Zea Mays
taagcccgttccagatcttggttgtataggctgcagacagcaataggataggacacggatcgacacccgccgctaggcgcaagccacacacaaggaagtgaggcacggcgatatacctcgtggccggaggcgcgcgccaccgctggtccaccgccatgctggtccccgcccagtcggcaccggcgccgccgttgtgctctctccgctccctatcgtcacactacctcctccttccgtcccacttcctcccccctggcggcgtccttcccccgctccgccgcggcgacctcgccatccgcatgggcggcgggccgcgcaccttccccggcggcgtgtccaagtggcagtggaagcgtatgcaggccaagaaggcgcggcagctcctcaaggcgcgtctggcccgcgagcgccagctctacgagatgcgcaagcgcgtcgagctccgcgacgccgtggcgcacctcgagcggccctgggacgcgggctcctccgccggcgcgtccgccgtggctcccactctgctctccgtcgcggccgaggaccagctcagggcgctcgcggaccgcttccaccgccccggcggcgtggacctgtggaacgaccgcgacgggccccgcgtcttcgcgtccccggccacaggcgccgcctccgccaggttcttccccaggaacgccttccacagcatccagccctacgcgctcgtcggcgccggcgtagaggcgagcgcgcagggtgttcgtgagaatgccgcggaggatggcgcgcacagtagcattgcgaccgatcgcgagcctgcggttgaactcacggaaagggatgatggaacatgggagccggtggatgcactcggcgacgccgatgtcagcgacgccggtgactggacctcggaagacgatgacgacgaagctgctgctactcctgaatcagagggcatgggagatgccggttcttggcgtgagcaacgagccatggtaaggagaaatggaaggagcaacggtgcagcaagatgggaatctgcaggtgcaatggctgccggcagcggaaatgacgctgcaactcctgaatcagagggcatggtagatgcgggttcttggcgtgagcagcgagccatggttaggagaaatggaaggagcaacggtgcagcaagatggggagctgccggtgcaacggctgccagcagcgacaatggcagaggttcgagtggaagacggactggctcgaaggccacggcgggcagccatgtcagacagaggggccgaacaggtgctggttcgttgtctgaatctgaggcgacccctggctcgaaggccacggcgcgcagccatgtcagacagaggggccgaacaggtgctggttcgttgtctgaatctgaggtgacccgcgcgcgctccgagccgaaatggggaacgaggaacagagatgacacgaggaatggtgccggccggtggaatgctcctagaaaggatagggtgagtgatggtggtgggtttgattcagagtcaggcagtgcaagagggaaggaaccggaaccaagacggggagccagaagtaagatgaacggaagcgatagtcttagaggaagatcgaaacacaactacagtgctaatgccaacggcggggagaagctgttcaagtacctgagcggtgacggtgacccgcgcgcaaacagcagcaatggctttgcggagggtttggaggcaccaaaatggaagccgagaagaatgaatcgagctaggagcagcaatggtggcagagatgatgacatgggtgggagattcaggcgaggcgatgatagagtggcaagacggctacgggcaaacgcgaaaccaatcaatacgacgagcggagatgatggcagcagcgcggatggtgaacggagcaggaatggaggacgactgctctggggagacgagtactcgctgcggccaacgtcggaattgcgcggctcttggcgggacactggatcgcatagattgtaggctactaccaaagacagactgatgatttcttcgtgctaacttttgtaaaactagacctctgaaaagtaatgtactccaccaaccaacaatggaacatctcaacttttaacggaaacgcacttgcaaactcaaataagcacataaaagatagtccaggattcttgaattacatgagcactgtcagatccatatagcaaggattaacacagggtcccaagacaatagttggacggaccagtgggcaagtctacctggtcacagattacaatatggtcatggctgaccttatgagctcaaaactgtaaaaacatcaacagcaccagtgcttggtaaagttggctccagcttcttgaccgagtcacggatcctgccggcgatctagtggtggttgtcgccggaggggcggtagaggcggttgtaggcggcctcgccgacgaggtagatcccgaaggcgacgatggcgatgccgagcccgggtgtggcgtggcgcagctggttccccgccatagggtgcctcctccactcgtccctccgccggaagaactccccagtcgcgttgagtcccttccctccgctcgccatcgcctccgccgcgctctcgatcccttcccctctctctcacaactgtccgaagcaggaagataggcacgcgcacaataacccaagcccaggtaatatacgcagcccaacgttcagctacagctctatgcctctatggctctatctcatggcgacggcgacgtcgtcggcgccgctgctcccgaagcccgcactccgagctgcgtcctcttcttctctacacaccccaaatccaaggtccaagatacagcgagccaccccagaacagcaggaccaacatgtcgacaccaagtggaggaggcagccgagggccccgccccggcgcggcgagggagccaagagacgcctgcgcagcctcgtccagcgcggggaaatcgacgaagcgctcgtgctcttcgattccatggcctccggcggcggcaggaactgcccgcccgttgtcccctgcaacatcctcatcaagcggctgtgctcggacggccgcgtctccgacgcggagcgcgtgttcgcggcgctcggcccctccgccaccgtcgtcacctacaacaccatggtaaacgggtactgccgcgccggccggatcgaggacgcgcgccgcctcatcaacggcatgccgttcccgccggacacgttcacgttcaacccgctcatccgcgcgctctgcgtccgcgggcgcatccctgacgccctggcggtgttcgacgacatgctccaccggggatgctccccgagcgtcgtcacctacagcatcctcctggacgccacctgcaaggagagcggctacaggcaggccatggcgctcctcgacgagatgcgcgccaagggctgcgagccggacattgtcacgtacaatgtcctcatcaatgccatgtgcaacgagggcgacgttgatgaagctctgaacatattgagcaacctgccgtctcatggatgcaaacctgacgctgtcacgtacacacctgtgttgaagagtctgtgtggctctgaacggtggaaggaggttgaggagctcttggctgagatgaccagcaacaattgtgcgccagatgaggtgacattcaacacaatagtcacttccctgtgtcagcaaggcttggttgatcgtgcaatcgaagtggttgatcatatgtcagagcacggatgcgtcgctgacatcgtcacatacagcagtattcttgatggtttgtgcgacgtagggcgcgttgacgacgcagttgagttgttaagcagactgaaatcctacgggtgcaaacccgatacaattgcctataccactgttctgaagggcctgtgcagcacagaacaatgggagcgtgccgaggagctcatggccgagatgctctgcagcgattgcccccctgacgaagtgacattcaacacagtagttgcttctctatgtcagaaagggttggtcgatcgtgcaatcagagtcgttgagcagatgtcagagaacggttgcagccctgacattgtcacatacaactgtatcatcgatggtctgtgcaacgaaagctgtattgacgatgccatggaattgttaagcgatctgcagtcctgtgggtgcaagcctgatatagttaccttcaacactttactgaagggcctgtgtggcgttgaccggtgggaggatgctgagcagctcatggctaacatgatgcgcagtaactgtccccctgacgaattgacgtttaatacggtaatcacttctttgtgccagaaaggattacttacgcaggcaatcgaaactctgaagataatggctgagaatggttgcgttccgaactcatctacctacagcatagtagtcgatgcacttctgaaggccggaaaggctcaggcagcccttgagctgctgagtggcatgacaaatggtactccagatctgattacttataatacagtaatttccaatcttaccaaggccgggaaaatggaggaagctcttgacttgttgcgtgtgatggtctctaatggcctttgcccggacacgaccacatacagatctttggcctatggtgtctgtagagaagatggaaccgacagggcggtcagaatgctccgcagggtgcaagatacgggcttgtcgcctgacactacattctacaatgatgttcttcttggtttctgtcgagatcggagaacggatcttgccatcgattgctttgctcatatggtctccagtggctgcatgcctgatgaatcgacctacgttatcctccttgaggctcttgcttatgggggtcttttggacgaggcaaaacgacttctagccagcctgtgttctcttggcgttttagataagaagttgatcgaggaagaaagccactactcgtagactgagcgtttgaaccagaaatgagcaagcggacggtccgcgcctgtgggccggacggtccgcgcgtgcgcagaacagattagggtttcgagttttgtgctacggttgttagctatattcacgggattagctcggaatcagttgtgtaaagggtccagcccccctcctctataaatagagaggtctacggccgatttgtaatcaacaatcgaatcaatacaacttctatttcgcatt

SEQ ID NO: 24048 - DNA, 1018 bp, Zea Mays
ctccgtagatagaaaagacagataatttgatagtgattgcaagtttgcgttttgtcgatggagaagacattgatgatgacctatatgcattggcatgcgaacctgatttgcgagttcgaattttttctgcatgtcttgttgatggtgtccggtaccacaccattgaccgtgagagaaatagaagaacccaaaatagtggagtcatggttgaaggcactcataataatgaatgcattgatttttatggctgcttaaagaaatatcgagttgcagtataactcagatttgatggagcatcggacaattgttcttttccggtgtgattggtttgacactcatagcaagaaagttagtatgaaatatgatggatatttagaagtataaaccatagtagttgttggtacaaaaatgatacttttattttagcagcacaagcaactaaggtattttatttgcaagacatcaagaattctggaaactggaagattgttcaaaaatttacacataggcacttgtggagtgtggctgaaaatgacattgatgaaagacctagttcctcaggactatcataccaagatgatacatgtgttggttctgaagtgcaagttaatgaaggagatatggagatacctggacatcaggatgctgacgaatctgttaatgtcaatgcaagtgtggttgatgaatttcgggtgcaacgagaagaggaagtggaagagtatgagacaagcgacaatgaagatgaaactggatggcaatatgctagtgacaacgaagaatcaataactattgtcaatgacgatgatgatttcagtgataacgagtagcatgttttttgtttgatctgagagaagtgaactctatgctgtattttgtttgatttttaagaagtgaactagctactgttatttgagaaaagtgaactgtatgctgtaatttgtttgatttttaagaagtgaactcgctacggttatttgagaggagtgaactttatgcaataatttgttcgagctttgag

SEQ ID NO: 24049 - DNA, 548 bp, Zea Mays
gcctggataacactaggttagtgttgttagacgatgtccacttgacgatcatccttgtcctagcacttgatcaggcaggttcgtccatcagcatcaccatgcggagtagcccgcggttggggtcgacttgggtcgtcttccgcatcacacaattaattatcgtacctcatgagatgcacaattcacatgtatgagcataaagtaactggatgatacagaaaagaaaatcgaatacttagcggcaagacatcgacacaatcctacgtaagcactagacacctataactcactgaacacaacaatcatgattttctagttttactagatttaactcaaacatcaaggaacaatagattatatgcacgtctactttccttagctaaggcccaacaccagaagactatcaaacctacattcatttattaggaaaacaatagaccatatgagttccacctttctatttgattaaagcataatactgaaagactaattacttagactcattattttgggacacgaaactcgaagtatggaccgaaacaacttaa

SEQ ID NO: 24050 - DNA, 3787 bp, Zea Mays
atggaatccgacggcgacacgtcgccacctcgcccgcctacgccggcgccagtgcgtgcctgcggcgcgggccacccggcatcgcactcgctgccgacctcggcgggcggccgtgtctgcctctcctgtgtcgtggcgctcctctcctccgcgggcaacgcctccacgccatcccaccacgtcgcgcacgcgctggccaacctctccctggcgctcgccgacccggcattcctcaggccgctccgcgccgcgcacccacacctcctcgcggcgccgctcgccgaggcgctcgagggcgccgccgaacgccgcgatgccgcgctcgccgcgcaggcgtgcgacgtcgcggccgacctcgccgccgtcgtgggcgccccggctgattcagagctcgtcgcccgccttgcccgcgtcctctcctccggctcactcgtcaagcacctccatacgggcatggcccctgaggtggagcgtgtggggcggacccagagtgtcagcgcggaggttgaagtcgttgtagtaccagcattgctccttactttagcaaagaaggagccctttgatcatttgctgatcagcaaccagagttctaacaaatgcatagaagcagagtccatgcagacggattatatgtccctaaatgcttctcttgttctattcgctgaggctgtcaaaggatctctgctatctactaacctagaagttcaggcagggacattggatttgatctttcatttcctgtcatctgatgcaaatatttgtgctctacttcaaactttgatcgatgaaaatgttgctgattacatatttgaggttctcaggttatcagagataccatttcacccagtccagtcccatgttttacgacttgtttggatttgcatggccaattgttctggtatcctctcactgccccaagaagaacagatagcctgtactttgactgcaatcttgagaagaaatctcaatggtgaacttgacatgagttctgaaacttttattctggtttgctcaatattaatagagattctgaagtcacctcatgctcatgatattgagaaactaccatcatttattgaagaagcatcaaaatatgcgatatcttctacattgtcacatggggagcaaatacaatattgctagaacgaaggatcttgaggatagcatcatgggaacttgtggaacaattttactgcaatggcttgaaagtgctgtggttgacggtaatgatgaagaaacattggctgagatccttcagattttccaaattattttgtcaagggcatctgacaaaaagccattaaaattcgctgaattgctagcatcatcatcatggctctgtgctaacaaccaaattctggcttctgttgagcaatacatcctcctcaatggtgggacctttccatatgaaatcaatggttccattatgcttacgcttctggtccatctttatgccttcatcagaggcctttcccatagctgcagcattccacacagtccagaagccgagaatacactattccacttaatcatacacaaggactgggatttgcttgtgattcgagtccattcggtagcaataaaatggctctttcagaagcaagaaattatggaaccactcgccttccagatgctaaagttttgtagaactttctgtgaagatgaaactgtcatgctttcaaacagcagtcagttggttgacatgcaaatgattgcggagcttgcactttctggagaaaccaccatctcgtctttgctggtgtccttgctagaccagatgctaaaggagggtacagaagatgagttattttcagttgtcagtgttatcgctgaaatcctcatgatctctccatgttcttccgatcaatttatatcatgtgcaaatgcatcaacatttggccaggaagatgaatggcttcctcttgttctaaagcaaagtaggttggcgtctaggtgtcggttgcttggctcagttctaacagatgttgtagtaaacaacgcttgtgttaaaggcccatctttatttcaacacaatcaggagacaacctttggagaattcctgattcttgtacttctattggtgttcttctctctaagaagtttgcatagcattctagaggtaagtattgactggcaggacttccttcagcattcagacgatgtccagtcattttctgttctcggtattccatgccatgatttatgccgtctcatgcacttcggttcaccttctattaagcttattgcttcacaatgcctgttggagttgctcacgagaatttcagatcaaaggtcatgtaataatgctgagttaagatgctctgtgggatatttgaagtccattattgcagtgacagagggattggtgttcagtgaagacagtaaagttgctggaaattgcagtgcctgtctctctgtgattttgggatgggagaaatttggaagccaagaaaaggtggcagtcagagaatctaaatggtttaggctaataatggaggaatttgttgtggccttgactgctcctggtttgacgtcgaaatctttctccagtcagcagaagtttgctgcgaatatggctgtttcgttgctcaggctgagccaagtgccagattggctgacatcgttgtttgatgggcatctgatatctggcatcgtggctaatctttctgctaggaatgttactgcagaaatcatcaatctcttcagtgagctcatggctaggaagtatctcagtcaagagcacattgttgatctacataacttgttgcaggtgtgcagaagccaggtctacgagggaagctccaaagcaccgttgccagagcaaagggttgaaaaagtcgcgagaagcaccaatgacgtgctcgcatctctctttggcctgatggtgaaccagtgcacagactctggcacggcgcaagcggagcagcagagactactgcatgcgattgacgtgttcttccaggagtcgggcaggagacaacagcaacatgctacagctcgacaagagacagtgccaggggattatggaccaagacagggcagcagggcccgtcgccccaaagagaagatatccggtccaggatggatccggatccggcactagtgagcctacgcctacgcctgcgctcgtgaccgatgccggccgtgcccaggttgctgctggcttgtgttcggagctcccacgcttgatttgtggggaattccggcgatcagctccgccgctcccatctcacgagtcacgaactacatccgcttccaaagaaacatgatatcttgaatcctaagtcatgaatcctgagtcagaaactctagtgaagtcgcaactactcgacgtgttttaagtttttaaggagccgtaaatttagctcttgtatttaacgagctcctcgcgaaccggaatgagctgaggaagcccaaaactgatgcccacaacaagcacaaagccaacagcccaacactaacaagaccctacgtttatctcttcctattgatttcaccctgaccctgcgccaacggcttgctgccagccatggtcttgtgctaatcgcttcttgtccggttcctacccatgcttagtgtgaccctagtgttgtctgcttcgacaccaataggtaacacgaacactaaacaagcttatccatggtcatcaagcagtctattaccttcccattcttcgtactgcatttataactcaagcttgatgaatacatgagtacgtatgtgtgttttgaattatattgtcgtctactgaataagtatatgctttttcttctcgtacatgagtatg

SEQ ID NO: 24051 - DNA, 2159 bp, Zea Mays
agaactacctacttctgcagattaatgaccgctatgaatttcctcttcaacttgaccttgatagagacaatggaaaatatcttgctccagatgcagatcgaagtattagaaacctctatacacttcatagtgttcttgttcatagtggaggagtacatggtggccactactatgctttcattcggccgacactctcggatcagtggtacaaatttgatgatgagcgggttacaaaagaagacactaaaaaggcacttgaagagcagtatgggggtgaggaagagttgcctcaaataaaccctggtttcaataacacgccatttaaattcacaaagtattcgaatgcctacatgcttgtctatatacgtgagagtgacaaagagaaaataatgtgtaatgtcgatgagaaggacatcgctgagcatttgcggataaggttgaagaaagaacaagaagagaaagaacacaagaagaaggagaaggctgaagctcatctctacactatcataaagatcgctcgagacgaggacttaaaggagcaaatcggtaagaatatatattttgatctggtggaccatgaaaaagttcacagtttccgcattcagaagcagttgccttttacttcattcaaggaggaagttgcaaaggaatttggcatccctgtacagtttcagcgcttctggttgtgggctaagaggcagaaccatacataccggcccaatcgtccattgacaccccatgaggaagcacaatcagtcgggcagcttagggaagtctcaaataaggcacacaatgctgagctgaagctgtttctggaagttgaacttggaccggagttatgtccaattcgtccacctgagaagagcaaagaagacatacttcttttcttcaagctttataatgctgagaaggaagagcttcattttgttggtaggctttttgtgaaggctctgggaaagccatctgaaatattgacaaaactgaatgcaatggctggattttctccaaatgaagaaattgagctgaaattaagtttgagccaaatgtgatgtgcgaacatattgacaagaaacttactttccgctctagtcagcttgaagacggagacattatctgtttccaaaaggctcctgttccagatggtgatgcacaagtgcgctatccagatgttccttcattcttggagtatgttcacaataggcaggttgtgcactttcggtgtctggacaaaccaaaggatgatgatttttctttggaattgtcgaagcttcatacatatgatgatgttgttgagagagttgcacatcaacttgggttggatgatccatcaaagatacggcttacgtctcacaattgttattctcagcaacctaaaccacagcctattagatataggggggtagcacatctactggatatgcttgttcattataatcagacttctgatatcttgtattatgaggttctggacattccactgccagatttgcagcgtttgaaaacgcttaaagttgcattccaccatgcaacaaaagacgaggttgtcgttcatagcataagacttccaagaaatagcaccatcagtgatgtgattactgatttgaaaaccaaggttgaactatctaatcctgacgctgagctccgcttgcttgaagtattttaccacaagatttataagatctttccacctcatgagaagatagagaacataaatgatcagtactggacattacgagctgaggagatcccagaggaagagaagaatcttggcccacatgatcgattgattcatgtttaccatttcatgaaagaccctaaccagaatcaacaaattcaaaattttggagatccttttttgatggttattcgggaaggtgagactgctgcagaggtaatggagcgcatccagagaaaacttagagttcctgatgatgagttctccaagtggaagcttgcattcatatccatgaaccggccagagtacctccaggacactgacgttgtatcagcacgttttcagcggagagatgtatatggtgcttgggaacaataccttggcttggagcacactgatacaacatcgaaacggtcttacacatccaatcagctttactctcgtatggccagcgcttacgggactgtgatttcttatatctttt

SEQ ID NO: 24052 - DNA, 3742 bp, Zea Mays
acctcttctccactccacctccgcgtccccaccttcagcgtcacgcacctcgacgcgcagcgcatggcgactcggctctcgtccacgggcccctgatctaggcagccggaccccgatcggttgcccgtgcagcgcgacccccacgaccaggatccagggagtcgggccacggtcctcggcaaggcatctcatcggcgaacgttttttcgaggccgggctcctgctcccccggaatctagggttcgcctcgccccgcgtcgccctcgatgggcccggccgcgcagccgccggacgccggcggcggtggggacccggaggcgtggtacggcagcatccagtacctcatcaacatctccgccgtgggggccgcctcctgcgtcctgctgttcctcctcgttaagctccggttcgaccaccgccgcatcccggggccctccgcgctcgccgccaagcttctcgccgtctaccacgccaccgcggcgcagatcgctctccactgcggcgccgacgccgctcagttcctcctcttcgagcgcgcctccttcctcatcctcgccgccgtcgccgctgccgccgtcgccgcggcgctcccgctcaacctcctcgcgggggacgccgccgtcgtcgaccagttcgcttccacgaccatctcgcacatccccaagtcgtccccgctcctctggctccacctcctcctcaccgccgccgtcgttgccatcgcgcacctcggcatctctcgcatggaggacgcgctacgcatcacgcgcttccgcgacggcaacggcaaccccagcgaccccaactccagctccgtcgccgtcttcaccataatgatccagggcatccccaagacgctggccgcggacaagaccccgctcaaggactacttcgaccacaagtaccctggcaaggtttaccgtgtcatcgtgccatttgatctatgcacgctggagcatctcgtcgagcaattggggaaggtccgtaacaagatctcttggctggaggcaaggttgggcgcccgcgacctgtttgatgacattgtgcacgataacgacgacacagtgcagtcagaagagcattggtttgtgcgaaggtgcagagggctgtgggcaatggcaggggagaggctagggttcactgacgaggagagattgaggaagttgcagactaagaaacttgtgctcgcaagcaggctatctgattataaggaagggtgcgcccctggcgctggtgtagcttttgtggtgtttaaagatgtctacaccgcaaacaaggcggtaaaggatttcaagatggagaggaagaagacaccgattggtaggtttttcccagtgatggagctccagctcgagagaagtcgatggaaagtggagagagcaccaccggcatcagatatctactggaatcatctaggtcttagcaagatatcttcacggctgaggaggattgcagtcaacacctgcctaattttgatgctcctgttcttcagttcacccttggcaatcatcagtgggatgcaaaacgcggcacgaatcatcaatgtggaggctatggatcatgccaaatcatggcttgcctggcttgaaggttcaagctggttctggaccataatctttcagtttcttcccaatgtgctcatctttgtgagcatgtatatcatcatcccgtcggtgttgtcgtacttctccaagtttgagtgtcatctgacagtgtcaggggagcagagggctgcattgctgaagatggtttgcttcttccttgtcaatctcatcctattgcgtgctcttgtggaatcatcacttgaaagttggatacttagcatggggcggtgctacttggatggtccagactgcaagcagattgaacgctatttaagcccatcctttttatcaagatcatcgctttcttccctggcattcctgatcacatgtacctttctgggaatatcttttgatctgttggcaccaatcccttggataaagcatataatgaagaaatttaggaagaatgatatggtccagttggtccctgaagagaatgaagactacctacccatgcagaatggtgaagaaactaataatttgacagcacctctaatgcctgagagagaagacggtggccttttggataatatcgaggggcatgatctttccctgtacccactaaacaggagcttccatatgccaaagcagaaatttgacttcgcacagtactatgcttttgacattactatatttgccctcacactgatctactccctgtttgctccgctcgtggttcctgtgggtgcgacatactttggctaccgttatctcgtggacaagtacaacttcttgttcgtttacagagttagagggtttcctgccggcaatgatgggaagctgatggacagagtgttgtgcatcatgcaattctgtgtgatcttcttccttgctgcaatgctgctcttctttgctgttcagggtgactcgatgaagctacaggctatatgtactcttgggatgttagtgttctataagttgcttccctctagaagcgatcgcttccagccatctttgttagaagggatgcagacagtgaatagctttgtagatggtcccacggattatgaagttttttcacaacctgacctggattggagtctgtatcaatcctgaagatcaatacacacttttgttcattacaatgacatctttcacgacttcgaacctggtgtatcaaagtcatttattcttcttgtacagctatgtagattaactcttgtcttcttagatatgtatttgttttgtcagatatgacaggcacatgcagttttggtgatgaacatggcctgtcaaaaaattactttaaatgatacatagtcattttcttgttttttttttttccaagaggggcgccgggaggaaggccgcctccgccgccgccgcgccgcacgcgctggcggaggacgaggtcgaggtcgaggtctccttcggggagaacgtgcttgacttggacgccatggaaaggagtaccagagagacaacaccgtgtagtttgatcaggaacccagagatgataagcaccccaggatccacaactaaaagtaaaaccagcaactcgacgacttcccgtcgcaggatggaaacctcagtctgccgtttcataccgagttcgctcgagatggaagagttcttctcggccgctgaacaacaggagcagcataacttcagggagaagtgagtctaagcgtctctgtcttcatacccactcaaaaacattatgttaagttatgcatgggctgacattgagctgcaacactgtttctgatcaggtataacttctgtcctgtgaacgactgccctctcccgggtcgatatgagtgggcgaggctagactgttagattcctccaagcacaagagcaccatttatctgatgtgtctaccacatgactagcgccgccgccgccgaggaggcgtaatcaactggatcgcattagctttcttgcctgttgtaaaaattagagtagttagcctgtagttgaatggtcctgtgtaacgaaacaggcgtggttctgagttacaccccgatccccaacctcactgtaaccgtttgactgctcgctcaagctgtagccgaaccatccatctcaagtagcgtaggcctagcgtattcatctgttcctagttctagttcttgaatggattaatcgaatgagatcattgttagaatctgcatgacaacttgcttggtgttttcagc

SEQ ID NO: 24053 - DNA, 3429 bp, Zea Mays
aattcccatcagggtccgtcacgaaccggtgggcggagtcttccagaggccaatattctgacacagcggaccccgtgggccgtggccgtctcgtttcccgtctcccgcatagaggttcccaaaccattctctttcgctttcgtctccgcaccctagggtttctgtgcctcgccagcgaagcgatgcagccgccgcaccaaccgccgatgaacgggcaacactcccagcctccgccgcaaggacccgtggtgcccatgcctccgcagcagcaggcgcccccgctgccgtactaccagcagcagcaggcgccgcagtactaccaacaggccctcccgcagccgtgggggcagcagcagcagtacgctgcaccgccgccgcagtacccgcctccgcctcagacgcagcattacgcgacaccaccgcagcagtacgcccctctgccgcagcagcagtacgctcctccaccgcagcagcagtacgctccttcgccatatggtaccacgccgggaagcggtgaagtcaggacgctgtggatcggagatcttcagcactggatggacgagaactacctccactacaacgcctttgcggccgtggcccagcagattgcttctgtgaaaattatacggaacaagcaaactgggcactcagaaggctatggttttattgagttttactctcgagctgctgcagaacatactctgatgaacttcaatgggcagatgatgccgaatgttgagatgacttttaagctgaactgggcttctgctagcactggtgataagcgtggagatagtggttctgatcgcacaatatttgttggtgatttggctcatgatgttactgactccatgttggaagatgtgttcagagctaagtacccttcagttagaggagctaatgttgttgttgataggatgactggatggcccaaaggatttggtttcgtgcgttttggagatctgaatgagcaggcacgtgctatgactgagatgaatggaatgttgttatctacaaggcaaatgaggattggtgctgcagctaacaagaagaatagggatgctcagcagacatatgcaactgacggatcctgcaggggtactgattatgagagcatctaacttctaggtgcatcactgcatcttgaaaactaaaacccacttacatattctggtttctctttccatttttcttgctggttgatagtgttttcgtaccagttctctttctagtcattccaccgcaacagctcacatagcttctttctgtaaacagtttccttcccgctctttccgttccaagtctaagattgggataacttaacaaagtaattaaaccactgaacaaaatttgtgtttctcaaagcaggatgtcatgccatctgcatttaaggcctggaattgtcttcagatgtctatgtaaccagtgcctcggttaggtcagtgttttaatttcatgagattttggttctaaagctctttcactctcaggcatcaacttatctggacttactctccagtcttcaatgctttcagtttatttttttaaaaaatactgcccatcatgttccagtactcgtgatagctaatatgtacaattttatatgttgttgtggtatttatttttatatattccccctttttctcatctctggattggatttcttatatctgcacctaatgtcacctgtaacatgtttgttactccgcattgtactgtatagtgcaggaagcttttagtttcacctgtagcttatctggtctcctcaatgtaccatttttttagtcattccaaattctgttgcggtgcagaaaatatttttttttgttcaactttccactgttgtgcctgcacttcctctggtttattattccatgctgcagattcaattttctttttatttctcattagttttccctgaatgcactttgtagttatgcatttttgtttgttgcccacatattctgcttatctgagtttgggtttggtagttggtatggcttagcaacactgtaaagtttgatttcttatttgaaatattttatcaacagttgatgactcagaataagattaaaaaatcgaaatagttgaactaatatgttctacttcatgcccgtgttagtgcatgaggatatttccaggttgtgattaatacacgcagttgctgctacatagtttttgtcatttaaagatactgggtattgtgtagataatctgagtttatctactgacagtttgactatagtaaaatttcttctgttgcagctaagcagtacatgcagtgaacaactaattgaagcaaggatttcttgtattcttcctctgacctcattggaatgctaaccatttctttatttgttttatttacttacatcattgcaaatgctgttgactattttggatccttactagaaatatgttaagctattacttttgctggccagaatatgggtgtccagtgttccgttgctattattttgggggtctgaattcccagccaatttgccaactttgttgctgatggtttgtcttgccattgcaggagcataccagagctctaaaggaaattcttcagagaatgatcctaacaatacaacagtctttgtaggtgggttagattccaatgtaaatgaggagtatctaaggcaaatttttactccgtatggagaaatttcctatgtgaagattcctgtaggcaaacattgtggatttgttcaatttaccagcaggtcatgtgcagaggaagccatccgaatgctgaatgggagtcaggttggtgggcagaaagttcggctttcatggggccgtagtcctcaaaacagacaggcttctcagcatgatgccaacaaccagtataatgggaacagctattatggataccaacagccgggttatgaaggttatggctatggtgcttccagtgcacaagacccaagcatgcaaaactactacggatactctggttgtggtaactatgagcagcagcagccaacacaggaacagcagctgcagcagcctccaccaccacagcactgacgattgcttgcacacctctggagtgctatcggattagagtgatggtggagtcacggggcgctgcaatgagacatcctatatagatatgaaggtcatatagtcgcataggagtggttagactttcttggggaccagtgttaatcgatgatggcactccggatgtttcttctgtttgtcgttgagatcttgactgttgaagtgtgctctgttgatattaatgtcttcgtcagattgttaatttgcttgtttcagatgtcccagaaccatttgtacttagggagtgtttgaatgcactagacctaacagatagttggctaaaaaatttgctagtgaaattagctaaataataaatagctagctaactattagctaatttgctaaaaatagttatta

SEQ ID NO: 24054 - DNA, 1596 bp, Zea Mays
gctttggccactcagccagcgctcaccaactcaccgagtgtccgagtcgttggcttggcttggcttggctccgcccgttggcatcgtctactcgccgaaaacctcgccgagtccctgccctccctgggcggtgggcgcggaaacccttcgtctgttcgctaaaccttggcggccggatctcccaccttcagaatccatctggtctcctctataaaagcgctgggaggatctgccgactttgccgtccataggcggcgtctctccggtgtcctgcgtctgcgccgcacacatcccccactcttcttccagtgaaacagttcaggctggaatgggaggtgggacaggcactggtggagcacctattattgcagggattgcaaagtccatgggtatattgactgttggaattgtcacaaccccattttcatttgagggaagaaggcgggctcttcaggcacaagaaggaattgcatcgttgagaagcaatgttgatacactgattgtaattccaaatgacaagttactgactgctgtgtccccaaatactcctgtgacagaagcattcaatttagcagatgatattcttcggcaaggtgttcgtgggatatcagatataatcactgtgccaggtctggtgaatgtggactttgctgatgttcgatcagttatgtcagatgctggctcatcattaatgggcattggaacagcaacaggcaagacacgagcaagagatgccgcactcaatgccatacagtctcctctacttgatattggtattgaaagagcaactggaattgtatggaatatcactggagggaatgatctaaccttgacagaggtgaatgctgcagctgaagtaatctatgatcttgttgaccctggtgcaaatctgatttttggctctgttatagatccgtcatacactggtcaagtgagcataactctaattgcaactggtttcaaacgccaggaggaaagtgagagccggtcttcacaggctggagaagacagcaaccgcggtcgctcgggctggttttctcccacttcccaggaggaaggtcatgcattgcagatcccggagttcctacagaggaaagggcgtccagggtttccacgagtctgaacacactttggttcaatgtttttcttgtcatagtttggtacgatgtaggtttggtttctgggtctcttagttagcaaggtagagcagatgttcctgaaccgcatactaatctgtgtgcaaacttcgtcgcctgagtacattggctgggctgctttgcttctcaggaacctgcagtaggtctcaatttgctagttattatgattaaaagacatcgctgagaccaaattataacgttccgtgtgaagaattactggctcactgccaatttcctttcctttgcggcatacattgtttcattagtcgttattttggtttcgttcaatgttatgacaccaaaataggattataagggttagtttggaaaccattttctcaataaatttctatttttcgagggaaattagttcattttcctttgaaaaataggaactacttgaaaaaatggagtttccaaactagctcttagatggatc

SEQ ID NO: 24055 - DNA, 1625 bp, Zea Mays
tgttaaaaacaaaaaattcaggtttatgtaccggtgacagcgaccgcgacaggtcctctcccccggaccgcacccgctgtagccgccatgtcgtccgccgccgccacagcctttgccggagtctccgtcgccaccccgaacctcaccactccatttcgcggtcgcgtgcgccttccgctacgcggggtctccgctgccccacgccgcgccgtcgcttcgatggccgtgtccgcccccaggtccggcgccgccgcctcgttcctggagcgccgcgagtccgagcgcgctctccacttcgtcaagtaccagggcctcggcaatgacttcattatggtggacaacagggattcgtcggtgccgaaggtgacgccggaggaggccgcgaagctgtgcgaccgaaacttcggcattggtgccgacggcgtcatcttcgtcatgccaggggtcaatgatgccgactacaccatgaggatcttcaactctgacggcagcgagccagagatgtgtggtaatggagtccgttgctttgctcggtttataggcgaacttgaaaatctgcaggggacacatagcttcactattcatactggtgctgggaagatcattcctgaaatacaaagtgatgggcaggtaaaggttgatatgggagagcccatcctttctggagcagacatccccacaaaactggtagctaccaagaacaaagctgttatccaagctgagttggcagttgagggcttaacatggcatgtcacatgtgttagcatgggcaacccccactgtgtcacatttggggcaaacgagttaaagatcgacgatttaaaactcagcgaaattgggcctaaatttgagcatcatgaaatgtttcctgctcgcacaaacacagagtttgtacaggttttgtctcgctcacacctcaaaatgcgagtctgggaacgtggtgctggagcaactcttacctgtggtactggtgcttgtgcggtggttgttgcagctgttcttgagggtcgagctgagcggaaatgtgtagttgatttgcctggcgggccattggaaattgagtggagggaggatgacaatcatgtttacatgactggtcctgcagaggccgtcttttatggatctgttgttcactaggtactggggagtggggaccaagatagaagggttggctgccactcaaagcttgtgagattggttacaatatccatgaaactgaatgttctggtgccagtacactcgtttagatattttaaattatggttgcttgatttgggtagcagtagaggcttccttttgaagcattctagtgttgtccaccttttgtactcctttagtctgtcaggtttgaactacattgttagcatgtctttccaaccattttctgtttcttttctttgcaagttaacgtcaatgcagcttcagtattgttttctacagatttatcttgatgcactgcagaatgaatgggcttactagtttgctggtatgaatgttgcctatttcctggaaatcgttgtcatctaaagtgcttctgacaaaagacagcatgggttattggttatgactcactgctaatttcacctgcaacaattaataaagtgtcacattctgtgcttatataa

SEQ ID NO: 24056 - DNA, 3215 bp, Zea Mays
aacaagccaagccgccgcagccgcaggcagacgcgcagcagagcggccatccactgccgtcctgttccgcacccaggctccagaaacgcacgcgcgctcgctccgcggagcagagcacttggccacttgactctgactgactgaagcggcggcggtcgcgatcagcccgctccatggcgcggtccaagaacggctgcctcaagatccttgtctgcgccggctccggatccgatccctccgccggctcagacgccgacgaccacccggacgaggagaacaacgccatatcagataaaagcagatggagcttccgtaggaggtctacaaggcaccgagttttgaagaactctgatatctcagaacctgagactcttagttccagcaaagcaaaggctgacattacaccgagcaacaatgtttatacttcaacatattcttatgcctcggagaagcctctgcaacaagacaagccagatgagaagactctgcatcaagagaagccagaggagaaacctctgtatcaaggaaactctgatgaaaagctgatggagaagccaagtgaaaagcctactgacaaacttatggaagaaccagctgaccagataattgaaaaatcaattgaactacccactcaaaggataaccgaaacaccaactgatgagccagctgaaaaaataaatgttgcaccaactgaagaaccagctggaaaaataacagagacggcatctgaaaatacagccgaagggtcaataaaaaatgcaacagaagagacacccgaaagggcagttgaggaactaattgaagaggcagatgaaagtatttccgtctcatcaactgtgctgaaggaggaggaaaacacctcacttgttgaaggaagcagtggagacccggaggaagatcatctggagtctgcagctactaatcttcagcctaggagtgacacttgcaagggaagagctgctgaatcagaaggatctggtgaaactgcaagctgttatccgtggacatctagttagaaagcaggcttcagaatctttacaatgcttgcttgcgattattaaaattcaagggttgatcagggctcatcaagcacaacattcaccaggaaagattcaggagactattgttcattcttcaggtgagaaattgcttcgcaatggatttgctctcaagctcatggacaacacaccaacttcaaaatccattcgcataaaatgtgatccttcagaatctgatgttacatggggatggatggagaggtggacagccttaattccaccgatcactgtggtgcacctgccagagcataaagaaaatagtgagttgatgggtgaaactgtgaccgaacaagtgactgaacatgctcagtgtgatgaagacattgttcctttggattcagacctatctttcccaaagttggtggctgatgatgtgaaagaaacagtagagacatctgattttagtgccttggaggctcctgcaagtgtcccagatgaaagccctaagatggaaatgaaacatgatcctgaatcggagttgatcgaaactactaatgcagatgctgatcatgtaactgaccaaaaggctgaaaatgatgtggacgagccttttatgtccttggatcaacaatatgcccaagctgatgatgcatcaaggaatccctgtccactccctggaaaatttgaaccgtccaatgaggacagtggtgacgcatacaattctgagcagacactggagatggaaggtaaaaggtttgtggcaagaaagccatgcaatccagcctttgctgctgcccaattgaaatttgaagagctgagtacaaattcgacagtcagcaggtccagcagcccaccgcatctggatggggtgagcaagccaaggatgcacactcctagttcgcaagaagattacacgccaaagcaagatggcacaggcatacaagaaagctcagctggtcatgatactaaaatgagaattgctgcatcagaatgtgggactgaaatatcaatttcatccacactggactcaccagacagatcagaaggtgatggtggggagatagtgttggagattggagctctggaaaacagaaactatgtcactggcaaagctgataaagactccagtattgtccatcccggggtaaaagatgctcctgaagcagaagcccagccgcagaaggaagtagaagagaatgggcatgttcctgcccttgaaacggaagcccagccacaaaaggagccacatactgaaccggaagtggcagatttgcatggacaattggaaaaatcggtcacatcttatgccacacctgaagggactccaatgagccgaacgaccaccattccggagtctcatgggacaccgtcaagtgaggtctctgttaacaccaaaaggagcaggagcaacaagcccaagtcccacgcgagcaagaggtcgctggctagtccaggcagcgactcagttggacggagcagcaccgacaagttttcgaaggaatcaaggcatgccaagagagagagctcctcaagcaaagctgctaaatccgaccagggcgatcaagaacctcgtgtaagcaacagcaacagcaacccgttgcctagctacatgcagttcacagagtccgcaagagccaaggcgtcgtccccgaagatgagcccagacgtgcaggacagcaacgccgcgaggaagaggcactcgttgcccatgaccaacggcaagcacgactcgtcgcctcgcatgcagcggtcgtcgtcatcgcaagctccgcaaggcgtgaaaagcagtggcccttctcctcacagcgcgtctggtggcgcagacaagaggtggcatatctgactgatgatgagtaggccgagcacagcagcatatttcgccgtctaatccgttgattcgtcgttgggaaactgagtatggtttggaagacgggcagcttttgccgcttgatacgtgtacatttgtcgcttctcattggttgtgttatgtgactgatagtggtttgtgtgtgccccctttgacttgtaatgcaacagtggcatcaggagtgtgtggattggtctgttgtatttggcgacattgaagtttctgttggtgtggatgctactacgcctctcatttctttttgaaaggggtttgcttcgtatcggccggtgttctctggacgatggtgaggcctggcccaaaaaaacacaaacggaacggctttagttcac

SEQ ID NO: 24057 - DNA, 275 bp, Zea Mays
ccacccaaacaaccacagcttgctggcaagcctctgaatccatgcatccttcatcaccttccattctgcacttacagcagcagcagcagccgccgccacagcttgctgcgcttgttgtgcgacctcagctcgctccatggaccccttctgcttcagcttgcagataagcggatgtatgtcagttgcgtcatcatttatcactgtccaatgtccatagacatcacaacaagcactcgaagatttgggactgttccaacaaggtccatggagtctgg

SEQ ID NO: 24058 - DNA, 1769 bp, Zea Mays
ctcagagcctattggaaaaaatacattgtgtttggtatttgtgaggctcgaagaagaggttggatgcttcctactatatctcccttatcaaaggactgtgttgtggaggaaagttcaagtgcaatggatttagtaggactatttccttactggcttgatgttaatcaaggaaatgcaatattgaatgatgtccacatgcactctttatttgttcttactggcccaaatggtggtggtaaatctagcatgttgcgatcagtctgtgcagctgtgcttcttggaatatgtggcctgatggtaccttcaacttcagctgtaatcccacattttgattccattatgctgcatatgaaagcctatgatagcccagcagatgggaaaagttcatttcagattgaaatgtcggagatacgtgctttagtcagccgagctactgctaggagtcttgttctgattgatgaaatatgtagaggcacagaaactgcaaaaggaacatgtatagctggtagcatcattgaaagacttgataatgttggctgcctaggcatcatatcaactcacctgcatgggattttcgacctgcctctctcacttagcaacactgatttcaaagctatgggaactgaagtggtcgatggatgcattcatccaacatggaaactgattgatggcatatgtagagaaagccttgcttttcaaacagcaaggagggaaggcatgcctgacttgataatcaccagggctgaggagctatatttgagtatgagtacaaataacaagcagggagcatcagtggcgcacaatgagcctcctaatggcagccccagtgtaaatggcttggttgaggagcctgaatctctgaagaacagactagaaatgctgcctggtacctttgagccgctgcggaaggaagttgagagtgctgttactacgatgtgtaagaaaatactgtcggacctttacaacaaaagtagcatcccagaactggtcgaggtggtctgcgttgctgtaggtgctagagagcaaccaccgccttccactgttggcagatctagcatctacgtgattatcagaagcgacaacaggctctatgttggacagacggacgatcttctggggcgcttgaacgcccacagatcgaaggaaggcatgcgggacgctacggtattatacgtcttggtccctggcaagagcgttgcctgccagctggaaacccttctcataaaccagctcccttcgaggggcttcaagctcatcaacaaggcagacgggaagcacaggaacttcggtatatctcgaatctctggcgaggcagttgctactggacggaactagtcagctgaaggtctttttgctattggatattcaataggaggcgggagctaactgacaccatgccgccctagttttgttgaactgatagtggtgctagccttgtgcatagtaggggccaggggagtaataatatttcccttgtctaaggaagtaattaaggatgtaggagcgcagagcaaatgattagcaaaacgatcacgttcgcagtgcggcaggcattgtgcagctgattcgtttgttcaatcagtgctctcgctcagtgacctgacagcgtgatcactaaacctagtagctgggcgcgcctttctaggccagaacagaacattggcgtgaattagattccagtgcggcagggtgttccctaagtacatgttttcagttcagcggcacttggaatatttttatgagaaaaagctgcgtcttttagcttggat

SEQ ID NO: 24059 - DNA, 858 bp, Zea Mays
aactgccggccttttcctatgaaattcagacacgaccacgcacggagcatttggaagtcatcctcgcccagtcgccccaccaccgcctccgtcgacgtcgtcctcgcctccgccgcgctcgcctcaccgccaccgccaccacggccttcctcgtctcatctccgccgtggcctcgccctcgatacgctactgacggggtgcccctcgccgtcgacacgtgacctccgtcatttgcatctcagctccaagatctactccagctgctggcctgtagctggcagtggtgactggcaggctgatctggttggacatggagagcgggctgctcttggcaccaggattggcaccatcaccggcacgcttgtctccaatctccatcgatataattgactgcattcggcttggttgtgcttgttttcagggtgaagacaagaagtgacccagcaatttccattttcttgttcaggatggcaatggccacatcatcatcttaccctccaccacctcccttttaccgactgtacaaaaattttgagcaggatccttcatccgcaccagaacctccaccaccaattgatggaccattcaaagctttgggtgttgattacacaggagatgttgtgattccaagcttggagagtcataatgtccgtcagctttatccaaagggccccaatattgacttcaaaaaggagctaaggaccctcaacagagagcttcaattgcatattttggagctggcagatattttagttgagagaccatctcaatatgctcgtagggtggaagatatcacactcatattcaagaacttgcatcatcttctcaattccctacgacctcatcagtaccttttag

SEQ ID NO: 24060 - DNA, 157 bp, Zea Mays
cccccattgtggtcaccgaggctcgggcggattgcatagaagtcgtaggagggattaatcgaaagggacctagctgagtcctttggaatccctcgctagagttgggatttccgccatgcccgcacctcgccgtgaataacccatgcacgaccttgtc

SEQ ID NO: 24061 - DNA, 894 bp, Zea Mays
gccccggctcggcaccgacagcaggccacgacgccgccgtgccaccgccccggctcgcgccaccgccctggctcggcaccaccgccccggctcggcaccgacagcgggtcgcgccgccgcccctgctcgccaaccccagcgggtgcaagaactgtgctaacgtgtgttctaaggtcttccaaatcgaggatgatttcggacgggcaagagtttacgaccaatcaggcagcacagaactgattcaagaagctattgacagttggcaagttcacgctgggagaaaagacaagccaaagtcctggagaaggtaagaaggcggatgagccaagatgattccagaaagggtggctcatggagtgacatctggggagcaccaacaagatacgagaagaacggtacatcccattactaaaggagacatttatgttcccacaaagcttgggcattttaggtggaaaacctggtacatcaacatacattgctggggtacaggatgatagggctctctacctagatccccatgaagttcagatggttgtgccattggagtccctgaacttggcagctgaagattcaggggagaaggataaagatgagaatggcgatgaagcgccatcgaaagtattggcaaatattaagtggcctgaaacactcgagactgattttatctacagtgctttatcatttgggacttcaattaatccacagttcattgcaagctttgcttctgctgctggtaaacgtcctcatcaagatttcgactctcaagaatctgatccagagtggggttggtggacagcaaaccatgagctgaagaagccatcaattagtctgttgtttccaacaatcatcctcctcagccgccgccatcaacagcagcagcagcgatgctaa

SEQ ID NO: 24062 - DNA, 3091 bp, Zea Mays
ccacgggaagacagactgagtctgagagagagagagagaagagagagagagagagcacacgcaagacgagcgtcgccttctccgaatcccctccttgccaaacacgagctgcctaaccaaatccgtccacgctgtctcgtcccctcggcatcgcagtctcctacccaaatcgtcctcgtttcctcctccccgaactgacccgctgttgccgacggctagtaggatgacgaagctgacctcggagctactgcggccggtggttccggcggcggcgctggacgaggcggcgctgctgcgctacctggtggccaacgtcccgggcttcccgggccccgcgcccgcgctatcgctgacccagttcgggcacggccagtccaaccccacctactgcatccacgcctccgcgcccggcggggggcagcccaggcgctacgtgctcaggaagaagccgcccggggccatcctccagtccgcgcacgccgtcgagcgcgagtaccaggttctcaaagctctgggggatcacacagatgttcctgtcccgaaggtttattgtctctgcacagatgcaagtgtaattggaactcctttctatataatggagtatctggaaggaataatatatcctgatagcgcgttgccgggggtaactccatctaaaaggcgggctatatatttgtctactgccaaaactttggctgctatacacaaagttgatattaatgccattggattacaaaagtatgggagaagagacaattattgcaaaagacaggtagaaagatgggagaggcaatatcttgcatccactggcgaagggaagcctgcacgttaccagaggatgcttgatctagctcgttggttgaaagaacatgtaccagaagaagattcctcaccaggaccaggaacaggccttgtgcatggtgattaccgccctgataatctagtttttcatccaacagaggaccgagtaattggcgttattgattgggaactatctactttggggaatcagatgtgtgatgttgcttatagctgcttgcacccagtgcaaggacttcttatggagggtttcaagatactggcattccagatggaattcctcaactggaagagtacctttctatatactgctcttttgctgcaagaccctggcctgctgcaaattggaagttctacattgctttttctttgtttcgtggggcatctatctatgcaggagtatatcacagatggactatgggtaatgcatcaggtggtgagcgcgctaaatttgctggcagggttgctaacgctatgattgactgtgcctgggacttcataaatagagtaaatgtcctgcaagaactgccttctaagggttctcaagtcttaggagcatcgtggcaagaatttcacagagaggaagaaagttcaacttctgaaaagaatcaaggaaaatttgttcctagtgaaaaggttatgcagcttcgaaagaaactaataaagtttatcgaagatcacatatacccaatggaggctgagttctacaaacatgcacaatcaacctcaagatggacaattcatccagaagaagaaaatcttaaagcattggcaaagaaggagggcctatggaacttgtttattccgctagacagtgcagcgagagctagaaagctattgtttgaagaccattctcaaatttcccttggaagttcgaataatcttttgctgggcgcgggtcttacaaatcttgaatatggatatctgtgtgagattatgggacgttcagtttgggctccacaaatatttaactgtggtgcacctgatacaggtaacatggaggtcctgttgaggtatggcactaaggagcaacagaagcaatggttagttcctttattggaagggacaattcgttctggatttgcaatgacagaaccacaagttgcatcttcagacgcgacaaatatagaatgctcaatatccaggcaaggagatttttatgtgataaatggaaggaagtggtggaccagtggagctatggatcctaggtgcaaaatcctgatattaatgggaaagacagatttttctgcacctaagcataagcagcagtccatgattttagtggacatcaacactcctggggtgcagataaagagaccattgttagtctttggttttgatgatgcacctcatggacacgcagagattacatttgaaaacgtgcgtgttccagtaacaaatatcctgcttggagaagggcgtggttttgagattgctcaaggaagacttggtcctggaaggttacatcattgcatgaggctagtaggagcagcagaacgtggcatgaatctgatggtagagagggccttaaacaggaccgcatttggaaagaggattgcacagcatggttcctttttatcagatcttgcaaagtgtcggattgaactggagcaggcaaggcttttagtccttgaagctgccgatcaactcgatcgacatgggaacaagaaagcacgtggtatcctcgcgatggccaaggttgcagctccaaatatggccctgaaggtgcttgacatggcgatgcaagttcacggcgcagctggtgtctcgtctgacacggtcttgtcgcacctatgggcaacggctaggacactgcggattgcagacggccccgacgaggtccatctcgggacaatcgccaagctggaactgcggagggctaggttgtaactcgagggcgatgtacagctcgcccgtcttgcgaatgaataaagaaggaacatcacccgtcgtcatttaacgtccatgtgaatacttagatgaataaataaatcctactttcagtagcagttactcttattttcaataaaccatatataatatcaatctttaataaatcatatcatttactcatcttcattaaatttatccatcttcaataaaccatattatatatgtgtacatatttacctacacacacacacttattctaagatactctaaatcttgttgagtgatttttttcttccaaaaaaggactcatgtttgtaatatgttattgtaatactattatacatataataagtatcagcgtatgcgaaggtcacgattg

SEQ ID NO: 24063 - DNA, 590 bp, Zea Mays
aactatctcgttatattcattaccaccatagcagaagcagcgagagcacaagaaccatcgccgccgggaccgtgacgctggacggcctgaagcggctgcggggaggggtgttaaacgggcctttcctgggctacggtggacagcccagttactaagttaaccctcgctcttcctttcccctcggttctcgttgtctgacaggcaaagcggctatgacgacaacggccgccgggtacggctgctgctgggcggggattccgcccttcgcgttgttgccgcggattctctcgacccgccgggagactcctcctcctcctcctcctcgcgcttcccttgtcgcctcctcctcgaagctcagggcgctggcaccacggctgagagtttcgaaccgtccaaggaggctcattgtctccgcttcctcctccggcgaggccaattcggacgcggcgccgtcgccaacggaagccgctattgatataaagcttcctagaagaagcttgcttgttcaatttacatgcaacgcatgtggcgaaaggaccaagcgcttgataaacagagtagcctatgaaagaggcacagtttttcttcag

SEQ ID NO: 24064 - DNA, 893 bp, Zea Mays
cgagaatgtagcagtagcagcttgccaatataaagcaccgtcgcctccttcgtttgttaagcgaaaggaactaaacacagacagtagcttagctgggtttcacattccatcggatcgacctagcctcggacttggagaacatgggaggtggaagggacaatcatcatgctgacaaaggatgttatcctccgactgtctatcctccagtacattcaactggatcatatgtatttgcgcctccagttgcatatccatatccgtatgcacaacatggatctatggctccacccccattaggatcatatccatatccttcacctatgtactcttcacatagtggttacccaccatctggatatccaacatataatcaaagtgcttacccatcaatgggtggctatcctggtgctagtttgcatgctactcaacatcatggtaatggatataacatgggggcaacgctcattggtggagcagcagccgccgccgccgctacctatggtgtacatcacttaacccatggccatcaccctcacaatcaccacttaggacattttggcaagtttaaacatcattataatggacactatggcaagttaaagcatggaaaatttgggaaacacattgggttaggaggaaaacatggccttctagggtggaagcatcaccgtcatgggttctttggaggaaaatacaagaggtggaagtagttaaaatatagggaagggtatgcaattggatcctgcaagtatgataactaacatatgtaaaataaaaatggttggttcgtgttaatgctatacatgcatgtaatgtttttataaattacttgttgtatgtgtcattatcaatctataataagaatacatactttgttaatggcttattcttgg

SEQ ID NO: 24065 - DNA, 1252 bp, Zea Mays
ttctagttggtcgacataccacgcggtgcttggccaagtcgggttaaatggcaaatagagcaagatggatgatgaagtacgaaaagggtcttgttgatatacttcatgagaacaatacttcacattatcgtacccaaaacggttggagaacggaggggtggaggaaaatcgttagggatttcaatgtaaggtaccccgaagcaaagtttagtaaaatgcaaatccaggaacatgagactcaattgaagaaagattataagttgataaaatctatcctccaacgtgatggtgtctcatgggaccagagtgcatccatggttagaacaacagatgaaatctgggatgatataatcgaggatatgcccaaggcacggaagtaccaaagtaagagctttccattgctcgactcactagaactgttatttgatggtccaattcctgaagggggacagaaatcgccttccagcgtacctcagaatgttggtgaaaatgttgacgatggaggcaacaataccagcacagtcccagcaaacagcattaggacctcaaggcatagatgatctcgacacgctgcaaaaacgcggcgaagaggtgctggaacggctacagcatggcgcggaccgaaggctaccgagagctgatgaccaggcgcagtcgagttcttgtgtagaactgcagagggacaggcgcaagaagcggaaggccccggacgtccagcagatgatggagacctatttgaatttcaggatgaagcaagctcacgtcaaagaacaaagagcgaaggacgctggccagttcacgatttcaggctgtatcaaggctctgcacaccatggccgatgtgtcagacgaggtcaaggtgttagcctctgatgttttcaaggacgctgagaacagggagatctttctctcctatgaacccaggctgcgcagcttgtggctgaagagggaagttggcaagctactctcctgatagtggtgttttgtttgttacctgtgtcagtgagtcagtctgacattcgattctggagggagctattgaaggtctaggcttcattcacaaactctattaaaccatctccgtcagtttgagagaacactcccctttttcctaaaacctgccatatataggggaattaggtgaaaagagccgctccagcatatcctatctcaatcatctttttctatatttttcaatccatcacaacatctcctcaatccctaagaaatattcgttttaaccttaatccacg

SEQ ID NO: 24066 - DNA, 2902 bp, Zea Mays
agcacatagcactagtcacgtccatgtccatcccggcccttggtagcactaacatcgaagcatcctcctccgtccacgacccacaccgccgtgctcaaattcggccttgccagcgccgccgagcgtccagcgccgacccaagcacgtgaggagttggacaccaccgagaggaactctctggtcctgctcgtggtggtcgtcgtcatcgcttcccgggcctgagaactgtggcgtacgcgtcctttccctcccgcggcaaggcaacagccgccgtcgccctaagccaggtgcccaggtattcgtcggtcccttcgccaggcctccctcgcttgccgccaacgagcacccactagactgtagactacaattgcatcctgaagaataaaatggaccaacatgattccatggctgactcaccaaggaggcggcacaaccttttgcgtgacaaggtccaattggtgaaaaggaaagattcagatcgctatgagatcgtccgcttccatgatccactgtcttttgagaaaggcttctttgttgtgatccgtgcttgccagcttttggcacagcacaatgacgggataatatttgttggtgttgctggcccctctggtgctgggaagactgtgttcactgagaaggtggtcaatttcatgcctgatgttgctgtgatatcaatggacaactataatgacgcaactcgcatagtcgatggcaattttgatgatccacgtctgacagactatgacacactgctggaaaatatacatggtctgaaggaaggaaggtcagttcaggttccaatatatgatttcaagtcaagctgccggactggttatagaacagttgatgtccctagctcccgaattgttatcattgaaggtatttatgcactgagtgagaagttacggccagtgatagacttgcgtgtttctgtcactggtggtgttcattttgacctagtcaagagggttttaagggatatacagcgagctggccaggagcctgaagaaataattcatcagatctctgaaacggtttatccaatgtacaaggctttcatcgaaccagatttggagaccgcacatattaagatcatcaacaagttcaacccattttcagggttccaaaatcctatgtacattctaaagtcaccaaggtctctaggacctgagaaaatcaaggctgtgcttggtgatgatcatacggaaagcaacgaagaaacttatgatatatatctgcttccacctggtgaagacccagaagcatgccaatcttacttgagaatgcggaatagggaagggaaatataatctaatgtttgaggaatgggtgaccgacaattcttttatcatatcaccaaggatcacttttgaagtcagtgttcgtcttcttggtggtttgatggcattgggatatactatagcagctatactgaagagaagcactcgtgttttttctgatggcaaggcaactgttaaaattgattggctggaacaacttaacagacaatatatacaagtgcaaggaagagatcggctttatgttaaatctgtagcggatcagttaggtttggatggttcttacataccacgcacatatattgaacaaattcagctggagaaattgattaatgatgttatggcgttaccagaagatttgaagacaaagctcagcatcgacgatgagctggtctcaagtccaaaggaagccttttcccgtgtttcggctgatcggagaaacaaacttatgaagagtggcctatctcaatcatattcaacacacggagacaaaaatattgtgaaattgagtaaactaacagaaaccaataggaggtttggtggagggcgggcccttgaaccgcctgctatcaaccagggtgcaatcacccagctttcagaacagatatcaacattgaatgaaaggatggatgagtttacctctcgagttgaagaactcaactcgaaatttacagtgaaaaaacatttgcccagtcagcagaacttagctcttccaaatgatgcttgcaatggttccacgcctacaaatctctttgtctctcatttaggcaatggtactctgatacctcattcttcatcatcaaaccaactttcaaaggattccccgatgatagaagagattatgaacataacaagaggtcagcgccaggttatacatcagctcgacaatctgacaaatctgcttcacgagcatttggtcttaacacgccagactaataataccgccagcaggaaccgggtgctggatagcgacacactcatctgtccacttatttgcctgactgttgccagtatcggttacttcatgtttaaaggtctcagtaggggctgagcaaagtgagttggcccaaacatgtgctccgaggctcaccaccaagttttggcagaactggagctaaaggaagacagttcttgaaccgtttacatcaggaagatcatatctaacagcttacggtcttattaagacaggtaaacctatataccagcacatggaacaaagctttcgcttttcagggagttattactcccaaacgcagaaaatggtgtaccagaagcatacacttctgtaacaggcactgacagttcccagtgctaataaattttggaggttaaaataatgctcagataatgtcgaagaaattatgagagatctataagtttaactgaacattgtcgttgtctttgtcgtgatttctgagtgcgagcactatctcatgatgccatctgaattcacgattctacaaaattgtcttttattttattctcacaagtaaccgggattaacaattgctgcatatttgacgttccgtatggtacaactgtcggaaacgttgaaacggaggagagggtgtagaattcgtcgcgcgctaaaaataacaaagaaaa

SEQ ID NO: 24067 - DNA, 3805 bp, Zea Mays
cgtcgctctcgctgcccctcgcaccggcacgaaccaacaaaaccagccgtcgtggtccgccctcctcggcgcggcacgggcccgacacggccgcacaggcgcccggcaccagcccacacccgtcgccgtcgcggagaaggtgggggtgaatattcgcgtattcggacgccggatttggttcaggatctcgtcgagatgaaggatcacggatcgggcggcgtcactcccagccccgcagaaggggaaaagaaacccatcaactcggagctgtggcacgcttgtgcggggcccctggtgtcgttgcccccggtgggcagtctcgtcgtatacttcccgcagggccatagtgaacaggttgctgcttcaatgcataaggagctggacaccgtccccagctacccatctctgccttctaagttgatctgcaagctcctaagtctcaccttacatgcagattctgaaactgatgaagtttatgcccagatgatgcttcagcctgtgaacaaatatgatcgagacgcaatgctggcatctgaactgggtctgaaacaaaacaagcaaccaacagaattcttttgcaagacgttgacagcaagcgacacaagtacgcatgggggattctcagtgccacgccgtgcagctgagaagatatttccaccgctagactttacgatgcaaccaccagcccaagaactcattgccaaggatctgcatgatatttcatggaaatttcgacatatctatcgaggtcaaccgaagaggcatcttttgacaactggttggagtgtcttcgtcagtacaaaaaggctgttagccggtgattcagttctctttataagggacgagaaatctcaacttctcttaggtataaggcgtgctagcagaccccaaccagctctgtcatcatcagttttatcaagtgacagcatgcacattggaatccttgcagcagcagcccatgctgccgcaaatagtagcccatttactattttctataacccaagggcaagcccatcagaatttgtcatccctttagcaaaatacaataaggctttgtatacacaagtgtcccttggaatgcgattcagaatgctctttgagacagaggattcaggggtaagaagatacatgggcacgatcacaggcattggcgacttagatccactgcgatggaagaattctcattggcgaaaccttcaggttggttgggatgaatcgactgcatctgagaggcgcacccgtgtttcgatatgggagattgaaccagttgctacaccattttatatatgcccaccaccatttttcaggccaaagcttcctaagcaagcaggaatgccagatgatgaaaacgaggttgagagtgctttcaaaagagcgatgccatggcttgctgatgacttcgctctgaaagatgtccaaaatgcattatttccaggcctgagcctagttcaatggatggctatgcagcaaaatcctcagatgctagcaactgcttcccctgctgtacagtcgcagtacttgacctctaatgcactgggtatgcaggatgggataggcagtgtcagtgaagatccaacaaaaagattgactatgcaggcccaaaatattggcttacctaatttacaggctggttcgaaagtggaccaccctgcaattaccccattagctcaacaccagcaacagcctcaccatgtattgcaacaacagcaggtccaaccactgcagcaaagttctgcgatcctacagcaacagcaagcccagttgttgcagcaaaatgccattcacttgcagcagcagcaagaacaactccaacggcaacaatcacagccgcagcaacagttcaaagctactgcatgtcttcagtcatcggatcagcacaagctgaaagagcaacagccttcaggtggacaagctgcctcacaagtacatttgttaaaccagattttgcaaccatcttcatctcagctacaacagctgggtttacccaagtcacctactcagcgcccagggttaccaagtctaacaacaatgggttctttgcagcagtcacaattacctcagactccacagccgcaacaaacagcagaataccaccaggcactcctacaaagtcaacaaccccaactacaacagctatcacaatcagaactgcagctgcagctgcttcaaaagattcaacaacaaaatctgctatctcaactgaacccacagcatcagtcccagctgatccaacaattgtctcagaaaagccaggaaattctccagcaacaagttcttcaacatcagtttggtggtgctgatgccatgggtcagctcaaacatttacagcaaacacctttgaaccataatacaggatccttgccaccccagcaacttgtaagatcacactcagcactcactgagagcgaagaaccttccagctcaacagttccatctggcagccgtatctccccaataaattcatttagtagagcaaaccaaggaaccagaaatttgcctgagatgccagcaacaccgcacattgagcacttacttcaggaaattcaaagtaagacagataatcgaatcaagaatgatatacaaggtagtaaggaaacggtccatgcacctaatcgtcatctagcttcagatcaacttgatgcgtcatctgctacctccttttgcttagatgagagcccacgagaaggcttttcctttcctccagtttgtttggataacaatgttcaagttgatccaagagagaattttcttattgcggaaaatgtggacacattaatgcctgacgccctgttgtcaagagggatgtcgtctggaaagggtatatgcaatctaccttctggacaaagggatcatagggatgtggaaaacgagctatcctctgctgcattcagctcccagtcatttggtgtgccggacatgtcttttaagcctggatgttcaagtgatgttgctgttgctgatggtggaatggcaagccaaggactgtggaatagtcaaacacagcggatgagaaccttcaccaaggttcaaaagcgtggatccgttgggagatcaattgatataacacggtaccgaggttacgaagatcttcggcatgatcttgcatgcatgttcggtattcaagggcagcttgaagatccctacaggacggactggaagctggtctatgttgaccacgaaaatgacatcctccttgttggcgacgacccatgggacaaatgagcttggatggtgaccttggctgcatccctcaaactcaagcctgtagtgcttctgatgacgcaaatgcatggagggcctgacgtaaatactaatatgttccttaccatttttaaacaatactgagagtcaggggtcaaagaagtgaaacacacgtctaacgtaatcacgaggtactgttacttagagccaactcactgacagagtcgatgagaagctcgtggcggaagttgttcagcaagctgccatattttggaggccttgacggctgacgctttgttccactgaaatcgggtaattactcaacacaatcatattagtttccttcttgtgtgtgtaagttgggtgggggtggggggtataatgaatttgagaagctactctgcttattagaacctacattcactgtaatcctcctacaaagttgttcgattatctcagtgtatatatgtgcgctgtagaaccgtgactgtcagttttgcaactcgcaatccccaatgtaattgttcctgtgtgctgctttaacagctgaagtactattataaattgtattatctgtaacagaaaaaagatttggtgtcgggat

SEQ ID NO: 24068 - DNA, 2397 bp, Zea Mays
ttctttcacagcttcgctctctcaattctgttgagcgagtcctcttcccctccggttcacgtcttcgttacatttccacggctcccaccagcgtgagtgcgtgaccagccccaatgccctccaaaccctagtccacagctcctgtaccctggcggccatgccggatctgagcaccagctacctccctcccttccctgaactgtccctcgatgcgggggccctcgccgtcgaccacgcggggaatgctgcagccgccgcctcggccgatgcggcgtccgcgtacgcgtcttcgtctgcctctgtgggcagcggcgtagacgacctcgttattccagcggaatgccggtggaagggccatgtccgcaccttcgacatggcgggcgcgggcgctgtcaccacttgccccgccgcgcggcgtggcggcgggaagaagctgtcactgattccgtcactcgagccggcacggacgcaggcttcagcatcggctccgacgctcgaggaacgcgtgagcgagtgggcggctaagaaggcagcggccggcgttccgactcatcactgcgtgctgcctttcctcaccggggcgccaatggcggtcgaatgtcgtttgtgctccaagattatttatgttggagaagaaataaaatgttcagttaaaaagtgtccacaaatgttccatctcaaatgtgttgcggaagatacttcaaactttaccgttgaaagcttcaggtgccctcaacatgggtgtatggtttgtaagcaaaagatgttcttttggcgctgcggacgttgtacagttgcagcacatacgaaatgtgcaccatggccagtggttcacctaaaaaatgatcaaggaagtgcaatttgctggaggcatccttctgactggctgctgcaaaataagaatgctgactttaccaacagtgtagaggaagtattttgccggctacctcttccatatgttaatgaagacttaaatattgattcaatcatcagggattatgctgaggctgtttataagccacccccctatacatctatcaggcgcaatgtatatctgataaaaaagaagcgcactggtgttcgcgtggatattgggtgcacaaactgcagggctgattctacttgcaaagaagactgtgaatgcaggggtctttctatgagttgttccaagaattgtcgctgctcagatctatgtacaaacaggccattccgcaaggataagaaaattaaaattgtgaagacaaagcgatgtggatggggtgctgttgcgttggagccattggagagaggtgattttgtaatcgagtatgttggtgaagtcattgatgatgcgacatgtgaacaaaggctttgggatataagacggcgtggtgacaaaaacttctacatgtgtgaaatcagcaaagattttacaatagatgcgacatttaaaggcaatgtgtcacgttttctaaatcacagttgtgagcccaactgtaaactcgaaaaatggcaggttgatggtgagacaagagttggtgtctttgcctctcgttccatcgaagttggagagcccttaacttatgattacaggtttgtgcattttggagagaaagtgaagtgccattgcgaagcagtgaactgccagggatacctgggcagccaaataaagaacccaattcaaagcattcttgccactgtagcaccgcaagtgcagttgcgagagtattcgcccatgcaccacgaagctccaagattgaagccaataaatcacttgttaccctggaccaactgtatagaggtctcttttaacctgagaagcaaaaggaaaattgaccggctatgctgggcccgcaagaagaagagaacatccctcgtgccatcttcaacaagcatgccagcatcgccgagtgaagttcctgccgcggatttctaactgcccttcgttgaagagcaagcctgccctgtataataatttcatggtacattctttacatgcattggttggaaacgattctttcacattgctcatcaatggtgttgtaacctgcaacattctttatttggtttcatagggcattcagtcagtttacgggtggtagtttgtcggaacatgtacccaatttttctgatgaaacaaatgtttgagcttcatgtaatgttggctgctgttttttttatgcgagataatgttatgaaactggatagtccctgtaaacatggcttaaaacatgacagaattattttcttttaggagaatgctaccccttttattttatgtacaaggaattgataaaaagagcagaggtcctagcggcctaggcgtgcgagagcctagagcgcatatctaatcatcagtttaatataaaggcgattaacgaagacacggaacttactgtcctgtcttgattgagttct

SEQ ID NO: 24069 - DNA, 1388 bp, Zea Mays
tctttattaccgcctttcttgtgcagttgacgtccacaaatcttgccgctcccgtgctccctttcttttgtggaggtcacacacttgctgggtgttcttggatttgggggattttgctatctcttgggtgccagaccacaggatgtgccatatgtgtactgcctgttctatgtcatattcgttccgctccgctggatttactaccgctacaagaaatggcattactatctcctggacttctgctactatgccaacacctttctccttgtaatgattctcttctatccgaaagatgaaaaacttttcatggtttgcttctcgtttgcagagggtccacttgcttgggcattaattgtgtggcgttgcagcttagtttttggttcatttgacaaacttgttagtgtcctgatacatctcttacctgggattgttctattcactatccggtggtgggatccacaaacatttgctgccatgcacccggaaggaagagatgccagagtcacatggccatatgtggaggacaaatcatatatgtggacatggcttttttttgttccactagctgcttacaccctgtggcaacttatgtatttcctcatagttaatgtcctgcgccggcagaggttgttaagggatcctgaagtcatgacatcctacagagagctctcaaagaaagcacagaaagcaaacaacatctggtggaggctgagcggactgctgggtgaccggaaccggcaggtcatgtacatactgctccaggcgctgttcacagtggcaacaatggccctgacggtccctatattcctgtcctaccggatgcacgtggtgttcctgatactcaaggtgtgcgcctcgacatggaacggtggcagcttcatcttggaggtgatgcctcgacaagtagaacggaagcagcagaagaaactgggcatgaagcccatcgaacaggggagctggacacaaggggcgccggctgatggtacgtacattgggtaaccaccaccaagcacacatctgaggagaaaatccaggagtgaggaaatcgaagctggatgtaacaatagattttactgtttgcaaatgcaacctttgttttttttttctgggtgttcttcgtgttggaggtttttttagctctgccctagttgtgagttgtgacatctttagttttaggctgaagtctgaacgatatggggtgagagatcatgcgtgcccatggttgtcttgggattggacatgcataagttgagatgttctccttttctgtaggagttttcttttcgatgtgaccgttgtgaattgcgtgaagcttttttttcattgttcgtttaattttttttagagagaggccccggggcctattcaagcccgcgacattatattaa

SEQ ID NO: 24070 - DNA, 1493 bp, Zea Mays
gtcgtctaaaaaagcagcagctgctcttctcttctgctagcagctttatttgcctgcctccctaccggcgagggtacgtgcgccgatcgagaagcagcagcagcaattaataactaaacatggatcaggcggcggaggagtcttgtgttcccccaggcttcaggttccaccctacggaggaagaactggtgggctactaccttgccaggaaggtggcctcccagaggatcgacctcgacatcatccaggaggtggatctctacaggatagagccatgggatctgcaagagcggtgcaagccgcagcacgccggcggtgggcacgacgagcagacacaggagtggtacttcttcagctacaaggaccgcaagtaccccagcgggacgaggacgaaccgcgccacggcggccggcttctggaaggccaccggcagggacaaaccggtgctgtcgtcgtccaccaggaccaccaggtgtagcagggtcatcggcatgaggaagacgctggtgttctacaagggcagggcacccaacggcaggaagagcgactggatcatgcacgagtaccgactccaatccaacgagcacgcaccggcgcaggaggaaggctgggtggtgtgccgcgctttccagaagcctatccccaaccagcggcccttcttccccaccagctacgccggctactacgaccacaacctctcaacgacggcacggctgcacgtagacggcgaccgccatttcctggcgggctcatcagcagcagcagcagcactgctacagcagccaccagggcttgcaggcagcagcttcccgcagctgtactccgacgacgacttggagtccaagaagcagctgttgagtatcccgccgctggagagccccactgccatggcctgctgttccgacgccggcggctacgcgcagagaagcagctacgatgaacatgagatgatgatgatgatgatccagcagggaggaggaggaggagagcaagctgcagccgccatcgactggaactttctggacagcctgctgtccgcgacgtcgcaactccatgggccctcgggatccttgttgcagtgacctccggccatcgtcgatcgatccatctttctttgatccagcggagaacattattcattcatcggcattatacaatatatttattagttgcatacacacacagagtatacgtatatgctaataattcagatgtgttcatacacacttccattgtcatgtgtagttcgttgcgacttacattacagactgccttagatgattcaggtatactgtatacaacatgatgcacagtatagtaggagtaagtgcaccagtctcagcagctggtagctagctagctatgtaaaattcctccttaattacagctatgtaacatatatatacagttattattacttactgatatgatctatctatctatctgctgggcgcttcaatttagtttcagactgctgaagccttcagtttttg

SEQ ID NO: 24071 - DNA, 1663 bp, Zea Mays
gcagccctaggatttcagagaaaggagagaggtgggaggagaaaggaagcggcgaagccctgccggattgttgatctgaaggaagcagatgcaaaacatgtatcgggagaagctatggcggaagaggggtcatcccccggagttatatcccaacgcgtctagtaaggatgctcctgttcctcctgacctccctgtacctaactgtgactgtgggagaccggctgtagtatttcgatcgagacatccagacatggctcctcattgcttttacacatgcagcagttttaatgatcatgcgaagtgcttttttctagtggatcgacggtcctgataagtttgaccctaggtacctccttttcgaccattggtggagagggaggaatacacgtgagcgctttaagcggtgggtgcctcctcccctgaaccccccgccaatgacggaggaggagaagaaccttgccacaaatagacgactagagtctccgcctccatacgattgcggagatcgtgctgttatatgcccggagaaccagcaggactttgtgtatcctaatagtgactatccatacggtaggcgaaagtgttttttagagagtggttgtattggcctaagtctcattggccggagccaaaggaaaaggagaagaagaaaaaagagaggaagtacgaacctgtactatgcagatgtggtgttgaagctaagtatggactagttccttcagagcttggagtaggatatttttgtggtcatatggtagactacgaagaggagaccaggaaatgcacttgggagtactacgatgataaagatgaagtgaagcatgagataaggtcgaacaaactcatgggagagaagatgcagtgtggatctcagctcattgattcgtacattaaacagtgcggacagaagatacgtaggtttgccgaagaacttggctgtaatagcccgatgcgtgttgagcggagaaaaaggaaggtggcttacgagaagagggcacaggaggctagggaaatgccggcggccagagccgaggaggaaatgctggacaatcttgctggtcatctgtgtaccaagattggatgcaccgggaagcacatcgtagaggaggcccgtgcaagatacgtggagcagaaaatggcagaggtggagttgctggcggaggaggaaggcgacacttcaagattgagtgagcttctggagctagctgagactggattacatgtggaggaggaggaatttatgtctcaggctgccgatcaagcagaggccgctcattacaagcgaaaggcagatgaggcaagtgcaggtgtaatgttgttggcccaggaggaggagaacgagttaatatcccaggctgcagatgtggtggaagcagcatactacaagagaaaggccgaggagggaaatgcaggacaatcaagcaagtggaacaatattgtgattgaggattgtgcgacggatgacacagacgacgagttgcttactgattatgtttcggactgacttcgctacccatgtgtttggtagtaccttgtattctgcatgggttgtttcattgtattgtactctttatgtatttgtaatcacgaaaaaaattcgcaagagtttcccttgttttagtcccatccacagttataataagcaaacgcaatatgatctaag

SEQ ID NO: 24072 - DNA, 325 bp, Zea Mays
cgcaggtcgaaagggtatcggttaattctggccgttggatcctgcatcaagggccacgattaaattttcttaccaccgaaccagaacgagatcgcagccatcgaatcaatgatcgacggcccgaagggttatacgcctagatctaatttgtgccctccgcaatcgatccaacgatccacggcgcatcatcatccccagccagtgtcgcggtggcacacagacccttcctcggcggcgcatggcttaccagtgacacggccccggcgagcggcagaccggtcagcccagccagaaattcaagaacgaacgagatctatgcgctgtg

SEQ ID NO: 24073 - DNA, 1538 bp, Zea Mays
ctctcattcattcctcctctgctttcttcttcccaagcaacgtactaaccgatgcgactggcggttctggtgctcccggcggcggcggcggcgcccatcgtgctctagactagccaaaggcaagcgcttgggtggggattaatgatgggcggtgtggctcagttggtggtggtggctgcgctcttggccactgcggccgccgcgccgacggcggcggcggcgggggcactgccaagcgaggtggccgtgggcgccctcttcacgtacgactccacgattggccgcgccgcgcagctcgccatcgagctcgccgtcgacgacgttaacgcggacgacaaggtgctcgcgtggaccaagctcaacttggtgtctatggacaccaactgcagcggcttcctcggcaccatcaaaggttcagcttctccacaatgttcttctcacaccaaacttcttgacgaaaaactctcaccttcagaggagaataccagaaccgcgctcgggcgtttcgtgttgatcatatggatgtttgtcgtgttgatcatcacttcaagctacactgccagtttgacgtcaatcctgacggtccaacagctcgcgacaggaattacaggccttgacagtctcatatcaagctctttacctattggataccagaccggaaaattcaccaagaaatacctgatgctaaacctcaacgttcctgagtctcgattggtgcaactgaacacgatcgaggaatacgctgatgcccttaaccgtggaccaaaaaatggtggggttgctgctattattgacgagaagccatatattgacatcttcctgtcacactactgcaacttcaagattgttggacagcagttcacaagggaaggatggggatttgcattccagaaagactccccccttgctgcagatatgtcgaccgccatccttcagctttcagagagtggccagcttcagagcatccatgacgagtggttcacacagccgagctgcgccaccaatgatgagagcaatgtgggtgcaaccaggcttggcctcggaagcttctgggggcttttcctcatctgtgccctgatctgtctcttcgctgtggtggtgttcttcatacgagtctgctggcagtacaagcagtactccaattctgaagatgctgacgagtccaatgaagctggcgctgatggtgctggcaaaagacagcggaagttgtcacgccttggcagcttccaggagattctaaagtttttcgacatgaaggaggaggaagtcatgaagagctcgatgaaacgacggccaggtgagaaagataaccatgctgctggattctagatgcgcaatcagtggcttcagcatagaacatgcatccccgatcgacttcaacgctattttttatacgacgatccgagaatctgtcttttatcacggttattagaattttgcaaagatatacatgcttgggaaaggctactcatgaccgctattttttatgattacctgaatttaattatgaagagtttactaatttacgagatttagta

SEQ ID NO: 24074 - DNA, 1469 bp, Zea Mays
attccctctcttcctcccgaaatttcccacctcagactccgagagaagcaaacacaagaagaagaagaaaaaaaaccgtccgcacaaaaaagaaaacggcagcgccagccagtgaggagaaaagcttcagatccagctccagctccaggtccccctcctccccaatgcctcgcccgtagccgcgtccgccgcacgtcgcaatggccggccccagcgtgcccgcagcggcgctggcggccctgctcgcggtcgccgccctcacgtgctgcgccatcccgccgggcacgctcggccggctcaccaacctccgcgtgctctcgctccgctccaaccgcgtcctcgggaccgtccccgacgacgtgctccagcttgccagcctcaaggcgctgtttctgcaacagaacctgctctccggccccatcccgacgggaatccagaagctcggcggcctcgagcgcctcgtgctctcccacaacaacctctcgggctccatccccttcgcgctcaacaagctcaccgcgctgcgagtgctcaagctcgacggcaaccacctctccgggagcattcccagcatcagcatcgcggggctcggcgccttgaacgtctccgacaacaacctcaacggctccatccccaaatcgctctcgcacttcccgcgggaatccttcgccggaaacctccagctctgcggggacccgctgccgccctgcagcagctcgttctttcccccagcaccatcgcccgggcttagccctggccccgcgacgggctcctccaagaggcggaagctctccggcgccgcaatcgcgggcatcgtcgtgggcggcgtggtggtggggctcctcctcctcatcgccgtcgtgctctgcgcggtgtccaaacgtcggagcgccggcgcccgtgaggggcccaaggccgcgacgtcgtccgcggcggcggcggcgggttcgggagcgaccaggggccagcccccgccggcgtccggcgagggcggcggcatgacgtcttcgtccaaggaggacctcggaggcggcgcgtccgggtctgccgcggccgtcgcagccgcggcggcgggcggcgccgcgggggagcagagccggctggtgttcgtggggaagggcgccgggtacagcttcgacctggaggacctgctgcgcgcgtcggcggaggtgctgggcaaaggcagcgtggggacgtcgtacaaggcggtgctggaggaaggcacgacggtggtggtgaagcggctcaaggacgtggcggtgcagcggcgcgagttcgacgcgcacatggaggcggtcggcagggtggagcaccggaacgtgctccccgtccgcgcctactacttctccaaggacgagaagctgctcgtctacgactacctccccaacggcagcctctccgccatgctccacggaactccctgtacgcgtagcactttggcgatgggatatatggtggaggacagtaga

SEQ ID NO: 24075 - DNA, 274 bp, Zea Mays
gccgttacggagcaaaaaagctttgccagccttaccgtccctacggcacgacgtctctaacgtcggcgaccgcgacgacgacgcccccgcgtatcccctcctcgcgtgctccgttcgcaaacgctgcctccatctcctgcagcttgatgcaatatccgacgacaaagaaaaaggtccagagacacaattgaattgccgtccaaaagatcacattctgcaacaatatctcctacattaaatattttatgctttctttgatatcgtcattccagtt

SEQ ID NO: 24076 - DNA, 1180 bp, Zea Mays
ttgtttgtttgtttgatgagaaagcgcaaacgggagagaaaccctagctggctagctctcccgcctctctataaatcagcgcagcctgttcgtacagcgccacacaccacagttagcttcctttcaattattgtatttcagtcgagttgctaaacaacacgaactcctcagtcgtttgagttttgaggaggcaagcaagaggacccatcgatggcctccttgaaggaccactgtgccgtggtggcagttgtagtggcgatctgcttcgtcgtcctcgccgccgccctcccttcgcacgcgtcgacggcggtggacgagccggcgaagtataagcccagcagagcgccagcgccgtcccctgcatctgcatcatcctacgtcccgccgccggtccagcccgtgatcgtcgtccagggcgtcatctactgcaagtcctgcaagctcaggggctacaacagcgatgcgacggcgagcctggtgtgctacggcgacgcggagagcaagtaccgggtgctgaaccagacgagcacggccaccgacacgaacggctacttcatcgtgatggtgtacgacgtgggcatgttcgaccgccgcagctgcaggctgtacctccgctcctcgccgacggcgctctgcgccgcgcccttcatcccgtccaaccccaagctggggctcaccctcgtgagggaccgcgcggccacggcgcccaggggcgcgcgcggcatcttccaccccaagactgcgctcatgtacgcgccgggcaccggcggcaagtgcccgccgtactgatgtgatggtgcgtacgtggtctggactcgggagtcggagcggcgccatgagggggtgttcactggtggtgcatgggcggcatgcatggatcgtcgtcgtgggtttggactttggtcaagaggacaatgtcagaggcaaaaaaataaaaataaaaaaggagaagtatgtggtgattgttgtcacgacgtccgtattgtgtcctcgttttagtcgatactcgatggagtatctgttgactgttgctgttcgttgagtctgtgtaaccgtttcttcgtcaatcggtcaatcctgcctttggacaaaagaacgaaatagttgcacgtccttttaatttgttgtgtgtttaatttaaactgaaaagttgcaggattggaaaacccgcaatttggct

SEQ ID NO: 24077 - DNA, 2889 bp, Zea Mays
cgtttatgtaccttatgtttttttctcaagttgcatcaagttcctggagtcatactacctgattttagtcaccaaacgccgtcaaatcggttgcatttgcgggcatgctatatattgtatagatgagagccagatgatcaccatcccacactcatcagtgcaaacagatgttgcgacctctaagaatgagctgaggtacaagaagcttttggctagtgttgatctcaccaaggatttcttctatagctacacatatccaattatgcagagcctgcaacagagtgttacttctgcagggatgaaagaaatgccttatgaaaatttgtttgtctggaacacttttctgacagagccagtacgttcaaggtgccacaatactctctggacagtagctcttgtccatgggcacttcaagcaggtcaagctatcaatttttggcagagagataaatgttgttctcagctctagaagatcccgacacttcgccgggacacggtatttgaaaagaggtgtgaatgaccatggaaaagttgctaatgatgttgaaacagagcagatagtctttgaagaagaggctggttcctggaagggaagaatgagtgccgtagtacagatgcgaggatcaatccctctcttttggtcacaagaggcatctcgacttagtcctaagcctgatatttttgtgcagagatatgatcccacatatgaagcaacaaaattacattttgatgatctcgcccggcgatatggacatcctatcataatacttaatttgataaagactgttgaaaaaaggccacgtgaaatgatgctcaggcgtgaatattgtagagctgttgaatatcttaatcaaaatgtcccagaggagaagaagttgagattcatccactgggattttcataaatttgctaaaagcaaatctgcaaatgtactgggtgttttaggaaaagttgcgggtgaagcactggacctcactgggttttactacagcggaaagccaaaagtccagaaaaaaaggttaattcagcttagtcgaactagcactgcaagggatggctcccttgatataagggccagttctggagatctttcaaggctcagggatggctcccttgatataagggccagttctggagatctttcaaggctctctagtaatgctgaggcacttagttctacaggctttcaagatatgagaaatcaggctaacaaacaagagtttcttggtgatactccctgttaccaaactggagtgctccgtacaaattgcatagattgcctggatcgcacaaatgttgctcagtatgcatatggccttgctgctttggggaggcaacttcatgcaatgggactgacagatgttttaaaaatccaccctgatagcagcattgcttctgctttgatggaaatgtaccagagcatgggtgatgcacttgctcatcagtatggaggatctgcggcacataacacggttttccctgagaggcaagggaaatggaaggctactactcagtctcgggagttcctgaaatcaattaaacggtattacagtaatgcctacactgatggtgagaagcaggatgctataaatctgtaagtctatcgtgttgcttttatcataatagatgtactgtattaaacatataaggtagtgagtgaaccagctcttgagttgtctagtgccatgggtgcaatcagatttctggggtactaattcttagtttggtggtactatcagatttctggggtattttcaaccacaagaaggaaaaccagctctttgggagctggatactgattactatcttcatgtgacgacagctggggatgatcttatgtctgatagctaccacttgagttctgcacctggaaataatgtgttcgtggggtctggagctgcattgaaccctgggaccatattgagccctgtcccagcatgcaaagaggatttctcacggaagaagcttacttcgttcgacaaacttatagaaagaacatgtagttctataaggaatgtaaggcttcattgtgacgctgatctaaagccaagtggaggtgttggaacttctggaatggcaccagatgcagctgagatacagcttaaaagccccaactggttgtttggtcaaaggaagcatacggagacaatttcaaccgcaagagttgccccggttgaaaacgtgaacgaggggaacagagacgagtcaaatgtgtctctttgtggggaactaatttggctatcctcctcagttgaatcatgcgaggaggacattttcagaaggtaccttgcattcacgacagcggatgtagagaatggctggtatggcggaacactgctatatgaccgagatgaaaacagcggggcttacaggcactattctgagctctgccagggagctgtcatggatccctttgagcatgaccctgagaaagagcggcactacgcggaggcccttagcgtggatctcggcgatgcacgggtggaggccgaaatgcaggccgcgctggatgactaccaggtcatagggtcggacctgagcatcatcccttcgtgcggagcactcgcagaggacccgagccagctgacgaggtggatcattggagatgagaggctgcttgtgggtgctgctgcgcagtagaccggtggggttctgtcttctactcttctgtggaaggttgtacagagcaacagattgccattcaccgacccagcctttgtgttttatagatacttccctgaaacaattactccatgtatttagcagcaggtgttttatagacacttccctgaaacaattactccaacacgtgcatgcaatttattgttgtgcagcaggtggtattgctgctgggattagctttggcaataatagttgattgttgtgcagc

SEQ ID NO: 24078 - DNA, 588 bp, Zea Mays
taatctttcgacatagcttgttgctagaatttagtagttttggtctggggagctttgccgtcatagatggaaccagatgattcgcctgatgggtgaccacagatataggcctttcattgagcaagtggaagtgcttgcaaggcggtactgcccagagatgcttgcgtacaggaaaccagtcgcaggtggatcctcggccgacgaacctgctggagcctctgacttgtaatatgggatctttagaaacgttagcagcatatggttctagagctgccaagggtgtcgtcagcactctgatctcaacaaactttggtattgttgagggcttatgtatcttctggatttgaaatcacggatgttttatcgcccaactaatcatgatttggggctcgattagagaacgactaggaatcaggccgtccagttagaactaatagtctgattaagtgttggatgactgttgaaaatgcaatgtgaacttagcagctgtgcacttgcacttttaccttggacttggaaattgccgttgccttcttggctttcaaccttcccagctgctgttaaaaaacggaacctattacccccggt

SEQ ID NO: 24079 - DNA, 2692 bp, Zea Mays
aagacatctgtgtttcctggctgtttaccatgatagcactcagcttgcctggtttactgcttgctcagaaagactttggacttctattatttgtgcatgaagagacgtgtgtttatggtgttatagttttattacttttttcgtggtcagcaatcttttagtgcagttcatgtaagatagtgtctgctccagaaacactatttggtgtcagtcagcactcagaaagaactgtttaatatcatcaatcagttcaaatgaggaatttaaccttttagattaacatgttaatgtcaatggtgacagtagtttgcagagtcgatctctcttgctatccaagttgtgtaatttgccgtgttatccactttcatgttagtgcaaatgagttgatgaggaaatggcttgtacgcttatgtgacacattatataactatgatggttacaacaaagtggcgtacctggaagcagcagttttggatggtcaaattactgattttctggatgataacactgagtgatctctctcactggcctgggtgttggggtgtaaatcatgtcagttttcgtcaaaccacttactaatcgtttttaacaatgttttcaggtattgcctatcaggatcatctgattcgatgataagactatgggatctaggacaacagcgttgtgttcattcttatgctgtgcatactgattcagtttgggcgcttgcaaccactcattcgtttggtcatgtctacagtggtggaagagaccaatctgtatacctaacagacttatccacaagagagagtgttttactttgcacaaatgaatgccctattctacagttgtctctgcaagatgacacaatatgggtggcaacaactgattcttctgtatatggatggccagctgaagggctcacaccccaaaaggttttccaaaagggtggctcattcttagctgggaatttgtcattctcaagggcaagagcttctttagaaggatcagcacctgtccctgtatacaaagagccatcttttgtcgtcccaggggttccagcaatagttcaacatgaaataatgaataatagaaggcatgtactgacaaaggataccactggttcagtcaaattgtgggagatcacccggggtgctgttattgaagactttggcaaggtttcatttgaggataagaaaaaggagttgtttgagatggtaagcatacctgcttggttcaccatggatgctcgattaggatgcttgtctgtccacctggatactccacaatgcttttctgcagaaatatatgcagttgatctaaatgtttctggagcacaagaagatctcaagattaatttggctcatgataccctttgtggcttgctagttcattggagtaaaagaaagcagaaatctagttcgcatggcttgcctaatggtgatagttcaatagggaaagatgttccgtcaaaagactcgcaccgatcaagaactgaggtggatgacacaactgaaaaccacacaactcatgtgctcccatcatttgagttttctacagtttcacctccatcaattatcacagaaggttctagtggagggccttggagaaagagaattactgatttggatggaaccgaaggtgatctaccttggtggtgtgtggactgtgttactcacaatcgatatccaaaggaaaatacaaagtgtggcttttatttacatcctgctgaaggttcgcctgcgccaaacataactcaagggaagcttagtgctccacggatattacgaattcacaaggttgctaactatgtggttgagaaactcgttcttgacaaaccattggatggaggctctgatagtacgtttgttatgggattgagttctgctcaatcacagctctcacagctagatagttcttcgcggcttggactaaagccatggcaaaaaacaaagccatgtattgaggttctatcaccagatatgagtttggctacagtgcgaacatatatatggaagaagccggaagatttgattcttcattatagagtggtccaatcgagatgatcacggcttcagatgtacatgctcacatggttctccagatatgtcccagcatgtccgcacctttagatggtgtggttgaagatgcctttggcttagagaggaagcatcatcttcacagaggaaatattttgctcttgctccgccctccccccggtagctgttcccagaatcgacttgttcgcttctctgtaaagttcctgaccttgccctggtagtaagatgtatcatagcacaggtataaggctctctgctggctgccgagcttgtaaatgtagaagattaggtgcttaataaaagatcgaaaggatatgttttttctttcgtttttctttgacagcatttgtaagaaaaaaaaagaggctgacgctcggcccagatcgtggcgctccgacgtcgattattggatttaaccccgccgatccccttggaggtgtttggttgagaccagggtaagaggtggacgggaacccgggaacaataaagctgtttttgggacatgttgatgtcgggagctactttacctctcatccttcaacaattgttctatatactctatagggctattttagttttttttgttttttgctagcgagaaatcagaaataaatgattgctttgttttgataatcaaagctgttggatcatgg

SEQ ID NO: 24080 - DNA, 1632 bp, Zea Mays
gatattctgtgcgggggaggaagcaaatcgaatcagtcttttacctcaacaccagctgacatcgccagccatgaaactgttggtctgacgagcgcgcctttgcttggaaccgtagtattatctcttagtcaccgtcaagccatgtcgctcacattagcatctggtgcttataatttgttgtttgttttctccaagttttgaagttagagtagcaaacaattaaggacttgggatgcagaacattaaggatttgtaccatttactataggggcaaggaggtttctagtgagtcatcgatctaaaatcttttatgctctctttgtgtttactgtttagagttgtttagttctgatatgaactaagggcatgtttgcttcgcaccttcctgcgccaggcaagaattttggccaggtgtctagaactcaacgtcggagaattcaagatgcttaatgccccctcagaattcaagatgcataatatttcttatgtgatgcttacacttgtcctagcactactacttgtcaaaacagtggaaaagttactagattgttcaatcatcactactatgtagttgtgttgcacctgcacttccaatcatcacttactaagttactaattagtagaaaaggctacattattgtggatactttttcataatttacatcattatttgcacctccatgttatgtttgtattcatgggaatattcaaagattcatatcacgagttcacgaccgcatggtgctaagggattatgccatgcaacaaacctgtgtttgaacaaaaactatttagagccagcatctgattaacaaaaactatatattttgaacaaaaactatattgataggaatgcttagcccatatatggtcatcatttggagctgtacatcttagtctctgattatgctaattgatttttgctggtgtgctagggtagtctcagatggaattttcactgaaggcagggttttgatccttgaatagtaagttttcagttaatgggccatgttgatttgattatagcagacttttttctgtatgcggggatagtagccttgacagcattaagtggcattagtgctacattcctcagcttgcctgcagggatcaggcagggaaaaattattggtactaagtatttatttagaattacaattcaccttggttttgttatagatcaatatgaaaggatgttcgatttgggcataagctaaaaagaacttgtgagagtatttgattctgcaaagcactttcgaacactaaaatgagcttaattcgaatatcccaattaataatgatttatctgtatatccttttcatctaataatagcattacttgcatatagataacatcaggtgttgttttttgtcacgtgatgcttccccttttccttccaagaagatttatgcattgttcgatgggctcctgatactgccaggagtgacccttccactgctgctaacttcgagcttgatcaaaaggtctttctactcatatgcaaggtgtaagactatcgagttatgtggtatattggtgttgatcattcatgtaatcactttgaggctatgggtgtttgccttgctcatacttatttaatttgcttccatctatgagattagaaaaaaaaa

SEQ ID NO: 24081 - DNA, 7762 bp, Zea Mays
caaaactctgctcctcgcttaaacccgcgagcctccggacccggatgttgttccggttccgcccggccccctcgtagccatcgcctccttttagcgccgccatcccacctcgccggcggccatggcgaccccgtcttatgcggcggtgaagtgcctcaacacgtcctcgtccagccgcaagcgtttctcgtttaagagcttctcgcagcgggtggaggagatcgacatcgatgtgtaccgcagcctccacacactgaaggcggagccatccagcggatcgtccttcttcctcgacgcaattgtggagtggagggagcttaatactgcagaagacttcatctcattttatgaggagatgataccattggtacaaacacttcctcaaattgtcttgcaccgggacaagctcttttccgcacttctacaaagggtaaacatgagtgcaagattgtccctggagccaatactcatgttgattgcagctttctccagggatattctagaagattttttgccttttttaggaagacatgctagtgcacttttatctcttcttaacgacggaggtgatcgcgaccctgaaatcttggagcaggtcttcacatcctggtcgtatataatgatgtacttgcaaaagtatctagtgaaagatactgtccaaattcttaggatcacagcagcgttgagatatttcccgaaggactatgttagagaatttatggcagaatctgtttcatttttgctgaggaatgcacctaataatcagctaacgcaaggtctactgaaagttctacttgaggctgctaaacaaccatcacctgcacggatagacggggtggtctctttgctgtggcatgtcatgaaaggaacttccacaaagctacactcaaaagctgggcaggtcttgaagttcttgttgagcaagtcaattgtttccactctccgtgataaatttcctgatgataaggtgaagatgattaaacttgttgaggatgttccaaccattttgggcaatttgtccatcatatcacctttctatgccccagtgttcaaacttaaaaatccgagggtgattgtctttataaagaaacttttggtaaaaggtccccaagttgcacaacattttgaaagtcaaatattaagagtatcatccatggaagtgacaaaagaatttgatccacaaaatctcttggagctgttctccatctttgctttcaatttgagcagtccaaccaaggatgttcggattttaacattgaggattctatcatattttgtgaagatggatcaacgtctaatcacagatgaggagcgaccacacaagaggcagagaacagaagtttctggagaggaagctgttgctaaatacgctaatgttgtggatattcttttgattattgagtcaatgccaatttcagtatctactagccgtaaaattgctatcttcatttctcggatacaaatgagtttatcttccaagatggttcatgatgattacatacctcctctcttacatggtattattggcatattgtacaatagatttagtgatctatggccacaaacactggattgccttgctgttctcattagaaaacacaaggagcttgtttggggtcagtttgttccgttcattgcaattcaccaatcaaaaggactgactgtgaaaaatcaggagaagctggaagctgcaacccaaccacagtctatttttgactgcttcaacttgtatcttgctatggactttgattgcacaccagctgtgaccgtggctaccttattgcttcaatcgctccaaaggattcctgatgttgctgaatcccgctctcgacaacttataccgctatttctcaactttatgggctatgatgatagcagcatctttagtgctgattcatatatgcctgaaaaatgtaaaggcaaacaatggaaagcgattctaaaagaatggttaaacttattgaggttaatgcacaatgcaagatcgttatatcagggcaattttctccaggaagtactaactaaaagggttcttgatgacagtgatcctgaaatacaagcaaaagcattggattgccttttgaactggaaggatgaattcttgatcccgtacagtcagaaccttaaaaatctgattgatgtaaagactcttcgtgaagagctgaccacatgggcagtttcacatgactccttgtcaattctgaaagaccatagaagtcgtgtggttcctctggttatccgcgtgttggcaccgaaagtaaggaaactgaagctactaggttctcgaaagcacacaggtgccagtcatcgaaaggcaattcttcgtttccttttgcagtttgattcaaatgaacttgagctttttttttctttacttctgaggtccttgatccctggcagcctccagcttaaaatgtttggttctcagccagacaaccttcttggaagtttctctgacattgttggaacttcaacagaaatttgtgtagagaattttacatggaaaaaggcaaatggtttcattcatctggttgaagaaatttttggtacttttgatatgccacatataagcccatttcttaatgttttattaatcattgtcgctcgcttgctggagagttgcatgaggaatcttagaaatgagagtgatgggaaatatccttgcaaccaaacaaatgaccatggtaatggttgttccataaattctgaagtgggcaattctgtgaacgtggatgaatgctttaaagaaatgcatctagaaggccatatggagtcattatttattatcatgaagctactttgcattttattcaacaacaacaacatgcattttatttgccaaatgtttatatcttctcttaactaattgcaacagcaacctcactctatcacgcagacaagtgtatccatcaagcagttgaaggatttgaggtcttcatgtattagagttgtctcgtcagcccttagtcactatgaaagccatgagtttggagaaaacttctggggtgtttttttttcttctgtgaaacctctgatagactgctttacacaagaggcttccagtagtgagaaaccaagttcattatttgcttgttttatggctatgagccggagcccaaaattagcaccactgttggggtcaaataatcttgtaccagctattttttctattttgactgtgaagacagcgtcaggatccatcaccacctatgcacttgagttcattgagaatctgttgaggttggatattgatttgcagcagcaagatgaacatttagtgaagaaagttcttcttcaacatatggatgttcttatccatagtctccatgattttgttaatcatcgcaaagagctcaacaggagatctggtacatggcttgggcaacgtgaacttaggctgttcaaattattgctaaattacatcacagatccctcagctgctgataacttcatagaccttattcttccatttttcagcaagaaagatttgaactccgacgattgtttggaagcactatgtgttgtgaggggaataattcaaaatctgagatgcaaagtatctgaaaaagttctaaatgcactgaacccattacttgcaattgttggattggaactgcgactatgtatctgtgatatttatgctgggttgtcattgaatgatccttcgatgttgtttctggctgggttaataggagatctgaatgcagtttcagcttcagaacttggtgaactagattatgacacaagacttaacacctatgataaggttaggccacaattgtttcttggcttgacagaagagcatgtgggcgccatattatctcattgtgtgtatgatatgtcatctgaagaattaattttgcggcaaagtgcatctagggctctgcagtcgttcctggacttttccgcctcagttatgaataatgatgtgtccaaatactctattgatgataaatttagagagaataataccagaagcatttgcacgatgggctgtattcagaagatattggaaaaaacttatctgcacaatatgggagtagcaatgactaaagatgtatcaattcaaaaggaatggattattttacttagggagatggtctccaattttaatcatttagcatccttaagctcatttaggcctctctgtaaggtggatatagaagaggattttttccacaacataactcatttacaggctggtaaaagatcaaaagcactgttgctttttagacagggaatcaaggaaaacaacttttcagaggatatcactatgaaagtctttgttccactatttttcaatatgttttctgacgtaaaagctgggaaaggcgaacaagtcagagatatatgtttggatacactatctgctgttgctgccaaagtgcagtgggaacactatagaacaatattgaagagatgcttccgagaattaaaccttagacctgataagcagaagatcatattgaggctgatttgttccatattagatgcattccatttcatgaaacctgcaaatgatgcctcaggaaattctgatgctttgagtgaagatattgattcttcccttacattctctttggtcacagtctcttctgataagcaacagtacatgcaaaaggtagtgtttccacaggttcaaaagttgttaggatcagatccagagaaagtcaacgtcaacataaacctggtagcactgaaaatacttaagttgctaccggtggattattttgagtcccaactttcaagcatcattcatcgaatctgtaacttcctcaagaatcgtcttgaaagcatacgtgatgaagctaggtctgctttagctgcttctgttaaggaactggggattgggtatttgcagtttgtggtcaagatattaagagctatacttaaaagaggttttgagttacatgttctgggctacacacttcattatttgttgtcaaaaaacattactgctgatatgtatggtaggcttgactactgtttagaagatttgttggcagtggttgacagtgatttacttggagatgttgcagaacaaaaggaagttgaaaaacttgcctccaaaatgaaagagacaaagaagagaatgtcgtttgagactcttaagctgattgctcaaagtattacattcaagaccgatttactgaagaagataatctcacctgtttctttacatcttcagaagcaacttactccaaagttgaaaaccagacttgagatgatgctacacaacatagccttagggattgagtgcaactcatctactgaaacatcaaacttgtttatcttcgtatattgtcttattgaggatactattacaggaagcagatctgaatgcaaagagaatacacaatctagtcctgatcaagacagtactgtaagaaagaccttcctgggactaggtgagagtggatcacagaattcttatatacttaccaagtttgcacttgacttacttcgtaatcgtctgaagagcatcaagcttgacaaggaagatgaacaactcgtgaagatgttggatccttttgttgaccttctgcgaaagtgtatgagttcgaaacatgcaagtgtcctctcagccacatttagatgttttgccttgttggtgaaacttccgttgccatctctgagggacaatgcaattactataaaaaatgtacttatggagattttacagagagctggaaactccaatggtcatttagtcacatcttgttttaagctacttgctgatctacttagaggattcaggatttcactttcagataatgagcttcagatgcttgttcatacccctatgtttgtagatcttcagacaaacccttcccctgttgccttatcgcttctcaaaacaatagtcaggctaaaattggtttctcacgaaatttatgatatagttgttaagataggagagttgatggtaacaacattaactgaatctatacagcagcaatgcattcaaattatgctacaattttttctgaactatccactttctgagaagcgcttacagcaacatattgactttttcctggcaaacttaagttatgaacatccttcaggaagagaagcagtgcttgaaatgctccatgacattcttaccagatttccccagaggattattgatgagcagggtcaaaccttttttcttcatcttgtagttgctctagccaatgaacagcatcagaatgtgtcttcaatgatccttagagctattcaaaagctgttaggacgcattggtggtcagggaaagagttacatttatgagtattcactttcgtggtacactggtgagaagaaaagtttgtggagtgcttcagctcaggttattggtttacttgttggcgatcacacattacaaatgggcaagcaccttaaaagtattctggctgttgttaagaaaataatggaatcatctattattgcttctggagctatacaattaggcttatctgatgaagctgccctgccattgtggaaagagacttactactctgttgccatgatggagaggttacttcttcgctttccggagttgtattttgagaaaaacatggaggacatatggataatattatgcaagttgttgatccatcctcattcgatgttgcgtagtatttcaagctctctggtagcatcatattttgctacagtggagaagaggaaacatgaacagaaattggatgccccatcatggttgcttgttcaaccgagcaggctattcataatagctgtttccttgttgaaacaattgaggagtgagctgagtgatactacggcaaataatctgattgtacagaatgttgcatactcagtctgcaacttgcatatgttgattaggcaatcgacctccacacatcagttttggtctagcattagttctgatcgtggtgctttccttgagggttttgaattgcttggttcaagaaaagcaaaaaatatatttctcctttgtacttcaacatctagtgatgtatctggatctagcctcgacaccaacgaagagcctacatctttgttagtttcgtcaatcctaaagaagatgggaagaattgcaatgcaaatgcaggatacacagataaagaacgtgttcaattgcttcaatatgatttcatcagctcttggtcctgatgaatcactaacctatgctgatcacctcttggccccattgtataaagtttctgaaggatttgctgggaaagttgttagtgatgaagtgaagcaactggcccagggggtccagaacaagttacgtgacctgattggttccgagaaatttgttgaagtctacaagagcgttcggatgggcctgaaacagaagcgggacggtagaaagcaggcacagaagattgttgcagccgtggacccagaacgcaatgccaagcgaaagcagcgaatggcagccaagcaccgggaacacaagaggcgaaagataatggcgatgaagattggcaggtggatgagatagcttggtatttaggctctgcggaattcggtgaatcatataattgtagaggataatttttcgtgctacaagtgctggcataaaattatgtttctgttttatatgctgtctcactgacttactgcccgacgtaattttattgttgagttaccgaaccataccgtaagtaaaaattaagaggcataagcaatgaagacatagaattgattgaattatatttttttggggtggatggataagtaacaatatattattaaatgtgcaattaagagttttctggctgaggtttgc

SEQ ID NO: 24082 - DNA, 199 bp, Zea Mays
caggtcaagaataggtaccgcaggatgaggcgtatggaggatgctgtgatgagttcgtgagaggtctaggccgtcgtctcccagtaaactttgggttgttggatcgttgtctccttatgatgtaattatttatttattttgtacagaactcctattatatagtaaatatgtgacatttgtttctgtaccactattcatc

SEQ ID NO: 24083 - DNA, 2975 bp, Zea Mays
ccatctcctctgtctccgcctcgtcgcttccgcccactcttcctcgccgctgcctcacggccccattgctccgagcgcggcgccggtcgcgatccgaccgggggtgcgcggcgccgaatggtgtgatcgaccccgtcgggaattgggatcgaggtcatgcagcgggctccggagcgccgccgcggcgccgggccgctcctgctgctggcgctgctcgtcgcattggcggccgcgcccagactcgtgcgcgcggtcaccgacgctaccgacgtctctgccataaacggactgtacatgtcactgggatcaccacttctacctggatggactggaaatggtggagacccgtgcggtgagagctggcagggtgttgtgtgtaccggctcttccataactggaataaccatgaatgctgcaaacttgggaggacagttgggaagtttaggaaacttcactgccatcaccagcttagagcttaacaacaataatattggtggaaccataccggaggacctacctgttacattgcagagtcttttcctctctgctaatcaacttactggaagcatcccaagttcactgtcaaaactcgaaaacttaacagccatgtcagtcaacggcaaccatctaaatggagacctaccagacacttttgattcactcaatagacttgtaaatttggatatttcttcgaacaacttgagtggtgtgttaccatcttcaatgaaaaacctggcatctttgacttcattgcacatgcaagataatcaactgtctgggacccttaacgttttgcaggatctcccactgaaagacttgaacatagagaataatcttttttctggaccggtgcctgcgagtttgcttaacataccaaacttcaaaaaggacgggaatccattcaataccagcatcgtcccatctgcatctccgccttcaacaggaccagctccaacaccagcagcatcaaaaccagctccaacaccagcacccaccacttcaaattcaacgcccccagcaccagcaccctcatttccttcaagatctcctcccccgcctaaaacaacctcaaactcttctgaaggatcaactacccgagatagcacttcaccatctaagaaacacagtacatcaaccctcaagattgttggctttgttcttgccggagtagtgctgtttattatcatagtcctcctagtattattttgtctatccaagtaccaagagagacggtcgagatatgatcataacagaagtcagcaggcaagggtgcatcatagggttgaaccgcaaatcaagccacctccagtgcaacaaagcaatgatcttaaaaaaggttcaggtgaggtacttgatagaaggggccatgaactaagttcatcaacggcagattcagatctgtttcctgtttctctaccaccaccacctcctccacctccattacccccaattgaaagagttattgcaaatcccattgttccaccagaaaagcgatatagtcctccaccaaagacaagtagctctacttctgccacatcattctctattgcatctcttcagcaatatacaaatagcttcagagaggagaatgtgataagagagagtagattaggaaaggtttacctagcagagcttcctgatggcaagttattggaggttttgaagattgacaatgctaatggaagaatatcagtagatgacttcctagaagaggttgaatgtatcttagatatcaagcatcctaacattcttgagttagtcggatactgtgctgaatatgggcagaggttacttgtgtacaatcactttagcagaacgacactagatgacacacttcatgatggagaggatactgaaagtgcactgtcatggaatgcccgcctccaggttgctcttggttctggaaaagccttagagtatctccatgctagcttccaacctccaattgtgcaccagaattttgaaccagctaatgtgctccttgacaaaaagttctcagtgtgtgttgctgaatgtggactggcagaattgatgccaccaagttcagtcactcagctgtcaggtcggatgcgtgcattactgaactacgaagcacctgagttgcaggattctggggtcgtttcagaaaggggtgatgtatacagctttggtgtagtgatgctggaacttcttactgggcgtaaaccatatgacagttcacgcccgcgtcatgagcaacatcttgttagatgggccagttctcagcttcatgacatagaatccctgtccaagatggtggacccatctatacgtggacaatgttctgagaaagcattgtcacgtttcgctgacataatcagccgctgtatccagcagcagccagaattcaggccaccaatgtctgaaattgtacaagacctagctagacttgtaaatgccaccggtgaggaatcagagtaacccccaaaaaaagcatggagccatggaaggcatacaatacaaacgtcgcgaccaagttacgtgctgtacaatttttttgggaagataattgtcttgcttggtctggggagaatactgtgaagatgtattttcctcagagagcattgcacactaatgtcagattggaatttcatttagacctggctggggagtggaggtgcagccatctgtgcacctgattgttgatcaaatccatgtaatatttttgcagacatgatattatatatagcgacagtggcggagcctccgccaagcgccaaggcccggcctgatcgggcacgtgtccaggcttccgccgaggaacacttgggtgggctctcgatcggcctagcacacggatgtttggatgggtcaggcagtggtgtcgatttcaggccggctccgccactgtactgtatagcaaggtgtatatatagcaagaccccggattcttgtaataatagtcagggattcgttaaatttgttactctaaagctagtcatttacttgttcgcccg

SEQ ID NO: 24084 - DNA, 2734 bp, Zea Mays
cggcactctgttcctccctgcttttctgagccaaacgtggttctaccgcccgttggaaatgggctcggcgatggagaaggagcagaggaggccacccagctcgaagacggcgccggtgtccatgaaggcgtcgcccgcaaatgcgacgccgcaatgcatgaagaacaggaaaattgcactgcagcaggacgtggacaagctgaggatgaaactgcggcacgaggagaacgtccaccgagctctggagcgggcgttcacgaggccgctcggcgctctacctcgcctccctcctttcctgccgtctcaaacgttggagcttctggccgaagtcgccgtcctggaggaggaggtcgtccggctggaggagcaggtcgtcaatttccggcaaggactgtaccgggagaccgtcatcaccacctccatggcggcgaagagcgtgtacttcccggacggttaccggagcacgccggcacggcacaagccacctgcacaaccgcagagtccagagctgtctacctcgacgcgccaaggctccgatcaagatgccgctgattggctgccatctttgaggcgagccaccaatgcgatgtggacaccaagaaggcccggtcgttccctgagccaaggcgacagtccggggaaggagaaccagtcgttcggcagtggcactaattcgtgcagagagttcggcctggcgcccttgagtaaagtgccaggatgcagggtagtacaggtagcggagacacgcgcaggttttcagacaacgagtgcagtggaagaccacaaagctgttgagggcagcaatggcactggtccaagcaaggcctcaacggcggcgaacgaagtctcggaggagctactggcgtgcctgctggccatcttctcgcagaagagcgcatccagcggccaagacgaggagcgggtgtcgctgccgccggtctccggctcctgcggaagcagctcagcagacccctactgtgtcccagaattcgggtggcgggatattggccggtacaagcagttccggtcagtcgacatgaacacttgtgccggcgacgactccgctcttggccagagactgaaggcactgctccggaagctctccttggttgacctagcgggcctctcccaccagcataataggctggcgttctggatcaacacctactactcctgcatgatgaacgcatttctcgagcagggagcgcctagcgacccccgtatgctggtggccatgatgcccaaggcgaccatcaacgtcggcgggcgcgtgctgagcgccgtggcgatcgagcacttcattctccggctgccccactacgacgatgacgacgcaaaagcacgtgcacactgactgaagcgaggaatggcgacggccaggccgtgctcgggctggactggccggagccgctgctgacgttcgcgctctcctccggcagacggtcgtcgccggtgagtttcgatcggcttggttccgtccgtgccatgtacctgctagctgctgcatttcttttgctcgtagagcgctagctagctagctagctgtgccccgatccaggaccgactggcagaaggaaaaggtgccgtccagtccttgctgctccctttcaactgctattgattgataggtaccgagccaagcatgtgccagtgttgagcaagtcgcattttaattagtaccgcgcagcttataaataggggtacaaaccgaaactgttagttgaactttaataagaagtgaggagacaatattctaatatccgtttatccattggagtagaacatttagttcatatatataccctaatatatggagtaaataatcatcgggaatcgagtcgcgggtacccgttgtcatgtctgctacgggcttggatgactgcaatgcaaggacgggcttggatgactgcaatgcaaggaccaaggagcacataaacatcactgttcatttatattataatccagctgtttgtatagtctgctgtaattctccgtcccatgagagctgcctgttcatcaaagcactttggccatgaaattgagagacatcatgacacaggcaattacgacggcactttttacttttttaggtgctctggactggacgcccggtctgtcctccgagctgtctcctcaaggcaaatgattttagccgccaccgcttcttgtctctgaaggtgagggtctacgcggccggccggagtcgacgagaagctggaggcggtgaagcgggagtacctgcaggccgcggtgggcgtctcgccggcgagcgggctgccgaacctcctccttcactggtacctgctggctgcttgactccgccaaggacgtggaccgggtgtgcctgcagctgtcccgcgacccgtgtgcgccctgccggataccttctgcttctggccctgttgtcgtagaacgttggagtgtgtacacagttttggttgggccgtgattctttttgctgtttcaaccgtgaatttgttgtttgcttacgttgtacacacagttttcagttttggactacaggtctgcagagataaggccgtaagagcatgtacagtggagagacatcaaaacagttctccaagtacatgagacaacaaagagactctattgtacaattgagtgtctataaacgtagtttattaataaatacagaattaaatgtatttgtatagcatcagatcgatagaacagacgacaaattcgtacagtgggaagtgagacgtccgttgct

SEQ ID NO: 24085 - DNA, 2437 bp, Zea Mays
ggaagccggcctcttccaaaaatcgagcgtgtcgagattcgtgtccgcctgctgacgcgggcacgactcgccgccgccgcagtcgcaaagcggaagcgcggaccatcttctcccgggtcgaatctctccaccgtgtaacacacagccttgacggccggcccgccaccgcgagatgcctcggaagtcgcacaaggcgaggggcgcggccgcgcacgccgccgttggtctcacggccgggccgaggcctcccctgaaggccacggccccaaaccctagcgccgccgccgagcttccccaggtcgtcgttgccgaggcagagggcctcaaggtacctgacgccggggcgtccgccgccgctgacgccctggagcgcctccacgtcgcccctgctcccgacggtgatccgccgcctcccgagcccgtgcacgagcccgccgcgccgcctcagcccccgccggccgaggcgtcgtcttctgggaggtctgcggcgggcgggagttgggaggaggaggctgtaaggaagctgcgggagctggcggaggttagtcgggatgagacggagttgaccgaggaggaggtgcgcgccaatgatcagaggcaggaggacgagatctgtgccctcgaagcaatttttggagatgctgtagtgattttggacagaaagggaggccagcggtctttccaggttcttgtgcatattgaggttccagattatatagatgtatcaacaaagctcagttatggtgatggaacattaaattatgcggcaacacatgatgatgatgaccttttctacaagttcagagttgagcatttgcctccgatcctgctaacatgtctcctgcctacatcatacccaagtcaccgtcctccctttttcactatatccacatattggcttgataaaggcatgatttcaccattatgtcgcatgcttgacatgctttgggaagagcaacaagggatggaagtaacatatcaatgggtgcaatggctccagagttgttccctttctcacttagggtttactaatgaagtagttttgagaaagagttatgtaacatgttatgcagatggtgaagataagcgtgcttgtccagattatgcttcaccagatgttataattccaaggatgatgagatacaatgacaataagcatcatgaagctttcttacatgctatccatgattgcatgatttgtttaagcgagtgtcctggtgttgatttcatcaaacttccgtgtcaccatttcttttgctggaaatgcatgcaaacttactgcaaaatgaatgtcaaggaaggaaatgtagtgaagttgctatgtcctgatacaaaatgtgaaggtgctgttcctccgaatgtattgaaaaggctgcttggagaggatgaatatgaacgttgggagggattattgcttcagaaaacccttgatgccatgaaagatgttgtctactgtccaagatgtcaaactgcttgcttggaggacgtagaaacgccaagaatctgggaatgtgcaaggagatcagatgaaagttctacaggaactacgcagcctgaaggaaattatgaaggattcaaaacagtgcccaaaatgcaggatggccatatctaagacagaaggatgcaataagatgcattgtgagaactgtggggagtacttctgctatcaatgcaaccgtgcgatcactggatatgagcatttcaggggttcgtgtgtgcttttccctcaagaggaattggacagatgggaaatgcaaatgaatcaaagggtcggacgccaaattgttgcacatgctcatgctgcaatacatgggcagaatggtcaagctcatccttgccctacatgtcggcaaccgtctccaaagatcggaaacaacaaccacctcttctgttgggcatgccagaagcatttttgtgccctgtgccataaggctgtccaaaagcccgcacagcattatggccccaaaggatgcaagcaacatacggcagatccctgaatgaggttttcccatatgtgcatcaacaccgtggtgccagtgcagtttcgaagtgttctgtgcaagtacagataaatacttgtcctgggacgtacttcactcctggattccattattgttattattttttttgctgcaagcatgttttgaagtttccgtcgtcgttgtacctacagtaacagttgtgcagtttacattcgggaacatgaacaggaactgttcattcattcgttcagtaccagatggattgttgagaatactcgggtgttgaagttgagaatactcgcgtattaaagatgcgattgaacacaagtccaaaaccgatagaaccttgtaaaattctaaaagggaagattatttgttgtactgttggattgatcttatgccaatacaaaggaagctgtcattgtttggttatatggtttcaaattttaacttgg

SEQ ID NO: 24086 - DNA, 1648 bp, Zea Mays
aattatttcaggcttttgttgcagtacagtcttgtgtggttcatttgcagaaagttagtctagctcgaaggttcgcgcttgttcccttgggaccgccactactgacttacaggagcaactgcaaagcgatgttgacagctgatggtgattctgttcgattggtggtggatcggccatataaagctggagagccaataatcatctggtgtgggccccaaacaaactccaggcttgttctgaattatggttttgttgatgaagataatccctttgatcgtgtagcaattgaggcatctttaaatacagaagatcctcaataccaagaaaagagaatggttgctcagaggaatggaaaacttgctatccaaaattttaatgtctatgtaggtaaagagaaacaaactgttgcagaaatgctgccttatttgagactaggttacatatcaaatcctgatgaaatgcagtctatactctcttctgaaggagatacatgtccagttagtccatgtacagagcgagctgtacttgatcaacttgttggttacctggaatctcgattggctggatatccaacaactttggatgaagatgaagctatgttggcagatggcaatttggaaccaaagaaggaagttgctactaggcttgtaaggttggagaagaagatgctccatgcctgtctgcaggccacaaatgagtttataaacgacttgccagaccacacagtgtcaccttgccctgctccatatgcccctgaattgaaatgagattgcatgttttcttttcccagatggtcataccattaagaatgtcaaaatttgatcaatttgcatatctatatgaagaccatatatgctgcaaggtggatatactatttgaaagaatctgctgcttgtttcctttagagattacagatcttaattgcatgctagaaggaaatcgcatttcttgctgttcgttcaagttaataaggatatgattggtctccagcgggatatggctatggtctcgaaagggatgtggtcatgttgtagttagttgcgatgcacagaaggtatcacttttgttaatctagttggtgttgtattaacaacctccttttgctgataatcttgggcaggaatgccaatcaacaatcatgattcatgtacatgattgctgactgatcactttttttttcacgagatggtcagtagttattgttgtagttgtctttaggattacttacagaaaccgaatttgggcagaactggattcaatcggccatgctgctatgccagttttcattctagattgggcactactccttctgaggcattgtatggctacagctatttcgggttggaacttggaagcgaatacaaagtagcgtagagaagtttcttagcattgatttacccgatctgttagaggcttttgaggtgtctaaataggtatttgtaaaaaaattgtggagtcgtcttgtcgtaaagagacatctctagctcgtaactcaagtagtcaagtagtaacagatcacagatgtcttcacttctcttactaatacatcgtctgctatattgattcgatgctttatagacacatttacttctatatttattagtagactatatttatatacactattatataatagagtcctttgggg

SEQ ID NO: 24087 - DNA, 3049 bp, Zea Mays
cttttttgcttgttgataaaagtctattgttcttgtttcagatgtgtcaggtttgctactgaggttgctggtgttcaagaccttggtatgttaggtcgtggcagtggtgaagaaattggaacatatgttgagaaacttatgacaagtgaactatctggaaatgttattgatatctgccctgttggggctcttacatccaagccatttgcatttaaagctaggaactgggaactgaaaggcaccgagaccattgatgttactgatgcagtggggtccaacataagagttgacagcagaggacctgaagttatgcgcattgttccacgcctcaatgaggacattaatgaggaatggatttcggacaaaacacggttttgttatgatggtctgaagaggcaaagactaaatgaccctatgatccgtggtcctgatggcaggtttaaggctgtgacgtggcgtgatgctcttgcagttgttgctgaggttttgcaccaagttaaaccagaagaaataactggagttgctggaaagctttctgatgcagaatccatgatggcactgaaagattttgttaacagaatgggttcagataaggtgctgtgtgagggaaatggtcctaatcctccagcagatctgcgatctaactacctaatgaatacgagcattgctgggcttgaaaaggctgatgtcttccttttggttggcactcagccaagggtggaagctgctatggttaacgccaggattcggaagactgttaaagcaacacaagcaaaggttgggtacattggtcctccagctgactttaactatgaccatgaacatcttggcacaggaccacagacccttgttgagattacagagggtcgtcatcctttctgttcagtactgcaatctgccaagaaccctgtcatcattgctggagctggattatttgaacgggaagaccaagatgccctattctcaatgattgagactgtagccaagaggttcaatgtgactagaccagactggaatggccttaatgtcctgttgctccatgctgcacaggctgcagctcttgatcttgggcttgttgctaatcctgccgagagcatcaagtcagcaaagttcttgtatctgatgggagctgatgatataagcctggacaagcttccagacgatgcatttgttgtttatcagggacaccatggagacaaggctgtctatagggccaacgttatcctgccatcttcagcattcagtgagaaggaaggcacctacgagaatactgaaggatgcacccagtggaccattccagccgttcctacggttggtgatgctagggatgactggaagatcatccgtgctctttctgaggttgctggggctctactgccttacgacagtctctcagctgtgagggaccggatcagtacggtcgcacctaatctagtacatgtagacgagagggagccatccacaatctccgtcgaggtgaagccgcctgtaaagcaaaaggtcagctcgacgccattcaaaactgtggtggagaacttctacatgactgatgcaatcactcgagcttcgaagattatggcccaatgcagtgcgacattgctgaagaagtgagatttgcacccttcgagctaatcttcagcaaacaacttcttagttccctccctttttttttttacttgctacgagtttcgccaccgttgcttgttttcttgggaggttttggtgtataatttggactgcctctagattttcttcagagcagcaaaacctgatcagtacatctccgtgctgtgtatgagaagcagagcatactcaataagcttgttgccccaactgaatcatcatacaagtgacacaaacacatgattttgccttcaaatactcgccccttatgtttgtttgtaatgtgcaacttgccaaaagatagcaatctaaatcattgcttggttaggttgttaaaaggatattgcatggttatgttgttagtgcgattcaggcggttaatagtcttggtattgtgtttcctaacaaaaaattcacagctcttagtttcttaccttgttgcaacatctataaagtctgagagaacttaaattttgttaacgagagtttgacagccgagaccgagaccgctcgcagattacagctagtttcatcgtccagaacttaaccagtggcggcatgctatgtcttgatcttgacatatagtatacgcggtacgcacactgtattgtcgcgtcctcgtcccttggctgccacactgcagaaacgacgacaggtagtggcagcactcagaccgcgccttatccaactgactgacacctcgctcgctctgtcgctcagccctcacccacccagcatggtgctccagctccactgcgccacaccgaccatcaccatctccccgcctcccgcccgccctcgtcactacccccaccacctctacggcgccagcggagcgctccaggccccagctcgcggcctcgggcaccttccccgcctcctcgtcggcgtcagagacccgcgcgccgacggagcggtctgtcacgtgaggaggcaggtgcggtacgacgaggacgacgaggaggatgacgacggcgaggagtggggccacaacgaggacgtcgcgaggatggaacggtacagcgaggacgcccgcgaccaggcgctcctggtgaaggcccgagtggacgacgagggcttctcgtcgagcttgagcgggggaacggccgcggatccggcgaggagcgtcctgccggagagggcgatcatacagtcggtcgacgtggtgaaggggccgtttgaccccaacaacatcgagtacctggagaagggagtgggatgggaggacttcaggagccgcctgcgatagtaacagcactagcacattgtgctgttgttcttttaaggcaattttatctgcttccgactgatcaggccatgcaatggtcgtccaaaaccagaaatgtacagttggtcatcctatcccacaatttcattttgtagcatctgacagattgtccagcctggcaccccacccaataaaagt

SEQ ID NO: 24088 - DNA, 950 bp, Zea Mays
gctgtgtttacaaattacacctgcttgctgttgatcttcgtttcccgtccagccgtttttcgcatccacgtgggccagccggccaggcgaccgccgccaccgccgccctactcctggtcccagctctgctgcacccttcgccggcgacgagcgtccaccgcggcagctcagcttcggtatatatgggaatctgaggagctgcgtcgtgctatggagcctgtggatttgattagaagagtatgtttccgtgcactttgtgaaggaaattgagcaagaagcttatggtgagcatggcatggcgacagatgaagatcctaagcaaactgccgctgttgatttatcaaaacggcttaaggatttgagggcaggcaatgatggcagtagccaaaaagctctcgaagaatggcgtaaacggaagatggagcgtgcaaggcagcgagccatcgaaaagaatgggacttctagtgtgaaaactaaatgaggtgaggagtgtaatgcagcacaagggattttgttttcatgtgtctcggagctgctccatgatgcattcaagtcaatccgtccatcgtaagcgagtgtagctgtgatgacccatgtttttaaagccacaggcagcggtgttcttgtagaaacgtgaagttttaatatttgtgattgtccatgttgccgtgttttttaaccgtcatgtatcagtatcaactttgtttgttcatggaatcatccctgcaaatactttatgcttttgcttgagtcctcatagtgtttggtttgacgagaagggtgaatgggatggggtcatctgtggatttggaaatatgaatatgtatgatatctgtttggttgaatggatgaggcaagttcttttggtttggttagatggatgagagtgaacaaaatgagaataattgactatttgtatctacattatttttttaaaaaataaaaattaa

SEQ ID NO: 24089 - DNA, 3143 bp, Zea Mays
ggccgctgtccgccacctgcttgcccaggcacggcggcacggccgcatagacgcccgactcctgagtaaaagcagtcgagcagggcagctcccatctgacggagttctatcttaattgtactgctagatatgcttggacattagtgccatggctcctcaataccaagctgcgaccttgattgcctctccatcttatccaagtgccattgcttggtcaagcgacaatcttgtggctgttgcatctggtcatattgtaactattctgaatccatctgcgcttgatggaccccgtggattggttggactttgtcgcagtgacccttttcctataggactggttaatagagaagatctcttggagccatgtttattgtccacttccttagcgcgtgagactgaaccatgtgcccgatcgatttcatggtctcaacaaggatttgcacctaactctgggtgtttgctggctgtttgcactatggatggtcatgtgaagctttacaggtcaccaatttgggagctatgtgatgaatgggttgaggtcgcagatatatcacagttgctgtttaactactataaacttataaactttggagaggataatggttctcatttgacttctctgaagaatacaaatactggggagacagaggttttaggatctgcttatgaattgcaagaatctctttatttcaggtgtcctggacagagaaaactaaagcgatcaagagttgatggttttatttatgacgtcaatgaagttgatttagatgcatcaaaggatgcagacttctcgatcgaaccatgttctaaatcaaagaagaaatatttgaaaaagactgtaaaacccaggcatgaagtagttgctgtaaatgaacgaaacaacacaggaaatattaaaggatcattgtcctccaatggagaaaacaaatcccttcctcttatcacggcaaaacagtatgcttgtcgtgctgcacatttgtcttcccttgtagtttcatggtctccagttgtgtcatcaagtgataaaacatcttgtttattgaggcattggtgcattattgctgttggctctaaatccggaaatctttctttttggaaactacctaagccagaatattacacaatagatgctggcgtggttaccagtgatccaatgctcatcggggttttgcaagctcacaaatcatgtgtcagtgtcatagcttggcaagttctttctgcgggctcttcaaaatcctcgttgcttttagctactggatgctcagatggaagtgttaagatatggttagggaatattgaagggttaaatcaatgtgcaagtggagaagtgccatttgcgttagttgctgtggtcgccactgatttatcatctccagtgtcatcaatctcattagccatacctgcccagtctcaacacgaggtcagtttggcaattggaagagtatctgggtcactagaaatatggatatggaatgcatctagcaacaaaattgagattttcagtgcatggcatgcacatgatcaagtggtaacaggtttacaatgggctatggatggctattgtttattcagctgcagtcaggacaattctgcacgttgttggatctctcacgaaaaccaccttgaagaaatttttatgcattcaaattttccagagctaagggagtcagcagacctatcagaactctctgatcgatgctatggtcttacactagcacctggagaacagatgattgctgtggtccgcagtttggatctgaaccttctgaaccagatgtatcaagtcaggacacaaaaggcggtggttgagttcatttggattggtggccaatttgttggtattccactagacaggagcattgatatttgcagttcacagtccacagacttatcctcaagtaatctcatgtggtggggatccaacattttgtggtcgctgaagaaatacgaaaatgtagaaaagaggcttgtgatatgggatgttgtagctgtgctgcaggagttgaagaaatccgcacctgcctttctggagactctagtgcatagttgggtctcagtgttactttcgggcgacccccagtgtgtttctatcgatgctccatcacgttcaatgcatgacatgatgccctatgtcagcacgcggaagctacacttactgaacataatgtgcagaaaagtaatggtcagcattcacacacatcatggtcctggtgctgaaaacggcaatgaggaaacaactgatttctggagcactcttttggtgaggagcgaaacagagctgcgagagaggctggttggcttcacctttgctgcagtcctgaaacggacagcgtatttgttcaatggtacctctactgaaaattgctggtttcctgttggggttgcccagatggattcttgggtaaccatgaattacgacggacaagtgcatgaccagctgcagtctatcagatcaaagatcaaagatttaggaagcaggatcgacggatactctgacgtagaaagctgcccctactgctcttcgccggtccatttcgagtcgcctgacgtagccatctgtggggaaaggcacacactgccgcggtgcagggcgtccatgatcctgtgctccgttgtgcagcctttgtggcactgcgtgtgctgcggaggcacggtcaacaagctgttgccggagtcgttcttcaccatgcaggcgtccaccatgcatgatgaaggatcgctcgatctgtcagcagcctccgtcccactttgccccttctgtggcatcctcctgcagaggtcgatgccggcgttcctgctctccacctcgccggcatagaggctctctgtggatgctagtaggcatccaccaggtgtagcatgcagtagcaatgtagtactagtaaagtttgttctagtcgatgctgcttacactcagttactcttaccaagtatggctggcagagtgtcggttactggtcattttttaggtcccttttgaatgaatacgatgagttcttttgtttggtttcttttggaccctgacggtggcagattaccaggccaagttcagctatctcgaattgtctcattcgattgttgcggacatgcagttctggcagttccaattggttgttgcggacatgcagtcctgtcagttgact

SEQ ID NO: 24090 - DNA, 2220 bp, Zea Mays
cgaaccttccgctcgggaacgggaagttgtctgtcatttgagaatcgagttgtcgagagtcgagacgcacacgctcgtacgcaacttctcaaaaagcagcctgccctgttcattttctctctcctcccgtcggcgaaattttatacgccagcaaaaccgccctgtggaggaaatagagaaaaaaaacccgaatcatacggccagaaatattaaacagacagaaaggaagaggagaatagcggcgaggacgaagtggcccgcccaggaaatggcgtcgatgcagagctggcgcaaggcctacggcgccatcaaggacaccacaaccgttagcctcgccaacctcaactcggacttcaaggatctggatgtggcgatcgtgaaggcgactaatcacgtggagtgcccacccaaggagcgacacctgcgaaaggttgttgcggcgacatccatcgccaggcctagggcggatgtcgcctactgcatccacgcgcttgcccgccgtcttgccaagacccgcaactggattcttgggattgttctgcctgggtgcgcacatatggtttgtttttggaagaaaggttggagtgcttcagagttctgaagtatgatgttgaagctgagcgtttgtccaaacaaggtcaaggtcctgaaaagggtcacagtagaaccagagagttggattcacaggatctgttagagcagctgccagcattgcagcagttactataccgactcgttggatgtcggcctgaaggagctgcaaataataactacctggtgcaatacgctttagctttggtgctaaaagaaagctttaaaatttattgtgcgataaatgatggaattatcaaccttgttgataagttttttgagatgccaagacatgaagcacataaagctcttgaaatatacagaagggctggccaacaggctggaaatctatctgatttctacgagaattgccggggtttagaacttgcgaggaattttcagtttcccactctgagggagccgccacaaacatttcttgcaactatggaggagtatgtgaaggaggctccacgcatggtcccagttcgagaacccctggaacttcctgagaggcttcttcttacatacaaacctgaagaatcggaggacattcctgagcctgcttctgttgaagaggaaaatgcaccagttgaagagcctgttctggtaccacctgttactgaagttgtttcacctcccaagaccgaggtggccgatactggtgacttactgggcttagatgatccaaatcctgctgtatcagctatagaggaaagcaatgctcttgccttggctattgttccaacagatggggcttccacaactggtaacactgcatttcaagataaggggtttgatcctacaggatgggaactcgcccttgttaccgcaccgagcaacacgacttcatctgcgtctgtcggtcaattgggtggtggatttgacaagctcattttggacagcctttatgatgacggggcctacaggcagaggcaacagcaacaggtgtatggttcagcagtgcctaatccattcatgacaaatgatcctttcgtgatgtcaaaccaagttgctcccccaccatcagttcaaatggctgccatgtctcagcagcatcagcagatccccacgatgatgcaaccaaatccttttggaccacctatgcagccacaggtaggcatgggcccagcaacaaacaatccctttctggatgctggattcggggcattcccagtggcgaacaatagccatcagcaacacaacccatttggcagtgcccaacttctgtaggctacgtagttacaagagcaaatttgtgcttcagcagatgcgattttttcggtgattatatcgtgcattgtgctcggccattcttccatgcgatgcgtgtattatgaattggcttcaccacacggggagctatggcttgacccaacccttgttgtaaagaaattagcgacttgtgtaacatcgaatgtatgtcaataaacagtaggcaatgttattataactataaacaaaatagcggtggtatgtaggagttctgtttatttcattgctgtttgattgccggtcttgcatgcacattgattggccatgtgttctaaccccagaactgaagcgttattgtacctatacacatgcatatactacttgcgattggtaattattttacgttgttcacattta

SEQ ID NO: 24091 - DNA, 2053 bp, Zea Mays
tcacgcgggggcggggtgaacaccggagcattttttggtggcggcgttgtcccaaaaaatcgagggaactgcttgaatatcttggcatgcctgtactgagggcaaaaggtgaagcagaagccctttgcgcccagctgaataatgaaggtcatgtaggtgcttgcatcactgcagacagtgatgctttcctcttcggggctaagactgtcgtaaaggtcctcagatcaaattgcaaggaaccttttgagtgctaccacatagcagatattgagtctggtcttggactaaagaggaagcaattggtggccatggcgcttcttattggcagtgaccatgatttgcatggggtgcctggttttggcctggagactgcacttcgttttgtgcagctatttgatgaagatgaaattttagataagttgcatgaaattggtaaaggggtgtatccgttcctcaaaggatttgacaatccacatattgatgatctcccatcatcgtccaagaaaagcccaattaaatcgccgcactgctcacattgtggtcacccgggcagcaagaaaaatcatatcaaggatgggtgcaattattgcttggtggattcattagagaactgcgtggaaagaccagctggattcaaatgtgaatgtcctagttgtgacgaggcacgtgatctaaacgaacaaagacggcatgaaaattggcaaatcaaggtctgcaaaagaatagctgctgagacaaattttcctaacgaggagatcattaaattgtatctaagcgataacaatctggttgaagaaaagggtgttcccttgcttagttggagtaagcctgatgttgaagctttggttgacttattaagttataagcagaattgggaaccatcttatattcgccaaaggatgcttcctatgttatcaaccatatatttaagagaggtggcatcttcttcgtctacaccattgcctctttgtgatcagtatgagtttgattcaattgagcggactaaaataaggcacggtcacccttattacttggtgaaatggaagagagctacccgtggtatgaattctaatatgcctagcaagaagccagtaacggagggagaaacaagtagcgaggtagtggtgttggatgacgatgacaatgaggatacagtggtttgcgagtctccagagttattagatgaacctgatgttccacaagtgcttatggatgatggctgttgctttctattgactgatgaagacattcaacttgttggtgctgcttttcctaaggaaacagcaaggtttcaggaagaacagaggctgaaagaagcaagatcaagatcgcggaaatccaaaacgagcttagcagacagtgggtgcgagacacctaaaggtccgagacctagtggggtgcagcttagcatcacagagttctaccgctcgaagaaagggcaggacatggaatctgggaagaagaagcaggcgggagaggggcacgctgctgcgagggatggctcgagaaaatcctctgacagggacctcaacaacaagagcctgccgaagtccgttcgccgccgcctcctcttcgattgctgaggactagcctggccttctggtgagcactgtaatcttgctgtgccactgttgtaaatgacctagagaacgccttaacctattagccggtgtaggtatccgcggctcattttgtacagggaacagagcatcatctctgtcaagaggaaaaatggagcaggtcttagttcagaacgattatctgaacctcatctttgtattggttttaagtgcttttcgtggaactcactttcaattctagaggaatgggtcgcgtgccgctgctagagtaatcattctgaactaaaaaaaaagcttttttttggttttatgtctgcttttatgcctggacaatagctgacagacttgatgctgtcatgttacattatgcggtagtactactccagatattagagtgctgaatgtaattatagtttcatggacccgttggctcaaccttgtccttcgctgcggcatcatctggcggccatggc

SEQ ID NO: 24092 - DNA, 1115 bp, Zea Mays
aattcagatccatgatgcctttacaaaactatttctgcaagataacttaggcccaacagttgttccaaaaggactcgaagataattactcctgaagctctagctactgttaaggctgctattgcaaatagtgagaaagacaagaaggttgatgcaacaaaaaaggcagtgcctcgaaaggcagctgggcaaagttgggaggaccctaccttggctgattggcctgaaagtgctcaaggatgtgatgagcccaacagattgccacacgtgatttagatgatttccgtttgttctgcggtgatcttggaaatgaagtgaatgatgatgttcttgcaaaggcattctcaaaatatccatccttcaatatggccagggttatacgggacaagtggactggtaaaactaaaggatatggttttgttagttttgctgatgcgtctgatcttacttctgccttgaaagatatgaatggtaaatatgtaggaaatcggccaatcaaattacggaagagcacatggaagaacaggatagacttagaagctttggagaagggaaagacccaaccacagaagaaaatcaaactgcagaaaagaagtgttcttcacaaatgaatctgaaaaattctgctcgttcatcgtctgtcagtatcgtttgggaaagctgtctgaagcattaacagttttacttaacgtcagatgtgtaggactgatggtcaccaagttcccggtgacactgtatacaatcgcagacgcgatgctatgttggtgattgaacaggtgtagccgaatagttggatccaataacttcacctgtagtgtaatggtccaattttatcatgggaactgtagttctaaatactccagtgaccagtgctattgtggtgaattattctgtgatctttattcataaatattcgtgggtgttggcctgtttgaatcataatgctaatggtagctagctaagtgacaagtgctcgtattctgtgattttgttcagaaattatgtataatatataccccctccgtggttgctccaggattcactagtgatactaatagctaattgttattgggctatttggtgaacatgtcactgggaggttggaatcagttaatg

SEQ ID NO: 24093 - DNA, 1862 bp, Zea Mays
caccacgttatccgcacgccccatgcctggtcgcccctgcatttgcgacggacgcgcattcatggtccatcaggaacagcacggcccggcgaaacctcgggtacctgtcgtgcgggacaggcaacccgatcgacgactgctggcgctgcgactcggactggcacagcaaccggcagcggctggccgactgcggcatcgggttcggccgcaacgccatcggcggccgcgacggcaaggtgtacgtggtgacggacccgagcgacgacgatcccgtgaacccgcgcgagggcaccctccggcacgccgtcatccaggaggagccgctgtggatcatcttcaagcgggacatggtgatcacgctgagggaggagctcatcatgaacagcttcaagaccatcgacgggcgcggcgccaacgtgcacatcgccaacggcgcctgcgtcaccatccagtacgtgaccaacgtcatcatccacgggctccacatccacgactgcaggcccacggggaacgccatggtgcgcagctccccgagccactacggctggcgcaccatggccgacggggacggcgtgtccatcttcggttccagccacgtctgggtggaccactgctcgctctccaactgcgccgacggcctcatcgacgccatcatgggatccacggccatcactctgtccaacaactacttcacccaccacaacgaggtgatgctcctgggccacagtgactcctatgtgaaggacaaggcgatgcaggtcacgatagccttcaaccatttcggcgaaggcctcattcagagaatgccaaggtgccggcacggctacttccacgttgtgaacaacgactacacccactgggagatgtacgccattgggggcagcgcggagccaaccatcaacagccagggcaaccgctaccttgctccgacgaacccgttcgccaaggaggtgaccaagagggtggagactgcccagaccgtgtggaagagctggaactggaggtcagagggcgacctgctgctgaacggcgcctacttcaccccgtccggcgcgggcgcctcggccagctactcgcgcgcgtccagcctcggcgccaagtcgtcgtccatggtcggcaccatcacctcggacgccggcgcactgtcgtgccgcaagggcgcggcctgctagcgcggatcgcgctccctctccagcaacaggaaaagaaacaggacaacaggaaactaagccacctcaacaccaccaccaccatggttacagtttcttcttcccttctttttaggggtcgcttttgacaagggttatattatatatatatatgatggtcctccttgatattttcaccatttgctcaacctcccccctgctcccgacatggaaagctacctggagcagcaggcgtgaagcgttgctgattggtcgctcggtctctctattagtcgtctgatctgagtgttgcgtgttgttccctctgcctacaagcaagtggtgtatgttgagggcagggggtgcgtgcgtgcgtgttgtgtgtgatacttactcacttggttgttgtgttgagaaaaaaagggtcagattgttagtagtggtagtactacatgttacgcctggacagactgggatggaatggatgtacaagacatggaggaatacccatgttcttaactcttcttcttcttcagtgaaaaaagctaaaacgttacagtttagctgaatattttgatctcgaagaacagcatgtgctgcttcggaaaggacactagcaccagcacattgatatgcccagttccatatcaagttttttcactatcctcggaagtagtacttgtgtacatgaggagggatcggggatggatctgg

SEQ ID NO: 24094 - DNA, 1552 bp, Zea Mays
aatagtcatgtgcgctcgacgcgtcgcgtgcctctctctccgctccctctgacttgttcgcttgccgtcctcgctcgcggcaaagctgcagcgtgtctcggctccggcgcgccaccgctcgggacgcccgacggatccgctcccgcgtgcgctcgatatcccttgcttcaacggtccaagtcaacccccccaccaaatcgccgtccgtccggccgctgccgcaccctagcaggatcgcagcgtgcacagctcttcttcaatctgcaggattgcagccacgcacaagtcgtagctgggaaaaaagataaaagtttcatcctctcaggctaagaataggctttttattgggaatgtaccccatgattggacacctgatgatttcaaaaccgcagtggaagaagttggtcctggagttttaaaagttgatctcatgaaggcaccaggctcaggtcgcaataagggttatggctttattgaatactacaaccaggcatgtgcagagtatgctaagcagaagatgtctactccagaattcaaactagatacaaatgctcctactgtcagctgggcagatcataagaatgctagtgaagctacatctacttcacaggttaaatctctatatgtcaaaaacctccccaagactgttactcaagagcagctgaaaaagctgtttgagcatgttggagaaatcacaaaagttgttattccacctgcaaaatctgggcatgaaaatcggtacggttttgttcattttaaggaacggtccatggttatgaaggctctgaagaacactgagagatatgaacttgatggtcagctgctggattgttcacctgcgaaacctcctgctgataagaaggatgatactggatcatctcctactgcaaaaggacgtccattacccccaagttatgccccacttggatatggactagcgggagcttataatccacttggaaaaggactggcaggtgcttacaattcccctggaaacggactggcaggtgcttatggcgtgctttctgctcatgccgcacagccaatgttgtatgctccaggtgcttctccaggttcaacaatgatcccaatggtcctaccagacggccgtcttgtatacgtaccacagactgcagggcagcagcctctgcatgtgacttcgcctctgcctcagcaaggcggtcgtcgattcggcggcggtggcggatccagctccggcggaaagcgacagaggggagatgaccgtggcagtaacagcaacagtagccgcaggggctggcaccgtccgtattgatgtttgcaatgccgctgatttgcaattagaagttagaacccagcaattagcatatttatcgcagtaccatgctggaaactgtactttgaattatttgtttttcctgtgtgcttcgtagcaggcctgccctaaaaagaacgatagtaccggaaggggcaaatgtagtggtaatatactctatacatttgtaaccatctccatcctgccgttgaccgtcttaggttattaaaataaatatatttcttccgttctttttta

SEQ ID NO: 24095 - DNA, 1548 bp, Zea Mays
ctggtccgttctcggtctccgccccggggacgtcgtcctcgtagtctccccgtcccgcatcgacgtccccgtcatagacttcgcgctcatgtccatcggcgctgtcgtctcgcctgccaacccggcgtccaccgccgaggagtacacgcacatggtcgcgctctccagaccggtcgtcgcgctcgcggctcccgaggtggccgctaagcttccgaggaacctcaggtgcgttgtcatcggctcgaatgagtacaagagcctctcctccgccggcggcgtagcgccgtccccgccggtggcggtgaagcagtccgacacggcggccgtactgtactcgtcgggcaccacgggccgggtcaaggccgccgcggtctcgcaccgcaacctcatcgcggtgatcagcgcgcacaggaacaaccgggttatagcggagaaggaggctgccgaggccggcgaggagccgctcccgcctacggtgacgctgttccccctcccactcttccacgtattcgggttcatgatgctgctgaggtcggtggccatgggggagactgccgtcctcatggaccgattcgacttcatcgcagcgctgcgcgccattgagcggtaccgcgtcacgctgctgcccgcggcgcccccggtgctggtggccatgatcaagtccgaggaggcgcgccgctgcgacctctcctccctcctcttcatcggcatcggcggtgcgcccctcggccgcgaggtcgccgagcgcttcgccgccatcttccccaacatagaactcattcagggctacggtctgacggagacatctggttcggtggcttcgacggtcgggccagatgaatgcaaagcgtacggttcggtcgggaagctggcatcgcacttggaggcaaagatcgtcgatccctccaccggcgaggtgcttgggccagggcagcgcggcgagctctgggtccgaggaccagtcgtcatgaaaggttatgtcggtgacgacgaggctactgcagcaacagtggattcagaaggctggttgaaaaccggtgacctatgctacttcaacgaggatgggttactctacattgttgatcggttgaaagagttgataaagtacaagggatatcagttatccagacgaagacgccgggcaactcccaatggcttttatagtgaggaaaccagggtcaaaccttaccgagcaacaagtcatggatttcgtggctaaacaggtcgcaccctacaagaaagttcgtcgagtggcctttgtttctgcaattcccaaatcgcctgctgggaagatcttgcggcgggagcttgtagagcaggccgtgtccatgggtacctccaagctttgaagtttgaagtttatactgacgtcgaaatctagaaggaaattcttttttccccgaaaagatggcagttatgctagctagaatggcatttttttacggaaacggaggctattatataattgacccgaatattatggacaaaaactattgtattattaagattctcgtgcacttaaattaagtcataaaaatttctttataa

SEQ ID NO: 24096 - DNA, 87 bp, Zea Mays
ggcgggagtaagtattgtctagttattgtggatgactattttcacttcacttgggtattctttttacaggaaaaatctcaaacccaa

SEQ ID NO: 24097 - DNA, 6433 bp, Zea Mays
gcgaaaaggcgagagccggagagagagagacatacagagagaggggaaaaaacttatctgcccttcctaatcgcccttacccccttgtgttagataaccacccctctcccttgcgcgccgccgccgccgccgccgcgcctccccgccgggagcccgtctccggcgatcgccgccgtctagcccccctcctgtccccgccttcgatccgaatcctagacgaaaaatcgtggaaaataccgcaaaaaatcgcggaaattcgcccggttctgtttgaataaatcgcacgggcgttgcgccccgcccctctcgctcccctcccgccgccagccccgcggccgccggcgacggcgatcgcgcagacaaataggcgcccgcgtcgagccagaaaaacccgcctcgtgccggtccgagcattcgtctctgtcgtggggactgagcacccgttgcctgtccccgcccgcctgcccgccgcctcctgctcctctcgtcggccgcggcacaaggagtgatactgagcctgtgagaggtattccatataatgccataatctgggatggcattcttcagcaactccgggagcaaggctgattcaggagggtacaacctgaatgaaaaggccgaagatgagggcatctacgagtcagttcaggatgggaatgttgacctgagttctaggcagtggaacttaaatgagaaagcagatgatgcttaccattgtgaagcagagcaatatgaggcgggccagtcaggtttgtactcttctgagaaggcatcagggcagcatatccagaaaggaggcagatcttctggtggtccatggggcacaaattttctgaaggattccaggtccaaacagatggccgaggatgttccatcgaatagtggtagaggaatgaatgctgctagcttgcatgatggcttggatgatagtggagaggatgatgagctgaacagggcaaatggtgaggtgcctgctgaggaaatgctctccgatgactattatgagcaggacggagaggagcagattgaatcgttgcatcgtggcgggacgaagcaatcaagctgttccacttctgaagacgaccccgctgatgtggattttgagccagacagcgaaacggacaaagctactgataaggataagtttatggatagtgagaattctgatggcgacgatgatgatggccttgaactctcagatgatgatgatgactttgttgagaaccggaggcaacctaaacgacttaagattgtagcaactaaaacttccaagggaaggaagttgcccatgccagctcaacgaaaacgaggggtgtctcacagcgatgaagaatattcttcaggaaaagattcagatcttcccagtgatgctgatttcaaacacagatcgaaaagacctgacaggttgcatcagaaatctgtgggccgcagtgatgttgccccaatcaattctcataatgagcttcgaacttctggaaggaggacagtgaaaaagatctcatatgttgaaagcgaagaaagtgatgatagcgaggagaagtcaactaaacaacaaaagctcatgaaggaggagctggaagaggaagacggagaaacaattgaaaaagttctttggcatcaacccaagggtgtagctgaagaagcaataaagaatcaccaatcagctcaacctactgttgtcagcctaacatcggactttgatcaacagtgggatgaattagagttctatataaaatggaaaggccagtcttacctgcattgtcaatggaagacattatcagagcttcaaagtgttagtggattcaagaaggtaataaattacacgaaaagagttgctgaggaacagaggtacaagagggcactatcacgtgaagaggttgaggtgcatgatgtgggcaaggagatggagctggatcttattaaacaatatagtcaggttgaacggatatttgctgatagggtcagcaaagctgatggagatgatctggttcctgaatatttagtcaaatggcaaggacttccttatgcagaatctacctgggaaaaagatacagatatcgattttgctcaagatgcaattgatgaatataaggctcgtgaagctgccacatctatacttgggaaaacagtagatttccaacgaaagaaaagcaaagctagtttgaggaggcttgatgatcagccagaatggctaaaagctggtaagcttcgtgattatcagctggaaggactaaactttctcgtgaatgggtggagaaatgatactaatgttatacttgctgatgaaatgggtctggggaaaactatccaatctgtttccatgcttggcttccttcataatgctcaagaaatcaatggtccatttcttgtagttgtgccactgtcaacattgtcgaactgggcaaaagaatttcggaagtggctgcccaacatgaatgttgtcatttatgttggcaaccgtgccagcagagagatgtgccagaagcatgagtttttttcagacaagaagggtgggcgtcatgtaaaattccatacgttgataactacatatgaggtgattctcaaggacaaagcggttctttccaagatcaaatggaactatcttatggttgatgaagcccaccggttgaaaaattgtgaagcatcactatatactacccttttggaattcagcactaagaataagctgcttatcactggaacacctttgcagaacagtgtggaagagctttgggcattacttcatttccttgatccagttaaattcaacagcaaggatagttttgttgaaagatacaaaaatttgagttccttcaatgaaaccgagcttgcgaatctgcataaggaattgaggcctcatattctaaggcgggttataaaagatgtcgagaagtctttacctcctaaaattgaacggattctacgtgtcgagatgtcaccccttcagaaacaatactacaagtggattttagagcggaatttccagaatctaaataaaggagtccgtgggaatcaggtatcacttttgaacattgttgttgaattgaagaaatgctgcaaccatccatttttgtttgaaagtgccgatcacggttatggtggagatagcattggcgatcggaataaagttgaacggattgttatgagtagtggtaaacttgtcttgttggacaaactattggtgagactacgggagactaaccatcgtgtgcttatattctcacagatggttaagatgttggacatccttgcagaatatctctcccttcggggatttcagtttcagaggcttgatggtagtacaagagcagatcttcgtcatcaagccatggaacattttaatgctcctggaagtgatgacttctgttttcttttatccacacgtgccggaggacttggtattaatcttgcaactgcagatacagtgataatttttgattcagattggaatccacaaaatgatctgcaggccatgagtagggcacataggattggccaacaggaaactgttaatatctaccgcttcgtcacatgcaaaagtgttgaagaggatattttggaacgcgcaaagaaaaagatggttcttgatcacttggttattcagaagctaaatgctgagggcaggcttgagaagaaagaatccaaaaagggtggctccatatttgacaagaatgaactttcggctatcttgaggtttggagcagaggaattgttcaaagaagacaagactgatgaagaggccaagagaaaccttgaaagtttggacattgatgaaattcttgagagagcagagaaagtcgagacaaagggtggtgaaggggaggaaggaaatgagcttcttagtgctttcaaggtcgcaaacttttccagtggcgaggatgatgcaacattctggagtaggctaatacagccagatcctgcagatattattcaggaaactttggcgcctcgtgctgcacgtaataaaaagagttatgttgaagatccccagtttgacaaaaataataacaggaaaagacgtgcagttgaagcacaagaaaagccaaggaggcgttctggcagaacagtggaaacagttaattcagtaccattggttgatggagcagtagctcaagtacgagagtggtcttttggtaatattccaaagaaggatgcttctcgttttgtacgagcggttaaaaaatttgggaatgcaacccagattgacttaattgtggatgatgttggtggtgtactagagaaggcaccacatgaagcacaaatagagctatttgatttgttgattgatggttgtcagaaaagctgttaaagagaatacagatatcaagggcacagttttggattttttcggtgtagctgtgaaggcctatgaattgctagctcgtgttgaagagcttcagttgttgtcaaagcgcattgcacgatacaaagatccaatcaagcaataccgcatccaactaccttataaaaagcctcagtggtcagcaagctgtggatggactgaaactgatgatgctagattgatggttggaattcattggtatggctacgggaattgggagaaaatacgtttggatccaaagcttggcctgacaacaaaaattgcaccagcaacacttggtgagagagagacatttttaccacgtgctccaaacttggataaccgtgctagcgctctcctgcaaaaggaatatgctaagtttagcggtaatagctcaaaagtcaaaggaaatgcccgccagacagtcaataacgacagtaatagtggagctcgatcaatgagaggccgacaaaaggatgcaccagataaagaggataataagccgaacaaagatgacattcagaagcgcaaggtaatgatggaagctgaagcaagagaagaaggtgaaatttctgaatcagaggcagagacaaagtatcgtctggacaaagaggagaagtggctcgaatggtgctctgaagttttaaatgaggaacaggaaactttgaagcgcctggacaggctgcagaatacaagtgtaaacctcccaaaggaaaaggttctttcaagaatccgcaagtatctcctgataattggggacaaaattggtgaagttgtccggcaacacagtgaatcttataggcaatcccgtaagtgtagccgcacctcccgcatgaccatgaggttatggaattatgttgccaccttttcaaacatgtctggggagcaattgcatgatctctatttgaaacttagtcaagaccaactggaaggtggagttggcccatctcatggtgccaatttcacatccattccttccagcaagggaggtaactcaaatcaacttcatcctacaagaaaccataggccaaccaggtctctccagtacaattctgagtctttgcacaataatgagagctctggaagttctgaagcctggaagcgtcgacggagagcagaccctgataatcagtttgacacccagcctttgtatcaacctccaattatgacaaatggaaataggttgcaggaatctagtagttctgcaggaattcttggttggggtccagttgaaatgagacggtatggtaatgaaaggccaaagcgtggtgttcatcctagtcattttcctactgggcatggacctttgttgtagctgaaggaattagatgactcgaacaaccttgtccactttggcataactgttcccagtgaatttcagcttccatatagttacaaatggtggaactctgtcggaattgaaattcttttttccataacaagaaggaataaaaagcaagacctgacctggagcgcagtttgaatactgtccctcaaaggtaatgccaggactccagaggcgacgcagggatttgttaacagctacactgaatatccttctgacaacatcacagtaaaacgaatacatggtggcttgtcaactgccaagaggattaatcgaggaaattttgtcgattcagttttgtgatccaatagaaaagttgggggtcattaggaaaaagttcatctcaacaatgatctatagttcactctatacatgtattatgttttacattgcaatataatgaaatatggttcagttattcccactcagtgtgttttgtgcccttctgtattgatgtaatagatcaaagaaatgcatgttctcgttttttttttttttttttagaaaaccgcaggagaactgcgcatcttatatattagagaggaaaaaagacattacaaaagaggagaagttgcagagcaactctcccacctaataaagaagttgcagctgggggggcatagtatgtgttagtttcaatttctctaaatagaggaaatatatattttgttcacgcgatggaatcggtagatacttgaattgattccatagtatttttttcctgaggtgatgtgagaatgaggtgtgtggttatatgtatttcaaat

SEQ ID NO: 24098 - DNA, 4353 bp, Zea Mays
atcggtccgcagctcacgccacgccctagtttttcgaaatcctccgagcgggcgccgggcgctgctcgctctcaagtctcacccgttcgccattccgctcgtctctctctctcttcctcccccgccctctctcccccctcgagggggcgatcgaccccaagcctagctaagctcgccgcatcctaaatccccaaaccacgtgcagctcgccgttgtatgtcgcagagcgtggctaatccggctcgatccgccggtttgagggttccgatggagaccacagaggcggcggccgcgcatccgcagaaggacagtgtgaaggtggccgttaacataaggccgctcatcacggtggagctgcaggatggctgcacggattgcgtcacagtcacgcaaggcgaacctcaggttcaaattgggccccatgtcttcacttttgatcacgtctatggcagctcgggcccttcatcatcattaatatttgagcaatgcgtgcaccccttgatcgatgcattgttcagcggatacaatgccactgttctagcatatggccagaccggttctggcaagacatacacaatgggtactaactatagcggtgaagagaactgcggtgggataattcctcaagttatggatacaatatttagaaaagttgacacctcaaaggatggctcagagtttttaattagagtatcttttattgagatattcaaggaagatgtttttgatttgctcgatgcaaatcaagctgctgtaagacttgatgcaggttctatggcaaaagcatcagcccctggcagagtgccaattcaaatccgagagactgcaactggaggcataatccttgctggtgtcacagaggctgaggtgaagtcaaaagaagaaatggcatcatatttgacacgtgggtcgtcgtcgcgtgcaacagcaagcacaaacatgaatatgcagtcgagtcgctctcatgccatctttacaatatgtgttgaacaaaagagaacatctggtacatccgacaagtcagccagcagtgactatgatatactatcatcaaagtttcacctagttgatcttgctggttctgaaagggctaaacgtactggagcagatggacataggcttaaagaagggatacacataaataaaggccttctagctcttggcaatgttataagtgcattaggtgacgaaaagaaaaggaaagaaggggcatttgtaccataccgggatagcaaattaacccgtcttctacaggattctctaggaggaaacagcaaaacagttatgattgcatgcattagccctgctgatataaatgcagaagaaaccataaacacactcaaatatgccaatcgcgcacgcaacattcaaaacaaagcagtggtaaaccgtgatccagctacagcagagatgcaaaaattgaggagccagctggagcagctgcaaactgaacttttgttttctcgcagtgggagtgcagcgttagaagaacttcagttgctgcagaaaaaggtctctcttcttgagctaaagacttctgagcttaacaatgaacttaaggagaaggaattgtcatgtgagcagttggcagagcgggcacaggctgctcagttggaaagggatcagttgatgctgaagattgaatccgtgaggaatggaaaatcgttggatgatattgaaaatattgataacgaccaagacatggaccttttgaagggctacatatcaaaaatacagcagttggagagtgcgctgatgcgtcaaaacttctccaatgcttgcagacatggcttacatgaccagcttgccatggaccaggacatttttctaaatgaattgggttctggatgtgaagtagaaacaactgatgcttcaaatgaagttgatgaagaagaaaaggagagggaacattcattcatgcaagaccaacttgataaagagctgcaggaactagataaacgacttcagcaaaaggaggcagagatgaaacaatttgccaagagtgatacttctgttctcaagcaacattatgaaaagaagttaactgacttggagcaagaaaagaaagctcttcagaaagaaatagagaatcttcgccatgcattaaccaacatatcttcttctatggatgataatgctcaaaaagttaaagaaaactatcttcagaagctgaatgcacttgagtcccaggtccatgagctcaagaaaaagcaggaagctcaacaacagcttctaaggcagaaacagaggagtgatgaggcagcaaagcgcttacaagaagatattcagcgtataaaatctcagaaggttcaacttcaacaaaagatcaagcaagagtctgaacagtttaggtcttggaaggctgcccgtgaaaaggaagtacttcagctcaagaaggaagggagacgaaatgaatatgagatgcacaagctcttggccttaaatcagaggcagaagatggtcttacagaggaaaactgaggaagcagctgctgctacaaaaagattgaaggagttgctggaagcaaagaagtcatcacgtgaaacatatggcagtgcaaatggttcggggatgcaggccttaatacgagctattgacgatgaactagaagtcactgtaagagcacacgaattacgctcatattacgagcgacaaatgcaagagagagcagcaatatccaaggaaatagcaaaactaaaggaggaatcaaagcacaagatcagtgattgtcctcaagctatgtcacctagtgctagaagttctaggatatcagcattagagaatatgttgtcctcctcatctagtgctatggtatctatggcttctcaactgtcagaagcagaggagcgggagcgtgtattcaatggtaaaggtagatggtaccatgtcaggtccctcccagaggcaaagaatataatgaattaccttttccagttagcatcatctgcaaggtggttgtgcttaatggtggaattaggcagttggaaacacaagtgagggatctaaggagccaaaatacacagcttttcactgcattgaacaatgcaaagaaatctgctaggtcgaatggcactggatttgctgggcgtaagagtgttcgatcttcccagcattttggttatagtaaggacaacttcaattgggtggatgatatggacatttcagacagtgagcactcggatgagttagagaatatgagtgatggatccgattcagactgggtacagtcgacgaggaaagccaaaaaacaccagagaagagtgtctagccattcaaatcctaacctggattgtcaaaatacacaaggcagtgcagaaccagagaagccctcagatgaaaagtgcattttgcccaaatacatttcatcagacggctgttcatgctcaaaatcctcctcatgcaagaccaacaaatgcgagtgcagagggtcaggtgcacaatgcggtgcaggctgtggttgtaaggattccaaatgttctaacagggattcttctactatagaaaaagccaatcagggagccatgcttcttcagaccgcgttttctgagaaggaagcccaagatgcaaagccaagaaagcctttgactaacattggtaataatgtggttaaccaaactgccgagacaaagaagcccaggaaaaaccggcgcaagtcggcaattcaactcgtcccaggacctctcctgccgtccgagccagtggccaccgaagctgcccctcgggacattgccaacattcccctcaagctaccgagagccatgtcctcggtgactcctgcggagagcaaccctcccctcacagaccgcaatgctgccaaacccgacgaatcagtgagcaccggcagcaagaatagcaccggagctgcagccacgagagcaccgtctcagctgagaaaaaacgcaaccaccgagaaggagaaccagttgcgataatccgattgctgacatgcagtatccgtgactccgtgtcgcttaagccttctgtttaacagtgggggaggctgcctcggcgtcctttggagaggcaggtagactctggaagggctggcgctctcgggttcctgtgggaaatggcgtgttctgtggaaagccttagctctgctttggctggaatgcgaccttcttgtataatggaaaagtaacatgctggattaagctatgtcagtctcgtaaatggtctccgttcattttgaacatactgaggaaatcaatctgcgcatctgtatgcttagactggtacactgcaggatgcacatttcctccacagttcgacagcataacagatgcaatcgtatatatcgttgcaaccaagtggtgttcttttgagattataatatatcttgaaaaagtcaaa

SEQ ID NO: 24099 - DNA, 807 bp, Zea Mays
aaccaagataaaaaaatccacgcttttagttgtttttctccaaggttgacattgctgctggaggctggcattcaactgcactaactatagatggagaggtgtatgcttgggggagaggagagcacgggaggcttggatttggagatgataagagtagtcacatggtgcccctaaaggttgagcttctagctggagaggatattgttcaggtatcatgtggaggaacacattcagttgcgctagctcgagatggccgaatgttttcttacgggaggggcgaccatggccgtctaggctacggcaggaaggtgacgacgggccaccccatggaattgcccatcaacctgccgccgctcagcagcagccgcgacggtcggtggcaggcgaaatacgtggcttgtggcgggcggcacaccctcgctattgcggagtggacagaggccactgattgatcaccgtttgtggaataagcacaaggccggtgccaacgggcgtaggtggggctgcagtcgatggcgctgccggccgccgcggtcggtacttaccagaagtagttcagtaccgactgccattgccatgtgtcgtcttttaattagttgatgtccaataaattcataagttttttttaaaaaagtctaagtaatctgaaaaggtatttatgaattatgtaacttttttacttttttggtattatggtattttttatgtttatatgagttaatgtaaaattttatttatgattttataaattacatactgtgtatttatattcatgaactatataccttttttttattttggttactt

SEQ ID NO: 24100 - DNA, 1459 bp, Zea Mays
ggatgcccctgccgcgcccggccacaactgcggacgcccccaccgtggacgcccccgccctcgaccccggccgcccctaccgcatccggccgcccccgccgcggacacccccgccaacaagtacgccaggtgccatttcccggcgcatgattgccctgcactagctgtggcctgtgggggagtgggcacgtgaacgcgcaacgcatgaaggctggagatgtgagcctgtaataaagcggtctctatgtacgtgcctatcgctggggcctggggagctggaggctggagctagatcggcatgcaggcgaagtcgttctcacgctagtggcgttgctgggctcaactacgacaacaagatttctgtcaccttttctgcctgtcgcaatgagctaactttgcactgggatatatgagaaatctgtgggttcctccttccagcttgtgtttgcaccgattgatgagcattttccggatgatgctccattgatttcctctagctttcgtgtcataccacttgatatgaaaacagatggtgtatcctctggtaggacactagatttggcatctagtcttgatgtgggttctgctgcaccccaagcctcaggggatgcatctccagatgactgtaatttgagatatgtgctgacaatcgcctttcaattcccttatgagacgcaccttcaggacagtgttgctactatggcccatcaatatgtgtgtagtgttgtttctgctgtgcaaagggtgtcaatggctatatctccctccaaatctggtctaaatgatgggcaaaggatgctttccggcttccctgaagctgccacacttgctagatgggtttgccagagttatcactaccatctaggtgtggaaaccctcttcgctagtggaggtatcgaccatcactcgtcactgtaacacgatagtgatcgacgatcgtgagcttccatgttatgtgttctgatacttgagacttttattatgactatgtatgagatattgtctcttattagtactggatgagatgtgtcttattatgactatggatgagacttttgtgatgtaattgatgagactatggatttaaatattgttatgtgattgtgtgtgagatgttttatgtgaaaatatgttgtgctatatagctgttgatatatttgttatgttgtggaatgtggtgtaaaataaaaataaacaacatttgtaatgctggtcaaattaacttcctagaggcttattaagtcgtaggaagttagccagctaacttcctaggggctacagtaagctgtaggaagttatccagctaacttcctaggggctacaataagtcgtaggaagttagccagctaacttcctagggtctacagtcagccgtaggaagttagtcgtaggaagttagtcagctgacggcgctgacggcgtgaagctactaacttccgagaatctactaaattccgag

SEQ ID NO: 24101 - DNA, 1746 bp, Zea Mays
gatccgctgtgtccccagctgtccaaagtcccactcccagcttccctccccctaaaaaactctcacacatcaccgcgagagaggaggctgagccgcggaggagcagcggcgcatcgcaacactaaccaaaggtgccgagccagggtgactgttccgaggagcgtggcgtggacccatggggaagaagggcaagtggttcggcgccgtcaagaaggtcttcagccccgaatccaaggagaagaaagaggagaggctaaggaggaaatcagcagctagcaacccagcaccggtagatctgaccccatctacctccctggaagtcaatgtttcggtgccaccccctccggctcctcctccagttcctcgccagaccgacgaggtcagggtccccgaagccgagcaggagcagagcaagcatgtcaccctggaggaggcccctgctgctgctgctgccccagcacaggcgtcggtgctgccacctggtgcgccaaccgaagagctcgccgcaatcaagatccagaccgccttccgaggttacctggcaaggagggcactaagagcactacgaggccttgtacgattgaagtcattggttgagggtaattcagttaagcgtcaatctgcaagcactctgcgctgtatgcaaactctatcgcgggtgcagtcacaaatacgatctaggagagcaaagatgtccgaggagaaccaggccctccaacgccagctcctacttaaacaggaactggagaatttcagaatgggtgagaactgggacgacagcactcaatccaaggagcaaatcgaggcaagcctaataagcaggcaagaggcagcgataagaagagaaagagctcttgcatatgcattttcacatcagtggaagagcacatcaagatctgcgaacccaatgtttgtagacccaaataacttgcagtggggctggagctggttggagcgctggatggcagcaaaaccttgggagggacgcaatgggaccgacaaggagagcaacattgatcgcggctccgtcaagaatatgagcttgaaccttggagttggagagggtgagatcacaaaagctttcaaccgccgggactcaaagccagagaagccatcaccaccgactccaaaaccggcccgtccagcttccaggcaatccccttcgacgccctctgctagagtggccccaatacctgcgaggaggaaatccagcacgccaaagaatgggctttcacaggtggacgatgacgtgaggagcgtgctcagtgtgcagtctgagcgaccaaggaggcacagcatagccacgacgtcgaccatgcgggacgatgagagcctcgcgagctccccgtcgctcccgagctacatggttcccacagaatctgcgagggccaaatctcgcacagcaacggccaatggcgcagagacgcctgagaaaggaggctctgctggaccagtcaagaagaggttgtctttccaaggtggagctgcggctgcctcaccgatgcgacggcattctggccctcccaaggtggagagcgctgtgaaggacattgctgcgccaccacagcctgaggccttggtagccaatggtggtggaagcaagtgacttgtattgacaagttccaggatgggggagcgggttatggtcttatggagggacatgtttcatccgtgaacagaagttaagagtggtgccggatctacgaatgcgcgcaaggtttaaacgatggtgggagactcttggac

SEQ ID NO: 24102 - DNA, 1339 bp, Zea Mays
ccaagagcccagggttacttcagattgggccaaaaaatcacatatcgcgccgacttatctgtcctcatgtctaaaccaaggcctaggactcttggagattctacttcttaagcaacccatacaagataattgcctagtactcaagactttggaaatttgccgattgtacgaactggagaatgttagtacaatcatcatgaagattgctggcatttatcgttggaagcatggacgaaaaggaactggtgtatactggttccagcaagctcgtgataaagtttgtcttgatagaattgctcaacagttattcgaacacattgggaagtcagtgacagacgatagttttaagcaatgggaagggctgctcgagctccttggttctgacattggtagtgcaggcggtcttgagttccttcacaggtaccgggatttcaagaggtctctgcaacaagctctagacagaaggtgtggtgaggctgctcgacaaactgtggattttttaatacagcttatgaaaaacccatccacacctcaacgtttctggctaccccttctacatgattcggtggagctacttaatagcaaactcagccctcttatggatgttgctgagacgacattgttgctcaacaagctgcaagagctgtcaatggccaagctgcgccctgatttttccagtaatcacctaccaagccatgcgatgagctctgtgagattggctctggcatcaaatctggcacgtgccgttcttgaagaccgtagtccaagcacactttagcacaggagtatgacgtccagtttgctggtggattgtgaccatgtttgcttggggcctcctgacaattcaaatgatcgggtttgagaaagattgaccatgtaacatacattgtactctgcttgcttgcttagtgcatttgtgtcgcgaatgcatgcatcatgctgagcgctgtggtttgaaggaaagaaataaaggatcgacatgttgcttgaaaacatctcttcacgggagcgttttcttgaaaaagaatataacaaaatggcctgaccagtcgattgcttttctccgtttgcaaacagtataagagcaacttcaagaggctctctatattatttctaatatatataaatatatatttaaaaaaaatacttttcaacaacttatctaaatatagccatattctattctggatttctcctagtcaaatatatagaatgtgaatgtgtctctagagtgtacacaagatatagaaacacggttagagattaaaaaaatatagaaaatggtttttatgtaaatgattctaaatgataatttatagtatgtttggtttaaagaatg

SEQ ID NO: 24103 - DNA, 723 bp, Zea Mays
atctctctccagctccagcatgcacctcaaacaaatctgggtggcatgaattcattgctccaaattgaaacatccccaacatttcctcttgtatccaaggtctcaactataatcttgggaatggatgtgtcccatggttctcttggacattgtgaggtaccatctattgttgttagcttctgtccgcacccaatcacctaaaatggaaatgattgactcattgtttaagccacgagaagctaaagatgatggtctgatcagggagtgtctgattgacttctacaccagttctgggaagagaaagcctgaccaagtcatcatcttcagaaattccttctgtctcaaatggagacaatgacgagtggtcagaagtacagattttaaaactatgacttacgttcatcatcttaagtctatgctcctctctgtgcttgacctctcaagtacagattttaaagcctcatctgcttcagtttattgttcttgttctcagattttgatatgagaatatagctcagagttcaagtactgatcataatgttgaagaactgttggcgtaatgaagctcatttttaagagcagtaattttggatcacgtgttctgacgaatctgttagctgattgttgatgcttttattctgtaacctatggccataactcaagaacttatgcatgaatttatccatcccaattatgatttccgagcattcattttctgtttat

SEQ ID NO: 24104 - DNA, 1654 bp, Zea Mays
cgagaccaacgggcaacggcggacgagaaaccgccattcggatagcacgggcgcacctgccgaccggcgaaacccagccgcatactcgcgcccattctcgccgcgcacgatgctccgtctccccaccctcaccgcccttaaaccctcaacccccgccatcagcttgaaccgtgtcggctgcagccatggccgccgccgccgcaagctcatctttgtctcatccgctcctccgccgtcttcttcgtcttcacggcctccgaagccgacgtcgaacccggaaccaccaaagcccacacatgaggcccgcaaccggaacccggatggatccaccgaggcagggttccccacaaccaagccccggaagccacgccgtgggcgccgcagcgagtcggcggccgtggaggacttcgtccgcaaccgccttgagcaggtctttgcctccatccaggagcgcaaccccgacgtcctcgagggcaaaggcgacatcctgaagccgaaggccgatgtggagcgattaccagacgacgagggagagggagaaggaggagaacagaagcccgtggtggaagaggaggacccgagctggccgctggatgccgatgtcggatgggggatccgggcctcagagtacttcgacaagcactcgatcagaaatgtcacagtggacggggtggagatcgattgggaaggggacgtcgacgaggggtgggtcaaggaaatcaattgcttggagtgggagagcttcgcattccaccccagccccttagtcgtcctagtcttcgagcggtacaacagggctgctgacaattggaagtttcttcaagaattggaaaaggctgctaaggtgtactggaatgctaaagatcgcttacctcctcggacagtcaaagttgatataaatattgagagggatttggcatatgcacttcaagcaagagaatgtccacaattattgttccttaggggaaacaagatcttatatagagaaaaagagataaggactgcagatgagctggttcaaatgattgcccatttctactacaatgcaaagaggccatcttgcgttaatcctgaggccgttgcttctttctagttcttgtatagaattgttgacatagtgttttcatcctcaaccggtgtgttggtgctagtttttgactggaagaagaagctcccttattcaatcattttccaggacatggtgctcggatagtttggaattgatatgactaaacgaaaaccaagaaaaacatctcaatgctggttgggaaagtgtgaactaaatcatgtatcattctgattagtagtgtagtgtaacaaaatacaactttcaggggagagtgcttagatcatttttatcggttagctatattagatgatttcaaagttgactgcaaactttgtcatggagcaaaacttatttcggttccctcttatagtgagaggaaaatatattttggtgtaggttgaacgcgtactcttgtggtgttttaactcttttcccgtgctagaaactgggactacattcggatgaagaactggttaattcgtgtcggtctgttttctgttttttttttgctattttagggtgtttatttggtttgctgttccaagttacgtcaaatgctaattttgtttattttctaagctgaat

SEQ ID NO: 24105 - DNA, 1104 bp, Zea Mays
ggaatctctatttgttttgacattgtgtgcttagtaagggtttgtttttccctcctagattatataagttggattatggtggaagggtagaaaggtaaaatatcactttatgaccccaaataaactggaataagctagtattgagtagcttatttcagcttatttgtgatcataaagtgatattttagcctcctgtccttccaccataatctagcttatataatttaggagtgaaacaaacatggcctaattgtgagctgggacaaataaatgtttgtaggttttgcggttctagccagccttctagacatatgaatcttttgttgtgttcagcgtttttcccgtatggagcttaccttttttccttacagaatgtttgctcgaaattttgcagtggggtgattgggtttctgttatgcgccaaggatggcccaccggtcaactttctgactcctgtaaatccaattgaagaagtggaaggagctactaaagcgggaagggagatcaggttttataattcagagatgcatatggcagcgtttgttcttccgacatttgccaagagggagctagaagcatactgtgcttccacggaaacggagcaggcggaggaagtagcggccacggcaccacaaaagctaactgcggcgcccaagcgtggaattaccaccgcatcctagctgttggatacacacatagccatgtactattattatcacgcacgtaatctaagcatcgaagtcgagtgcgtgcgtgttgggtgggggtacgcgcatcgcggtttgacgcgcgatgtatttgataataattcgtgctccgaggtaccaacaagcaacgatgagagaagcattccacctttacactccccttttaggtctggatactcattattgatctcaatccacatgagttgaggtggattgggggtgtttaacagggctttttggtttgaaagagattagagaggattaaatttctttctatacaaatttgtatatgagatttaatttttctcaatacacccttaatcgaacaaacccttagtagatcagccagatgatctatgctatgatatatatataacatgctcaagtgttttgtgat

SEQ ID NO: 24106 - DNA, 267 bp, Zea Mays
taccatgtaaaacttgagttcgggaatgtaaagtgtactttgtaaaagtcttccgctctatctctaatgtgtgtgtatcaaatgtgattactgtattatacctgttatgtgggagatccttgggatgatgagttccagttggcgaactcgatagccttgttaagttatccggtacacgtgcacagccatctgagaccattaaggcaaggattggtgcatgtgggcctaataacttgggagggctgtcacaaagctatccaatctttg

SEQ ID NO: 24107 - DNA, 3807 bp, Zea Mays
cggggcgggcgctagtgctcgagcccgagcagagtcatcgcagccgcgtttcgccttcccctctcgctcgcctgcggttcggttggttagctcggcagctggagcgttttccccgctggtggttcgtctttcggttgctccacctccaaccgaacctccctcctccccaccacaaatatactagtgctagcaaccaccaccacctgcgtcttcccagctccgttccgtcctcgcccgccggccaccaccggtggggcccactgccctacgctccgattgcttgcctggcccttcccaccgcctctgtgcggcgtcgcgcgggaaacacaccaacgtccaaggggaggtagagagagaggaacgggaggcgcctcggatccccggcctccaccgcgcgccgggggacctccggagtgaaatgtgggacccgtgccgccgggaatttctctagaggcttgtccgcaccaccgccgagcgacacgatatggtggagggtaggagctatctccctgcagaggtcaggagcggcctcgagaccctgaagcagaggaggctcgagagaatgcgtttgagtgctcagaatgaagagggcggcaatcctgcgttggctgcgagaagcggtggtgatgccttgcggagccccactaactgcagggtcagattgcatcccgacaacaatacaggaggtttacctggagatgtccagggcaagaatccttttgcaaagcgcaaggtggagaagtttgatatgtccaaccttgagtggataaacaagataccagagtgccctgtgtattgtcccaccaaggtggaattcgaggatcccattgcttatatacaaatgatttcacccgaggctgctaaatacggtatttgtaaaatcgtctctcctgtatgtgcgtctgttcctgccggtgttgtgctgatgaaggaacagcccagctttaagttcatgactagagttcagccccttcgtcttgctgaatgggctgaggatgatacggtcactttcttcatgagtggaagaaagtacaccttccgggactacgagaaaatggcaaacaaagtgttctctaagagatattccagctctagttgtcttccaggtaggtatgtggaggaggagttctggcgtgaaattgcttttggcaaaatggatttcgtagaatatgcttgtgatgttgatgggagtgccttctcttcttctccccatgatcaacttgggaaaagcaactggaacctcaagaatttttcacggctccccggttcagttctaagacttcttcagacaccaattccaggagtgacagatccaatgctttatattgggatgctcttcagcatgtttgcgtggcatgtggaagatcattatttgtacagcatcaattaccatcactgtggggcatctaagacatggtatgggataccaggcgatgcggctcctgggtttgaaagggttgcaagccaatacgtatataacaaggacattttgattggtgatggagaggatgcagcgtttgatgttctactgggcaagacgacaatgttccctccaaatgtcttgctagatcacaatgttcctgtctataaagctgtacaaagacctggagagtttgttataacgtttcctcgttcttaccacgcaggcttcagtcatggcttcaattgtggagaggctgttaattttgctgttggcgattggttccctcttggttctttggctagcaagcgctacgcgcttctgaacagaactccattgcttgcacatgaggagctactttgtcgttctgctatgcttctgtcccaaaagctgttaaactgtgacccaagatccttggacaagttggaacatccatgttcccagtattctgtgaaatcctgctttgtgcggttgataaaattccagcgacgtgcacgtgacctacttgctaaaatgggttctgaaatatgctataagccaaagacatctccaaatctatcctgtagcatttgccggcgtggttgctatatcacacatgtgttgtgtggatgtaactttgatcctgtctgcctacatcatgaacaagaactgcggagctgcccttgtaagtccagtcgtgttgtctatgttagagaagacatactggagctagaggctctatcaagaaaatttgagcatgatgtctacttgtataaggaaagaagttccattagatcatgtaaggaggctgagatctctgatgctaatgttgaacacgtcccaaatcttggtattactctggattttgctaatagtaaagctggtagctctggctttataactgtcgatggaggaaacagttcttctgcagtatcaattttgacatcttctgcgcatcatgaggcactcatgcattcagaagcaagggcaataaatacatcagtgaccaaaggaacttgcactacagatgagagttcatccggcatggattgtgcttgtaatgaacatggttcatgtaatgcttcagtcatggaatgcagtgatgattccggttcagagaatgaaattttccgagtcaagcgcaggtccaccttatttgacaaacctacttctgaaacaaagacatcaaccttgtctgaacagcaggttctgaggcggctgaagaaggtacgtcctggagtacagcaggtcagtaagcgtccagaagaatctggtaatggttcagttcgctctacccatatgagcccgagctcaaatcatgcctcttcggatgatgaaatagacatggctcccctattcttgaggataaagcggcggcagttggaaaaccaagatgttacaagtcgtggcgcgagatcacagtcatacccatcttccagtggttctcgagaagagtttgtggaaagaagtagagatgctgcagcagagctccgtccaaaacgagtgaaaatccggctaccttctagtgccagtaggcagattgagcagcagcgcagttcggggcagcgatttgcaagggaggacaagttgccgcttgcattttagggaatcacaggtactaacctctactgggcagacgaattctttgtttaagtgcattgttaactacaaaacgaggtggcagaagagagtgggagggatcaggttgtgattgtggcagagctgatttggttagcacaggtgcagactgactttagaattggcagcaaagggaagtggctggctaatcgattcttttgtgcagcagggcctccaatttgaggcctctgggggcacgcttaggagacacacacgtgacaatattctcgttgctcgaggttctgtgtcactgccggtggctctttgatgcctggttatcagtgacagaaattgaggagaacctcgctacttcgatttctctgcaagtgtttagagcatgtagctagcttagctgtatatctctcactgtacctacggtctttcctattttttttgtaatttcctgtaaacaggcatagctgctacagtatggctaactctctattcttttgttggtttagcctggcgctgcttagcattttcaattaaatcgagattcgtttccttttcggatggttggtatatgttctggtgttgctgctctcaattgtgtggaatgttctgttatgttggcatggttagagatgacaatggggaccttatccccaaatccctgcggggaattcttccattagggttagtttgggagataaaattctagaggagattggaggggctaaattctttttaatcaaaattgaataagaaggagatttttagcccattcaatcccctcctattgaggtcttctggctatcggaggcgatgga

SEQ ID NO: 24108 - DNA, 1602 bp, Zea Mays
agcagccatctcagcaaagtgtccatcagatacacagcgtccgggaggacaaaacacgcggcgaggaccaggatggcgattgtgcgggaggaggcagtggacacgtccatcagcccaagggtgagcgcgctgcggccgtccaaaaccatggccatcaccgatcaggccatggcgctgcggcaggccggcgtgccggttatcggtctagccgcgggggagccagacttcgacacgccgcccgcgatcgcggaggccgggatggatgcaattaggaatggttatacaagatacactcctaatgctgggactttggagctgaggaaggctatttgtactaaactccaggaggagaacggggtatcctacctcccagatgaggtgctggtgagcaatggagctaagcaatgcatcacacaagctgtgcttgcagtttgctcacctggtgatgaggttttgattccagccccatattgggtcagttatcctgagatggctagactggctgatgcgactccagtgattcttcctacaaacatatcagagaatttcttgttaaggccagagttgcttaccgacaagatcaatgagaaatcgaggctcttaattctctgctctccatctaatccaacagggtcagtatatccaaaggagttgcttgagaaaatagctgatatagtcaagaagcatccgaggcttttggttttatctgatgaaatttatgagcatattatctatcagcctgcaaaacacacaagctttgcttcactacctggaatgtgggaaagaacattaactgtaaatggtttttctaaggcttttgcaatgacgggttggcgtcttggttaccttgcagcccctaaacattttgttgcagcatgtggaaagatccaaagccagttcacctcaggtgccagcagcatatcacagaaggcaggggttgccgctctgaatcttggctatgctggtggtgaagcagtatcaactatggtcaaagcattccaggaacgccgtgactatcttgtgaaaaatttcaaggaactgcctggtgtgaaaatatcagaacctcagggtgccttttatttgttcattgacttcagcgcctactatgggtctgaagtagaggggtttggcactatcaagaattccgagtccctttgcatcttcctattagagaaagcacaggttgcccttgtccctggtgacgcatttggggatgacaagtgcattcgtatttcatatgctgcatccctaactacacttcagactgcgatgtcaaaattaaaggaagctgttgctctgctcaagccctgtgttgctgcgtagcaagatcactaaattgcaataaggagtgaccaaggcacctttaactaacctttcacattattttaaacacaatgttcgaattgttgggcagacttggtctgttgtttttatatgtaacattatggatttatgatgtgtacatgcaaataaaaatgttttgtttagaaaaggctaggttgtggtactatgcgaattaccttctatacaaaagaagatggtcgctggagcaataatcatttcagtcctgcaacacttagatggaaaagaacagcaatgcat

SEQ ID NO: 24109 - DNA, 1386 bp, Zea Mays
atttttcaagaatcatgtgttgactaaattgataagatttctgttttctaaagatctttgttgcaagaaacatttgctagttacgtgaaagattattacattggaaaatttggggcgtcagtagcatcatatgatcagcaatatttgaagaacacaactcctgctgaatcctcatatagactatggtggtaccaagtttgcagtgaggttgcatatttccaggtggcaccaaaaaacgatagtgttcgttccccaaagatcgacacgaggtaccatttggacttgtgcagaaatgttttcggcgaaggagtctaccctgatgtctttatgacaaacttatactatggaggcacaggaattgcaggttctaaaattgtttttgcaaatggatctcaagacccatggcgccacgcttctaagcagaaatcatcagacgaattgccatcatacctaattgagtgcaagaactgcggacactgcagtgatctctctggatgccctcaagctccttcaaacattgaaggtgattcatccaagtgctcacctcccgaagctctgaacaaagtaaggaaggagattgtcgatcacattgacctgtggctatcagaatgccaagagcaaggacatgacaaggagccatggctgggaagcagatggagcatagctgctatttgatcaatctgtgaagctataagcatgtgctgctagagtaaccaaggcaaatatgctttctttttcttgcagcactgtggtttatcgtttcggcaaacaatgtgggctgctgagtaagaggacatatctggtgcacataaaaaattggtgcacatggtgcatatattaaattatcaccactcattttagatctaacgtctttagttgatcattcaatttacaaataacaccttccaggcttccaccactacacaccaccacgttggagggtgcttttagcaaaatataccaaacaactagaaacgttagatctaaaatgagtggtgatgatttaatatgtgcagcatgtgcaccaatcttccatgtgcattagatatgttctcgctgagtaatccacctgtggcgaataaataaagcagtcagttctcagtctgtcatgatttcagggcctgtttggaatgcgggagtttttatttttcctattcctactctccttttttttcttctgtaaaattgaacagctctttacaaaatccctgcgtgattcctacgaattcctgcgtttcaaatatgccctcaaaatgtgagcgatgtacacacggatggcaagtttgtcgatatacatatatgcatctgtcgcatgccctttagcatgagaaacgattgcgatgtttctctgcccttggtgctaattttctgaataaaatctgaaag

SEQ ID NO: 24110 - DNA, 1107 bp, Zea Mays
gtttacggattctttttctagcatttctcaattcttttttgttccggccccaatatgctctgtctcaaagtcaatttgcctacgagttcgaacgaaccgacaagaaggagcaatacacaagagagaagacaaggaatagcgccagcggcggccagggtgccgctcgatctctatgacttgttcttccctccctttcttcccttcacaaggttcctgaggcccgctttgagctgagatggattcgtcccagtagtgttctgggtgctcccgtttcttgatttcttccgttacagtgagtgaagttgaagcactgcatgacctcttccggaaaataagtaattcagttatcagagataatctaattcacaaggaagaattccaacttgctctctttaggggcaagaagcagcaaaatctctttgttgatagggtatttgacttgtttgatcaaaaacgaaatggtgtaattgaatttggtgagtttgttcgatctcttggtgtgtttcatccagatgcaccagaagatcagaaagttgcatttgcatttaagttgtatgacttaaaacagacaggctttatagaacggcatgagttaaaggagatggtgctggctctgctggacgaatcagatttggatattgcgagcgacgctgtcgagatgattgttgacaggacatttgatcaggccgacacaaaaggtgatgggaagatagatcaggaagaatggactgaatatgctaaagacaatccatacgtgctgaggaatatgacccttccatacctcaaggacattactatggtattcccaagctttgtgatgcactcagaaatcagtgaaacagacatggctgtctaacctgaaaagtaactgcaaactcacagcttctctgcacagcctgatgtatattaatgatggaaccggaatcttttcatcaagaaaaggttaatttgcaaccttctctcgtgaacagaaatttgtggactggtgtaaatggtgggaataggaaaggtgttctgttatattaccgacaagcaaacgagcaatctagcatctatctgattgtcgttttcagacactcgtgattagcttcaatatttttcctcacc

SEQ ID NO: 24111 - DNA, 493 bp, Zea Mays
ctgctatccaaataggtctaaatcttcatagaattcaaacaagcaatttcttgcaagagtttcatggaatgcatttcttgttattcatcaagctggtgggcaaggagttaccttgagagaactttcgcaggcactgcatccgttagccatgcagctggtcttaataattgttgacactctcaaaagatttcagctggctgttaaggtcaatgcatatgatggcgttcagattgtggactcattacattcgtcaaagtatcatatagctacacttgcagaatgtgatagttgctgctgtacagatcctccaacttctcaatttgttgataatgaaaacacaaaaaatctactgaaagagaagcataccaagcctattaattttcctggtccaataaaaatgcttggtgatgggcacacagtgacagtaattaatgttcaaagcaagttgagcccaccttacatgcacagcaaagatcctggggatgcggaaagg

SEQ ID NO: 24112 - DNA, 1056 bp, Zea Mays
cttgacagttattttctccctcgtcgacggctgtgtccggcttgatttcgatcggcagctggagagaatcgattcgattccccgtctgccgctgtcctttggctctggctcgctcattcgttcgctcgtcctaattgtctccaccactttttttttctgcccggccactgccagtccaccacaaccacgtcccgccgtcgtcgtcgcgcttcccccacgcgcgccccgtcgcgtcccggtgctgctgttgagtgcgcccgcgcccgcgcgttgccgtgaagctgcttccgcgcgccgccgccgccgcctgcctgcgtgggttgcaagtcaagcggcaggcggggggacgggcgccggagggagcggacgacccgggaggaagcaggaggagtgcaggacaagggcagccgcggcacgcgcttgagcggcacaagcgaagcaggctgcgtttagttcgtgcggtggactgcggccggggatcgctcgcttcggaggaggatgtcgcagacaggggaggtgcaggtgccgctgttgcagaccgaggaggcggatggcgagtggagctccaagccacgccgcattgctctcttcgtcgagccgtcgccctttgcttacatttccggctacaagaatcggtttcagaacttcatcaagcatctacgagagatgggcgatgaggtattggtggtgactacacacaagggagctcctgaggagttccatggtgcaaaggtcattggctcttggagctttccatgtcctctgtaccaaaatgttccactctcgctggcattgagccccagaatattttctgaggtgaataaattcaagccagacataatccatgcgacatcacctggaattatggttctcggtgctctggctatagctaaaatgatatcggttccaatattgatgtcttatcacacacatcttccagcgcattatgaacctgtggtgagccggtgataccatgagacaaatctgtttgtgccaatcatatgtggtcatagaacctcaggtgcaatgctgcagagcttaattggtatagtgcat

SEQ ID NO: 24113 - DNA, 96 bp, Zea Mays
tctaggttagcgcgcagtttggcaccgtaacccgacttccggttcatcccgcatcgccagttctgcttaccaaaaatggcccacttggagctcccg

SEQ ID NO: 24114 - DNA, 3009 bp, Zea Mays
actacttgcatagccgtcgttgccatgagtaaattgctggaggggatagtctaatgtgctaactgagccggctaacactcctttatgcattactgaggcctcgctagggtttaagcatttaggtaaccaaataaactcaatatgtctaggatggtagccagccagccaaccaaagatgccgaaagttcctctgttgtgaataatatagggctcagagcagagagcagagagcagccacaagttgggcggatagcacacacttgttcacgggatcgaccggatcagatgccgtcgtcctcgtccgcctccggcgtaggcctagggcggcggcggcctcccattgcagcaggggggcctagaagaagcgatagcagatggtggtgggcgagattaatggagaagaactatagtgatgctgagagttatcgcgcaaggaggccggaagagaggctgatcaacgattacctgctgcttgagtccgccgcacggaaggtcgccaccggcctcgcgtatctgttgctgacgtggtccaccgttgtcctccttggtggtttcgtctccgcgctcaagctcatcgacttttggtgtctggctgccattagtacgtcatttgcagtcaatctagcagatttgttcgagtacacgaggggatatatgttggcggcggccagtgtgtacgctggactacgtgatgatcggccatcatctaggagttgtcgcttgggtgtacatgtatccatcttgctcgctgaggccttgcttggggtgctgataactgtacattttgttgtggttcaagtccttacttttgcgccggtggttgccatagttctttcattgtccaggctaattgcaaacaactatggcaatgttggtgacgatgctgccaattcagcaaagctcaaggcatccctgcagattttctactctctcaccctggtgcagattaatgccttctacttctggaagatgctggtccttaggaagaaacattgtgcgtctgctgtggccaagaagtgcagatttggggagtggggcttccgcttggtttggtcatacattgaagaaaccaaaaccatgctcgagagagacggggcagtgctgcggggcagaaacctgatcaccttcgcagttggcttgctcggctccgaatcgctgcacgaccgtcgttctgcacttcgcatgctggacacgttcgtcggagacaaggtgtcagtagcaccctgcctgctgccttgcaggggtccccttgagaacctcatggaagcgctcgaggtgggcgatggcgagaccagggagcgtgccgctaggatcgttgcggctcttgctggcgatctccgccgcatcgatcagctccccagagcattgcatcacatggcttcactgcttcaagcctctgattatcggttccccagacccagaactacaactgcaactgatgcaagaacaacgacgacaagcatgcaagaacaacgacaacgacaagcagcagagagcaagcgcgggaggtttgggctgctattctgggcgatcctgtcttgtctcaacttctgggaagtcttggcgaaagagaaaaaggaagacaccttcccctctggcggcggaccaaagcagctcgtctctcaagggctgcttatcgttgagagactcgctcggcacccagcaaaccgtgcccagatatgcaacaacagcgtcctgctctcaaagctcacagcgcccctattctcccatgctttcctcgacaccgcggagcacggcagaggatgggttgttggcatgttagccacgtcgctgaggatcataaccaggctgcttattagggctcctggagaggccagcagagggctgcgtgacgggatcacaagcaacgcacaggcggtctctaacctgtccagggttctggaggaggaggacgacgccaagtttggcccggaactgaaagcagctgccgttgacatcctagcagaactagcgttgccttcatcagacaggtcttccacctcgaggttgggcaaggctgacatcgtcagggggctgtggtgcatcttccttgttcaagtggacgatggcgttgacggcagcaacactcagggagaggaacagcgacagcaggatagcacactgaggaagaaagctagcgaagcactggcacagatgctgtctgcagaactgcgtcatgttgctggccggcttactgacatgctggctaaaagtaagggctccacaagtcgagtaaggacagcaagaaccctcgagtgcttgtgttcacatatttctacagaacatggacagcctccaagactggatgctattgaaatgctgacaaaggttcttcagctgatactacggatcccatgcgaatcaaacaagctggagacggctgacgaggagcagcaagaagaagaggaattcctggtcgccttgctatcacttgccgtggtgatatgtgacggcatggtcgacgaacatggcttcagctgtgctgcgccccctcaagacatggtgccgctggtgagaaagcttaaggacataatacaggctaacaacacaaccacggtcgaatgcctgcggacagtgaagcttacctgcaagctggtcgtttcaatggcacagctcaagcccatgtgcatcaaagatttcacagagcacaatttcatggatgtactcttggagtctttgaagacgttgtcagatctcgataactgcctcgtattatttgaggtcgataatcattatcaggtgacaaagactgataagccactggtttcacttgtgaagaaagctcatcaactcttctaaaaagcaacgagaacaacccggtaatgtgtatgtgtacgcgtgcatgtgtgcgtgcacgcgcgcattgtcaagtctgcatatcaatccaatagtgcgctgcgtgaaatgatgtgaaactcagcctgataagataaggcgcaaaacgccattgcttacggtattcaaccatccactgtatgtttcctgtatgaagtgtgcatcccacccccc

SEQ ID NO: 24115 - DNA, 1262 bp, Zea Mays
tctgtttgcactgatgatattggaaggaatctgggataactgaaaatatcggtgtatgctgtcgaagcctgtgaaattgttgtccaggctcgtgaaattgtaaaagcaaacaacctaactgatcagattgtggtcatccatggacgtgttgaggatgttgaccttgaggaaaaggttgatgttataatatcagaatggatgggctatatgcttctctatgagagtatgctgccaagcgtcctatttgcaagagataaatggcttaagcccgggggtcttattcttccttctcatgctacgctcttcatggcccccgtaacaaatcgtgagagatatgaagacagcgtcgatttctggcgtgacgtctatggcataaacatgtctgctcttgtgccacttgccaaaaagtttacatctgaggaaccctccattgaaacaattggtggagagaatgttataagttggccatctgtgttcaagcgcttcgattgctataattttacagctgaggaattcaaatctatcacttcaaaatacaaagtttcatcaatgatgttagctcccattcatggctttggtttctggtttgaggtggagttcaacgagcctatagagtcctctcataattttccttccagtttggatccacttgagattatacagaagaaaaggagacgatcctcagaagatatagttctgtccacagccccagaggatgagccaacccactggcaacagaccattttgtatttcccggatcctatagaggtgaagcaggaccaaattatagaaggttctgtaacagtgtcccaaagcgaggagaatccacgttttctgaatattcatctagagtgcttgaggacagacattggttaaggactgcgccatgcgatgaactggtgtttttatgcttctagtggcttgatttcaggcgcgcaatggggtgttggcagggaggagctgacaatatttcagatttctttaatggaagtggagaatttgtactatttatgccaattatccgtctaatacgaaggcaggattttagtaattgtactccgtcttattctatagagtatatactggttgttgattttggatccgcacgctgtgacctaagtctcgcatccaagggtccctttggaacaaaggaaacatgaaggatttttttatgatccattccctatcggaaaaattcccacgtgagtctttagaccacattatccaattctgtcaattcctttgaaacttctatagattgc

SEQ ID NO: 24116 - DNA, 4656 bp, Zea Mays
gtggagggccacctcctacacatcacaggagcggcgccgcagccgccgcctaagctcgacgcgccgcggcggtggatgcgacgccacacccccggccttctcgccgccaatctcctccgcgcctcgtcgctcctcagacccccgtccgtcctcgccgcccgcgcggccttgctccaccatgcgccggacgacgcccaccgcctgctcgacgaaacgccgcgcgggagggcggccgccatcgtacgtgccctcacgtccgcaccgtcttcctcctccggtgacacggcctgcatcgcgtgcctccactgcgcggccctcaagtcaggcgccgtgctggacccgccagtgcgcacgtccctgctcgcggcgtacgccagggccggccgcggcgcgggagcgggagccggagcaggcgccgccctggcgctcttccgcgaggccgttgcgcccgacgtgatcctgtggaacgcggccgtcggcgccctgacgacgagctgccggtacgacgacgccgcggctctgttccggcggatggcgcgcgagctcggggagtttgactccaccaccgtggtcgtcatgctgtcgggggcgtcccgcgcgggtaaccttcggcgtggaatggagctccatggcatggcggccaagagttgtctcggcgctcattgtctcggcgcgtggaacgctctcgttgacatgtatgcaaagtgtggtgagtttaggtccgcagaggttgtgtttcatagcatgccgtgcagggacaccacctcatggaactctgtcataagtgggagcatttttaacgggctcgctgaggtgtcagcgtgctacttcagggaaatgagttgctccatcttccagccagatgaggtgagcctctcttctgtcctctcagcctgctctcgtctggatgatctcttctcctttggggagtctgtgcatagctgtgcagtcaaactcggttatgaggacaccgcgtcttgctcagtagcgaattctctcgtgacgttctactctgagtttggaatgccagaggctgcgaagaaggtcttcgccagcaatttgaacaggaatttggtatcatggaatgctatgatcaagggtctagtccagaatgaaagagtaaccgaggcccttgctgttttgaggcaaatgagattggagaaccagccagatgtcgccactttggtgaccatagtttcaggctgtgctgatcaaggcctactttctgaaggggaaacactccatggatacgtaatcagaaaaggacttcttcgtgaggagccttccatgggaaatagcttactcgatctgtatttgaaatgtgacgaaccatctaatgcaggcctgttgtttatgacaatgccaagaagggacttgatatcgtggaacacaatgatttctggttactcaagatatggcccactgagagaagaggctcagttaatgttcaaaggattactttctgaaggttcatcgtgcagcttggccactatgctagctgtcataccatcatgctccattccggaagaacttagctttgggaaagcacttcactctttcagcctgaagtgtggatttacatctagtggggtttcggctgttaatgctttgatacacatgtatatgagctgtggtgatccactggccgccttttcgcttattgaaagaataataccggtatcagatatcatttcctggaatacggtcatagttgggtgtctgcaaaatgaactccataaagatgcattggaaatctttcggttcatgtattgttctttggccataaaccctgacagtattacaatagttagtgtcttatcagcatgtggagatcttaatctactagcacttgggaaatccatccactgcatgatcctgaagcacttgtttgcttccaatttgagggtgaaaaattcattattgaccatgtattttcgctttggagatactagaagtgctgagttagtcttttatagcatgggagacacaaatttgtgctcctggaactgtatgatctctggctttgcacagaataacaaaggctggagagcattgcagttctatcagaagatggaggatttcgaacctaatgaaatatctgttgtcggtatcatctgtgcttgcacacagcttggtggttatagacaaggaaagagcatacacgggcatgtgttcaggtctgttctgcacaataatgtttttatttcagcatcacttgttgatatgtattgcaagtgtgggagactggacattgctgtcagagtatttgaagcttctgccgaaaaatcgattgccgggtggaactccttgatatcagcttttggattccatggccatgggatgaaatctatagatcttttctggaagatgcatgattctggaatgaaagccacgaaaagcacatttattgctctactgtcagcttgcagtcactctggacttgttgatgaagggtggaagtattattgccttatgtcagaaaagtttgggatcacaccagccccagagcaccatgtctgcattgtagacatgcttgggcgggctggtcggctgcaggaagcgcacaagtttgtggagagcttgccgtctcaacaaacacacggaatttggggcgcactgttaaatgcttgcagtagcaggagtgaactcaagatgggcgaatccatcgcaaaacatttgctacatttggagcctggaaatagcggttattatgtaactgcagcaaacctttatgcatacaaagacatgtggagtggtgtggcccaagttaggagcgttttgcaagataaagggctggtgaagccccatggtcgtagcactgttggttaagcggtgggtcataaaccatggaagccatacaatatgacgaatcgccatgaatgtttgtcaacttcccaagttcttctcacaagccgtctcaattatgagctgcaagttgcacgctgcatacaactgcggaggaaaaactccaggtcgtgtatgtttcacttcactaattgaaaattactgccagaacatggtaattttataaagggtgccttcctccaacatggtgtgctgggcagctggatggtgtttgggcgaagaagatgaagggcagagaggaacggagacggcctttgggcggcggctgcagataatataggaactgctggcagccgatactgcttgcgagttacccccgccaaagctgctggccgctcaagcgccggttgtcattcctggtgcctccatgggccacgagggcaccacacagccacaactgcatgcatgccttctcatgatccaaggaaaggaagaagacaggctgagatgtgtgaggagaagaaaaggaagggcggtgggcccaccaagaaacaggagcatacgtgcaaatatgcgaaaccggagagcagaagcaagcagttgtcaattgtcatcgggaggaggaggaggaggaggagaagaagatagggcctgcctgcaatagaatccctctggaatctggatgatggatggctgtcttttgaacacaccgccacccaatcactatcgtagtatctcgtcccactctgcaccactcaaacccgctgctcccctctgcatttcacccgtcctccacctcctcccagacaccacaccagcgctccctttctggctgcagcttccccggacagctagctgcctgcctctcactcgagagtcacagagaccacccctagctagggatggccgcagtgatgaaggctcttgctgtcgcctcgccggtgtcggcacgggcagcacagcatccccgtcggtaccacgtcgcaggtgtccctagccagcagcatcaacagcagaacttgagcctgcacctgcagtcgttgttccacggcgtatcgtcggttcagtgccctgggcgatggcggcgggcgcaggtggtggcgatggcgggccggcctgcgatccagttcatccagggcacggacgagcagacggtcccggacgtgcggctgaccaagtcccgcgacggcaccaacggcgtggccgtcttcgcgttcgagcgtccgtcggtgttcgactcgtcggcggagctgggcgacatcacgggcttttacatggtggacgacgagggcgtgctgcagtccgtggacgtgagcgccaagttcgtgaacggcaagccggcgcggatcgaggccaagtacgtgatgcgcacgcctcaggagtgggaccgcttcatgcgcttcatggagcggtactcccgggccaacggcctccagttcgtcaggaactgaatgaaagcaactcatgagcccgacgagcctgcctgcctgcctgctttgagctctctctctctcgctgcctgtctgtctctttctcctctgcgcccctgtgtgagttggaatgcttttggattaacggccggattggaagaggactaatcgtacagtctgacaagtattgtgcatcctctgattgctcgcacacaggctggccacatgcaacccctcctccctgttcattgtccgtggcagttgtaccgtcccgttagagccttggccttggcatgacacaaagcatgtggcgtgcgctgtgtcactgtgtctgtgtgaaggaacaaggaagggtatcgaaattcgaacaccctaaatcgatctatcgatgaatttgggccgttttgtgttatttctcact

SEQ ID NO: 24117 - DNA, 650 bp, Zea Mays
aaaaattcgggacacctatgaatgcaatatttgacttatttgatttcaaaattattattctttctcactaatcttcaaatgcaagtcgatgcaagtgctcactgaccttgagatgcaagttgatgcagcgatgcaggcgcttattgatcttcacgtggaggacaatgcaaccgcgacgatacacaagcatttgagaagggctacccatctgttttatggaatgtcaattgcaatttattcagatgctaattttgcctttgtatgatctttacataataggttggtaaaaagcaaggtccatcgattattcgagacttaatgtgcaactatttttacagtttgtcagttatatataaccttttcagggtataagaagttcaatcaacattttccctccatgagtgaatgcagatcgatcaaattgagaagatgactacttcaattgaagatgatcggaagataagtgtttgtgatatttttttattgccactttttgttcctaaatcaatcatttgctgtggttccagaaagtaactgaggagtgataaaacgacaattttgagcttcaacgctttgctaggttggcaaaaaacttaaagcaacagagggcggatttggtggcggcgactgtgaggcgggcgagcgaggtg

SEQ ID NO: 24118 - DNA, 1866 bp, Zea Mays
agaagattccatattattctcctgttcccatcctgcagaggagcggcaaggaggcgtcaggggcgtatgaccatctgggcgagctggaccaggcgctgttcatgtacctggatcacggcagcagccatggcggcggcgccacgcagcaagagcgaaggcagacactcaacatcttcccttcccagcccatgcatgtggagccgtcgccgaagggggagattagtttagtcctgtccccggcgccggtgggatccaagcagcctaggtcaccggaccatcaccatcaccagcaggcggccatggaggagttggcggggagcaggaggcagcaggagcacctccacctgcagcaccaccaaccctttgctgccgctgctgagccagcagcacccgggatgatcaaagatgtcaagccactggccaagaaggatcacaggagaggcacatcgaccgctgaacgcgacccaaaaacgctgagaaggctggcccagaacagggaggctgcaaggaaaagcaggctaaggaagaaggcttacatccagcaactcgagtccagcaggatcagactagctcagctcgaacaagaactgcacactgcaagagctcagggagttttcttccccaacagtggcatcctcgctgaccaaggtgtcgccggcaaaggcgtccccatcggcggcatcgacggcctcagctcagaggcggcgatgttcgacgtggagtacgggcggtggcaggaggagcactaccggctgatgtacgagcttcgggcggcgctgcagcagcacctgccggagggggagctgcagatgtacgtggagagctgcctggctcaccacgacgagatggtgggcatcaaagagggcgccatcaagggcgacgtcttccacctcatctccggcgtctggcggagccccgccgagcgctgcttcctctggctcggcggcttccgcccctccgaagtcatcaagatgctgctgagccacgtagagcccctgaccgaacagcagatcgtgggcgtgtacgggctgcagcagtcggcgctggagacggaggaagcgctgagccagggcctggaggcgctctaccagtcgctgtctgacaccgtggtctccgacgcgctcagctgcccctcgaacgtctccaactacatgggtcagatggccgtcgccatgaacaagctctccacgctcgagggcttcgtcagacaagctgagaaccttcggcagcagacgctgcaccggctgcaccaggtcctgacgacgcggcagatggcgcggtcgctgctggccgtgtcggactacttccaccgcctccgcacgctgagctcgctctgggtcacacgccccagggcaccgcaggagcaataataggtccacagctggtgacggcggcgctgatgaatggcgtgatcgccggccgccgcatacaacggcacacgcgcatgtgtccattcatgcatatatgagtcgtgcatgggcgcatgcatggtgtgtcgttcgtcatcaagaacagagcttgcaggtagagccagttagggccggccgggggagagagagctagtgaggacgagaaaccaaccaaaggataatgttaatcttggcgacgattgtcgtgttggttgctttgtagctatagctaggtgtacttgatcgttcgatcgcgatctatcgatcgatcggctgctgctgtagtcgatgcggtggagtgatgatgttgttctaagttattagttatctctcatgatcaccggacgcatatgcttcgtagtcgtttaatttggagacgtgtgtggggttttaggcaaccgtcataaatctttgatagcatgtaacacatgctaatataagcttgctttgatggtag

SEQ ID NO: 24119 - DNA, 1225 bp, Zea Mays
gaagagatccgtgtggccaaggtcttcctctcctatatattgactcgccgccacacagatagggttttctctccacgcagcgcgctcctcgatccccaacaggcaacagcccagccgctgtcgccctcgttccgtagtacggcgccgccagatcgtcagtcaccatgatcatctccaagaagaaccgccgcgagatctgcaaatacctcttccatgagggggtcttgtacgccaagaaggactacaacctggccaagcaccccaagcttgatgtgcccaacttggaggtgattaagctcatgcagagcttcaagtcgaaggagtatgtgagggaaaccttctcatggcagtactactactggtacctcaccaacgatggcattgagcacctccgcagcttcctcaacctgccatcagaggttgtgcctaataccctcaagaagtcttccaagcccccgtctcgccccttcggctctggcccacctggtgaccgccccaggggccctcctcgttatgaaggtgacaggcctaggtttggtgatagggatggttacagaggaggtccacgtggcgctccaggtgactttggtggtgataagggtggtgctcctgcagatttccaaccatcttttaggggtagcagacctggctttggccgcggtggcggcggtgctttcggtgctggtggatcttccatggagtgatgtgtcaacatgagctagcataacattcgtctttgaactatgagaacaatgagattttgttttgttttaccgagctgttgccgtgggttgacatggttttgtgatcgtttttgtttagatgaaattattgaaatcaagcagcgagttatcagtctatcgcgtgctgaattccttgtgctttctggtctatggttcgtgttgcaagttataacttttgcatggagaccaaaaagttacggtttcaagaaaaaaatttgtcaagacacacgataagtatggcaacgaagagctgacaaaaaaacattcctcctagccccgttggtgtgatgtcctcattaccttccaatgcagtgcaagaatttgcaacagccaacgttatgaattatatatatgaacatccataggaaaaaaatccatctacttttaaggcatgcatttattgcatgaatttgcaacagccaatgttatgctgaatttgttggatcaactagaaatcaaaatatcccatctacttttaaggc

SEQ ID NO: 24120 - DNA, 3719 bp, Zea Mays
cgattattaatccattgccagccggttcgttgaccgccacgtcaccgtcgtcgtcttccttgcgtccgtccgtccgtcctctccatcaattgcaattggttggaaggttggagagatttgatttgctgcttatccgaggggacaggtgagggagtcgagggggacggcgcatgaaagaaagagaccgagggggaggcggcgagagcgagaaggcaccgccgacggcgagacctaggatgcagacaaggccaaatccacatcgatggagccaagcccgatggccgttggtgttggcggcccaaagaggaggtggacgcgcagtcggaggcggaggtgcgtatgcccatcgtcgccatctagctgcgcctccttatatgcccctccggctccgattagcttacctccatcgatctccccaccatggacgccaacgccaatgccctcggcatggacgctatcaccaacgaaaccgtcgacctggagcatgtccctgtggaggaggtcttcgagcatctcaaatgcacccgcgacggcctaacctccgccgctgcccaggataggatcgacgcctttggctacaacaagctggaagagaagcaggaaagcaaagtgctcaagttcctgggcttcatgtggaaccccctttcctgggtcatggaggcagcagccataatggctatcgcccttgctcatggcggcagagatgttaggggaaagccaatggggatagactaccatgactttgtcggaattatgttactgctcattatcaattccaccattagcttcatagaggaaaacaatgccgggaatgctgctgctgcgcttatggcccgcctcgcaccaaaatccaaggttttacgtgatggaacctggagtgaaatggacgcatctttgttggtgcccggtgacataatcagcattaaacttggagacatcattccggcagatgcgcgtcttctcgagggagatccgctgaaaattgaccagtctgcacttacgggagaatcgctacctgtaaccaaacaacctggtgacgggatctactctggttcaacctgtaagcaaggtgaaatagaagcagttgttattgccactggaatccatactttcttcggaaaagcagctcatctggttgagtcaaccactcatgttggccactttcagaaggttctcacatcaattggaaacttctgcatttgctcaattgctgctggaatgactattgagttaatcgtgatgtacgctattcatgcaagagaataccgtcagattgttgataacctcctagtgcttcttatcggaggaattccaattgccatgcccacggttctctctgtcactatggctattggatcacacaaactagcacagcagggtgccattaccaagaggatgactgccatagaagaaatggctggaatggatgtcctttgcagtgacaaaacaggaactctgacactcaacaaactaagcgttgacaagaatttaattgaggtttttgctcgaggcatggagaaggatgacgttgtcttaatggccgcaagagcttctagactagagaatcaagatgctattgattttgctattgtttcaatgttgccagatccgaaagaggcgcgtgccggcattcaagaagttcatttcctcccattcaatccaactgacaagagaacagcacttacatacttagacgctaggggtaaaatgcacagggttagcaaaggcgctcctgaacagatcctgaacctagcatcgaacaagtctgagattgaaaggaaggtccatcattctattggcaattatgcagagagagggctacgatcgcttgctgttgcctatcaggaagtacctgaagggactaaggaaagttctggtgggccttggcaatttattggtcttctcccactctttgatcctcctcgccatgacagtgctgaaactatacgcagagctcttgaccttggagtcagtgtaaaaatgattacaggtgatcagttggctatagctaaggagactggccggagactaggaatgggcacaaacatgtatccttcttcatcattgctgggtgacaaaaaaggtgacatcgcagttctaccagtggacgaattgattgagcaagcggatggatttgctggagttttcccagagcacaaatacgagattgtgcagaggttgcaagccagaaagcacatatgtgggatgactggagatggagttaatgatgcacctgctttgaagatagcagatattggtattgctgtggctgatgctactgatgctgctcgaggtgcttctgacatagttctgacggaacctggattgagtgtcatcatcagtgctgtactaaccagtcgggcaattttccaaagaatgaagaattatactatatatgctgtatctataaccatacgtattgtgcttgggtttttgctcttggcatgcttttggaagtttgacttccctccgatgcttgttcttgtgatagctattcttaatgatggaactattatgactatatccaaagacaaggtgaggccatctccccatccggacagttggaagctagcagagatatttgcaactggagtgatcattggggcgtatttggctgtaaccacggtgctgttcttttgggtaatttacaagacggagttttttgtgagggttttccacgttagaacaatgaatagaaaaaagatcgaagaaacaggagaccagaatctacttgccgacaacatggagatgctggcctctgcagtgtaccttcaagtgagcaccattagccaggcgttgatatttgtgacgaggtcgaggggttggtccttcatggagaggcctggcctgctgctgatggccgcattcgtgatagctcagctgatcgcgtctgtgcttgctgccatggtgagctgggagcttgctggcatcaaaggcatcgggtggcgttggaccggcgtgatctggctgtacaacttggttgtgtacctgctgctggacccgatcaagttcgcggtgcggtacgggctgagcggcaaggcctggaacctggtgatcgaccacaaggtggccttcacgaaccgcaaggactttgggaaggaggcccgggaggcggcatgggcgcacgagcagcgcacactgcatgggctggagagcgccgggacccctggggagaaagcggcgtcggtggagctggggcagatggcggaggacgcccggcggcgcgcggagatcgccaggctgcgggagctgcacaccctcaagggcaaggtggaatcggtggtgaagctcaaagggctggacctggaggacatcaacaaccagcactacacggtgtaagtgtaaccgccgtgattgattcgtcatagcctccttatcttagagagagggatataaagtaataattggatgcaataaccatctgattggttgcccccactatcttgtcctaaactatcacatgcgttgattttatcttaaacttctgtttggttctttgtacgtgaaagacgtaagttgcatatcatttttgttgcacccgtagataggaaacaaatcattttctgtttgatataaagtagtaattggatcgttagtaaccggtctgatttgctgaactatcacatgtgttaactttatctaagctcttgtttagttcttttcacgtggaagacgtaagttgcataaagtaaatgcaaaacaaattatttttgttgcac

SEQ ID NO: 24121 - DNA, 3371 bp, Zea Mays
cgggtcacatcaaacgtttgacttttaaataggagtatgaaatatagacccaaccaactgaactagattcgtctcgtcttttaattttcggctgacaaattagttttataatccgactacatttaatacccggaacggaggttcaaacattcgatgggacatggctaaattttagcgggttgtgcgatacggcccaagtgtggttcagcaacgccgaagaaaaatcagacaagaagcccctccggccctcgccctccctagtccctattcgccgcgcccgcgcccgcgccgtctcgaggtccgccggtctccttccgccgcaagctttgctccattccaccgccgcctcttccgcctccgtcggcaaaatgccggtctacagcatccgcggcgtcaacgtcgacttccccttcgacgcctacgactgccagatcacctacatggaccgcgtcatcgagtccctgcaacaggggaagaacgcgctgctggagagtcctacgggtacggggaagacactgtgcctgctgtgtgcgtcgctcgcgtggcgccgcactttcggcgagttcctgcgggtcgggcgtgggggcggtgggactaagcagttgccctacgggagtcagccgtccgctagccagcagtcagaggactctacgtctcagaagcagcagcagtcgcggtacccagtcatcatctacgcctcacggacccacagccagcttcggcaggttatcaaggagctcaaggctaccagctacaggccgaagatggcagtgctaggttcccgtgagcagatgtgcatccacgacgaagtgagcaaactccatggaagagcacagaacaatgcctgtcacttcctctgcaagaaacgacggtgccctcataataaccatgttgctgagttcataaaaaacaaacctgagcttgggaatgagccttttgatatagaagatttgataaatattgggaggcataagggcccgtgcccatattacatctcccgggaactttcaaagtcggttgatattttgtttgccccttacaactatcttattgatccgggaaaccgtcgttccctaaatggcataccatgggacaatgcagtacttatatttgacgaagcacacaacttggagagtatatgtgcagatgcagcctcttttgatttatttccgaataacctcacagcttgcatagcggaagctcatgaatgcatcaaactgtgttcagcaaagaggtccattgaaaattctgctgataaacaatttgatcctgaaaactatgcaatcctcaaagctcttttaatggcacttgagaaaaaaattgctgagctgttaattggatccgagttgggctacacaaaagctgggagttacatatacgattttctctctgaactgaacattacatcagacacatccaaaaaactgattgagacaattgattgtgcttctttgctactagaggaaggaaattctgctcaaactgggccaggggtccaggcaaaggctgcagtgtctagattggagtcaattagggacatgttagacataatttttaggggtggtggtcaaaaccatgcaaaatattatcgatttcatgtgaacgaatctcaacaaacacatggagatgcattgaaatttttgggtaagtcttcaaggacccttagttggtggtgtttcaacccggggctggcgatggaagaatttctcaagttgggtgtgcgctctatcatattaacctcaggcaccttgtctccgttggattcactagccatggaactaaacctaaccattcaaattcagcgtctgagaacacaatttggcagcggatctgtaagcacaagcagccagttatagagcctaggcagtcatcaaactttcagagtgcaattgaggattatagagccaaattacacgattcttcttctggggcaatattttttgcagtttgtcgtggcaaagttagtgagggtcttgattttgctgatcgtgctgggagggcagtaatagttactggaatgccctttgctactccaactgatgccaaggttcggctcaagcgcgagtatttggataagcaggggacaccatctaataaaaacacaaagatgttgacaggagaagaatggtatgtgcaacaagcagcacgggctgtcaatcaggctgttggacgtgttatcagacatcgccatgactatggagctattatttattgtgatgaaaggtttgtgtggccaaattatcaatctcagatgtcatattggctccgacctcatataaagtgctactcaaagtatggggaagtagtccaaggattgacccgattttttcgagataaagcttcttcagatcctttgacactagagccaacagattgtaataattgtatagcaccaccagcaaacaaacacatgcttaaagagaagctatcagatttggctgccagtgcacaagatgagtgcccacaaatcacattatcaggaaattcaaccatgagaagaagtaacttcatgaagttggctcagatcactcctgctaatcgttcaacccttactacaaaacacaactttgtgtctacatctacgaagcacaacctcccagaagaccagctgtcacaggataccaatgttgatattactgttgacttggcaatacaagggcatttgaaggaacataccttcaagtctttagggcttaagaaagctaaaacaatggacagatccaaagatgctgttgttttagatgacgtctcttcaaaattgcctcaaaatatagggtcaagagctttggccagataccaatgtggtggacctacacctgaatcaaagaaaagcactatagcaacagcatgcggaaagaatgatggggcctgtgaaaaaactgaaggccaggaatctaactcagggccagccttcttgaagctggttcaagaaaagcttagtcctgcagagtacacagagtttgttgaatacatgaaggccttaaaattgaaaactatgcataccaaggactcacttgaagcaataactaagcttttttcgtccccaggaagacttccacttcttgaagggttcagggtttttgttgcaaagaaccatcttccattatatgagcagcttgttcgaagacacaataatgtttctagtacatgacaaccacttctgctatgttcgcaggcatattcagtttttttgtttgtgccatgtatttcattaagtgataagtacagttttggttgttttcaacacttaactgtttatcaacggaacattagcagattcttgggtgcatgcaattacttttggaatgtgttatggtgcttctgtaatctaaggaaaagaaatggacctgaaaaaaaaaactctatttaag

SEQ ID NO: 24122 - DNA, 1718 bp, Zea Mays
  misc_feature (1)..(2): n is a, c, g, or t
nnagtaaagaacctatcatcgaccggtataccgtttgatcgacgaatttacctcccgtgttgaggtcaggatgcccattggttcccatgggtgtcttgatgggcttggcatccttcatcccaaacttgtttagaatgtcttgaatgtacttcgtttggctaatgaaggtgcccccttggagttgcttcacttgaaatcctaagaagtacttcaactcccccatcatagacatctcgaatttctgtgtcatgatcctactaaattcctcacatgtagattcgttagtagacccaaatataatatcatcaacataaatttggcatacaaacaaatcattgtcaagagttttagtgaataaagtaggatcaacctttccgactttgaagccattagtgataagaaaatctcttaggcattcataccatgctcttggggcttgcttgagcccataaagcgccttagagagtttatatacatggttagggtactcactatcttcaaagccaggaggtttctcaacatagacctcctccttgattggtccattgaggaaggcacttttcatgtccatttgataaagcttcaagccatggtaagtagcataggcaagtaaaatgcgaattgactcaagcctagctacgggtgcataggtttcaccgaaatccaaacctttgacttgtgaataccccttggccacaagtcgggctttgttccttgtcaccacaccatgctcatcttgcttgttgcggaagacccacttggttcctacaatattttgattaggacgtggaactaaatgccatacctcgttcctagtgaaattgttgagctcctcttgcatcgccacaacctaattcgaatcttgtaatgcttcctctaccctatgtggctcaatagaggaaacaaaagagtaatgttcacaaaaatgtgcaacacgagatctagtggttatccccttatgaatgtcgccgaggatggtgtcgacggggtgatctcgttggattgcttggtggactcttgggtgtggtggttttgaaacttgttcatcttcctcatcttgatcatggggcatctcccccttgatcattgctcctcctctggaggtggctcaacattttgattttctccttcatcattttgagctccatccttgttggggggccttcggcttccgaaggtcctcaaaaacatgatttgacaatgttttccaagtatgcgagcaggcatcttcagaatcaggttacgggtatacaagagcatggtcaagacgaagcttgactgggatggaaggcgatcatgacgaaggatgagatgatcacgaagctatatgcagaaaagcttcggcatgacagcagaaaaaggaaaccgacttaaagatgaaaagccaaattagacctcgaagaattactagagttattgataaatgtaaagggcattaatgtaattttacacgggctgcgtcccgtgcctataaatagatgaacagtattcctgtactgttcacgctgactgggcattcgctttagcatcacacttgtacccttactttccttcaagtcgaaggtacatttgtaatttgtcgttgtttatacaagtaatataataaaaggaattaataataatgttcaaattaatcatgttattttccgtgttttgtgtataaatctctctcatcttttattatgattatgaaggtgtgaccttcataaccttcgtcc

SEQ ID NO: 24123 - DNA, 800 bp, Zea Mays
acctggcaacactatcccctttcgccggcgccgctcccgctccgtcccacccgcgctctccagtctccacggatcgatcgaagcttccgtcttccggcgcgatgttcccgtgccgccccttggctccgccgcacctgccgcgtgccccttccctcgcgcggcttccactgtcgtcgctgcggccgccgtcgtcgtcgctgcgcgtggtgcggtgcatggcgaaggagcggcgggtacggatggtggcgaagcagatccagcgggagctcgccgacatgctcacccgcgaccccgtgctgcagcgcgccgtgctccccgaagccgcgctcggcgctgaccgctacctgtcgtcgctcaccaccatcgccgacgtcgagctctccaacgacctccaggtgtgcaaagtgtacgtgtccgtgtttggggacgagagggggaagaaggtggccatcgaggggctcaaggccaagaccaagtacgtcaggagccagataggcaggaggatgaagcttcgcctcacgccggagataaggttcatcgaggatgagtctatggagcgtggaagcaggatccttgctatacttgacaaactaaaggaggaaagggagcaacaagaaggaaaagatggagaggaagatgatgattcatatatatcagaagaagatgatggtgactgggatgcagatgagccagatgaggaggacatcatttacgtaaaatagcccattgtcttctaggaacttggccatcattcatccagaacacagcaggacctgtcagggcccaagggtgctgcggca

SEQ ID NO: 24124 - DNA, 63 bp, Zea Mays
atccttggcgccaatgtcaactgggaaacgccacctagatcagatcaaactcctcgctttgtg

SEQ ID NO: 24125 - DNA, 1145 bp, Zea Mays
ctattatggctattggatttagtgggtcaacaattgttccaacaacgatgctataactactgatgtcctggatgccttttatgcaccaatctgcacctacttcagatgtgccaagtatgtgctattgtatgcttcttgttgagcatctgacagcaggaacatggatgaattcaaagacactgttaatttatggaaatgccaaaggcatagttgagttggtggtgttctctgagatcagatgtggcacagatagttttttttctatataacagcatccagcgtgctctgtacctcaatgtgtgtcaagagtgggctcgaagatttggcgtcagcggaagctacaaaattgttattccaaacgagttcggaaatgttgtatccttgcacagttgcaccgtgaatctggaaacgttgtagccctatatgatgtgaatctgtgcaagtccttcagtattttatgtgaaatttcgtgctataactccatggatcggggaggtcagctcagctctggcttcacgatgaacaacgcgacacattgacaccttattactgctgtcctgtctaaaggctgaaatgaactactcctgaatggacggatcaacaggaaatgaaaaccagcaagggagaaccgacagatgggtccgcctgtcatgagcgcacacgtcattcatctccgagctccagcacgaggacaagctaaggaatgcccgcttggagacgcggcttcgaagctactgatcagtgtctgaatactcaatgcaccttgggcatggagactggaagcgaaggatgagcgtgagcgagacgtaggctacctgatcggtgtctgaatcctgaacacaccttggggccggatgaaatggaagatgaacatgtgttgcgaaatacgatcatacgagcactgttgtttgggtgtgttgtgaaagtatggccctatttgaagtactctctctttctttctctctctgtataccctggttgagaagaggatcgacatgacaaatctgagagatgttaaaaaaactcgacggtattatattaagatgacttgtgctttgtgaacctaaatctgaggagtgctactcggaccacttaaccaactcggctagaggctctttcgtaatctgggtgtttcgcaatctggg

SEQ ID NO: 24126 - DNA, 909 bp, Zea Mays
gcggagcacaagagaatcgagaacgtcaccaaggccgtctgaaagcgaaaaggccctttgcctctcgctctaccccaaaccacagcagtcagcagcagaccctcgccatgggactgagatccccgctcgtgctcctgctgctcctcctcttcctcgccgctactttccgtcccagcgcggccgctttggcccctccaacaggcagcatcgtgaagcagctgtcgtcggtcgtcaggtggccgcgggccgccccctcgacgcacgggcccaaacagcccggccacccccagtacgccgatggccacgtgggggtagccctgcaatttgagagcggctactttgtagagacacttgttgagggtgacaagcttggtgtcacgccgcacaccgttagagtatctcctgttgagggcggggagctccttgcggtcgactcggcacatagcaacattgtgcggataaccccgccactttctgagtatagcaggggaagacttgttgctggttctttccagggccattctggtcatatagatggtaaaccaagtgatgcccgattcaagcgccccacaggcgttgccgtggatgatatgggcaatgtttatgttgctgatacagcaaacttggcgattcgaaagattggagaatcaggagtgaccaccatagcgggtggtaaatcgaatatcccaggatacagggatggccccagtgaagatgcaaagttctctacagattttgatgtggtgtatgtgaagaaaatgtgttctcttctggttattgaccgtggaaatgcagcccttaggaagatttctcttccacaagaagactgtacttaccaggattctgcactcctatcttcagatgatgaggtccttgaagaaaagctcatgccgatatggttagttgtaa

SEQ ID NO: 24127 - DNA, 1794 bp, Zea Mays
aaaaaacttctccactaccttggttatcgcttttctggatttaaataagctctgcggatatatggagtgtagggtgcacagtcattgaaatggccacgggcaaaccaccatggagccagcagtatcaagaggttgctcttctttttcatgttggaaccacaaagtcgcatccacctatacctgaacatctatcgcaagaggccaaagattttcttctgaagtgcctgcagaaggaaccagagctgaggtctactgccccagacttattaaagcatccttttgtcactggagaattagatgatctgcagccacgcaatcatgctgcacacaaggactgttttaatgaaattcatgcacatgatatgccaaatggcttgggtttgaatcattcttccaactggtcgaccatgaactccaatagatcatcaaaaatcaagcccttatgggaggggagctgtgacgatgttgacatgtgtgagtttgcagacaaggatgaatatgcaccagtaggatctagctataatcctatgtcagaaccatttgataactgggaaaacaagtttgacacaagcccagagcaaagttctcatgaaccaatggaatttggtgaattggccaaacatgctgaaagcagcataactgagaatgattttacgtgtcctgttgagggaagttgtgaagatgatgtacttacagagtcaaaaataaaggcatttcttgaggagaaggctcttgacctgaaaaagctacaaacacctttgtatgaggagttctacaacactgtgcacggagggagttgccaaacttccaagggaaaattcccaatcagtccaaaattgccccctcgaggaaagtcacctccaagtaagacgaggggaggtgcatgtgacactttgaataacacagctcccgaaagctgcagcaagcaatttcctagaagcagtgtggtggagagcagccgaattttgagagaaattgcttctcctcaacttaatgagtttgctgataaactccatcttgatgcccaagatagcccaagcatcagcttcaccgaaaggcagaggaagtggaaagaagagttggaccaggaacttgagagggagagagtgatgagattagctggctgtggtaaaactccatctccaaatagaggttccaacgtgaaaaaggagtgtcatgctgaccattgaacagacagcagcattcgtcgtctctttatatcatcccacagaagacacaacaaatgatagtaaagtacacagtgtgccagagattggtggcaacagcagtacagcctgtgccaccttatcatttgcggtgttagccaagctatgatcgcagaaccgtcctgtacaaaatgacagatttacgttgaagtggatcggtacagggggcactcatcacccattcaccctcaaatcaggatcattgtcgctgctgcctagaaggacgtcatgctgacacttccctgattttaaggccgcatttatcattctttttgatgcagtgctatacgtcgggcttcggttatgtatggtttatgttgagaaaacggtcttgccaaaattgtgtttgtaagcccagattggcgtggggcttggttttgtatggagcttgtttgcgaaagtgtgtaataagatagtgatgcgagatacgggtcattctgcatttctgcttgcagaatgaatctgagcttttctgaagctacaactgactgtaattaataatttcaatcaaatcgtgagtcctgtgcctgtatgttacacccggatttaagagataaaaccaggtgcg

SEQ ID NO: 24128 - DNA, 1754 bp, Zea Mays
tgcaagcgtggctgtctcctaaaccgggtgcctctcttcctcaagctagccacttctctctcgatcctctccaagtcgaagcaccgaatctactgcccctcccacctctcacacgtacgtagtgtgtgtgtgtgcgcgctactactcgatcgtgtgtcgcgcgcacacacaaccatccaagaaccaaagattccaatctgaaccaacgttcttcttcacctaaccagctagcagttcgatcgatcgatggaggggggcagcaacagcccggacgggcagtcgtcgggcggcagccccgaggagcggggaagcggcggtagcggaggccggggcaccggggagccggcgcggtcgcggtggacgccgaagccggagcagatactgatcctcgagtccatcttcaacagcggcatggtcaacccgcccaaggatgaaaccgtccgcatccgcaagctgctcgagcgcttcggcgccgtcggggacgccaacgtcttctactggttccagaaccgccgctcccgctcgcgccgccgccagcgccagatgcaggccgccgcagcggcggcggcggcggcggcggcatcctccgcgtccaacaacagctctcccgcggctagcgcaaccgtcggccttccttctggcgctctacaatatcctttggccatgggcgggaccgccgcctgccagtatgagcagcaggcgagctcctcctcgtcgtcgggaagcactggcggctcctctcttgggctgttcgcgctcggagccgccggggtgcccggcaccggcggcggtgggtacttccaggcgtcgtgtggcgcttcgtcgccgctggcgacagggctgatgggggacgtggacagcagtggcggcagcgacgatctcttcgccatctcccgccagatggggttcgcggcggcgagcaccgtcgcctcggcctctgtggcaccgagctccaacgcacaccaccagcagtattactcatgcgaatcacctgcagcgacgatcacggtgttcatcaatggagtcccaatggaggttcccaggggcccaatagacttgcgagccatgttcggccaggacgtgatgctcgtccattccaccggggtcatcctcccagtcaacgactacggaattctaacgcagaccttgcagttgggtgaaagctatttcttgcaaggccaacttaaaactgccgcaagtagctagattgtagcgcagtctacggccggtctctagctactcgatattcatcggttcagatgggatgcagctcacgaatcacgatcaaccaagatgggtcatttgcatgcaactgatatatatctgtccatcatccatatatataatcgagaagaaaagttagctagcaccaagaaaatatacatatattgcacctcaagaaagtaactatatatataatatttatgcccttaaaacataagacagcgtatgtgggcggttcagtttttcgattggattatatgaattacaatggatgcctttctcccaagcaccattttatttacaaggatacgcatgttaatgcatgcatgcatgcaggaagaatctccttgacgacagtgtgagctacatatatattcatcttagctagacggttgcgcgcacctttgtaatgatttaatttgtaactgtgtaatgttgtatgccgtctatatatgtcggctggaccgtgcatggaatgtctgtcctcatgtaaggccaaatggagctctaaaatatgatcttgtttctac

SEQ ID NO: 24129 - DNA, 995 bp, Zea Mays
atccgaaaaccgaaatcccccactcttctcacccgtttccccactcgctcgctgacacatcgcacattcgcaccataccagataccaccgccgctgcacacaaacccagaaaccaccggcaataaacaactcccgctcccagtctccgatccgaggaagccggaagaggggatttcgagccgcggcgatcggggctagagtggccctcgacgcgtccgcgggtggaattgccgagaagccgagagagagggcttggagcggagttgcgggaggtgggagagaaggcggcgatggggcgcctgttcctgatgcacctggacggcaacgtctacagctgcaaacactgcaagacccacctcggcgttgccagcgacatcatctccaaggccttccagtgcaagcacggcaaggcgtacctcttccataaggtgatgcggcacatgagaagggccagagatacaaggaaggcaagtttattctggagaggtacaaggtgtcgggccctgacggaagccaatactgggttccacaagatgctcacttgggcggaagcgacgccgatgacatataaaacacgatccaacaagctcaagcctgtcgttgatcccctgtaaataacctgggtggcgttgctctttaggcagccgacagccggggattgctccattgaaataattcgccggcgtaaattgttgctgttccaggtgacatgatcgtatccctccctccctcccgttgtccctggaagtcattagatgttaccgctgtatatgtgcgtaacctgtgttgcttataagtccatctgagttgtatgccaagcactagtgaccaaataagtaaagtaaatttctcaagtgtctggtcgacctgggtgtcaagcgagggcagtatgtacaaatctgcattgtattgtgtgttcggttccaacgtcactcttaaataaccgaatagctgcacgcttgtttttaaggtgtcctgtgctactatcatgtctg

SEQ ID NO: 24130 - DNA, 1213 bp, Zea Mays
gtacgagacacggcggtagtggcagctggcacgaagggagatgattaaaaataccgtggccacgctgatggtgcgcctccaccacctgcccctgccccgcgccgcgcccgctcccacctaccgttgcggccgccacctcgccctcgcgccccctctccctcggctgcgggcatcggccgccgtcatgtcaacggcggcggaacagacgatcgccgaccagaagcgcacgctgcgcgccgaggtgcgcagggcgctgaaggccctctctgccgaccagcgcgccagcgaagatctggctattcaaactacaatactggattcctcttggttcaaagcaagcaaacggttgtgcgcttatataagctgtcagcagttgcgagaagttgatacatcaaaaatactagcagagtgtctaccgtcgaatcctgaggaactggcaaaggatctttatgttcctcgagtggaggataagaaccgtaacatgaggatgctcaaaatcaccaccatggatgatttagttaagaattcaatgaacattctggaaccatcgcctgtggatgctactgggaacaatcgtgaagatgtattgtcatcattgtctcctgttgatctttttttattgccgggacaagcttttgatagaactggtcgaagactggggcgtggtggagggtactatgacacattcttgctgaagtaccaagaacttgcaaaagagaaagggtggaaccagcctctcttagttgctctttcgtactcggtgcaaattatggacgagggcatcatcccagtcaattcaactgatgttcctattgatgctctggtctcatcgtccggtgttattccaataagtgctgcggcgttgcagaggatgcaatgaagttgattggcctctgtagccatgctttcacaacaagcaccttcttctgatccctggttgcactagcaaatacaccagcagatcaaggaaactgtctcttttttccccctcgtggctcctctcttgtatcatcttttacgttttaacagggtgaactggacgtctacatcttattccagccacttcagatttatttttgttgaggcatctgtagacaaatcttatttaggctttgttcggttaatcctgttaccccggttaatcctgttacccatggattagacgagattagaaaaaattaagaagaagtttaacttatttgagatttaaacc

SEQ ID NO: 24131 - DNA, 617 bp, Zea Mays
ccgttctccactgcgccaggatcgcgtaccaggtgccgatataaacagaccatcctcttgttcctcctcccctctttccatgcctagccgcgcgccattcatcgctaccgcggggtctctagtcctcgccgcgtggtataccttccccgcgcgcagattgaggtgggggcatccgccaccgccgagctctggagccccagctcgagctcttcatcgccatgccgcgctgggcacggccatgaatttgccggggcggagccgtgctcgacgaacgctgatggctgggggttgccgccgtgggtgtcgcgtgtgcacatcatcgcgggattcgctgtgcgtagtccagggccgctctggagcgcatatgaccggaggatggctccaaatcttcgttggggtcatcgggggaatccggaatcgctcgacatggcaaagtccgccgcccccgtccactttcaaacatggctagacacattcaacgtcttcaccatcggtgagtagctctcggataagtttgccagaatctcctcaattcgtagtcttggtcggattaggcgataaggttctttggcgcctggctcgctactcgccggcgaggccccgccgaagggacgggc

SEQ ID NO: 24132 - DNA, 2091 bp, Zea Mays
aatgatcaatagattcctcttcttggtcacagaaaggacaacaatcaggatgatctatcccatggcgtgcaaaactatcagcagtccagcattttttatgtgccacaagccatagaaaaaaaatacattttggtggagctcaagtcttccagatcctctcccaaggcccaaactgagtagagcccacaagcaaaccgtcataggctgatttggctgagtattgtccaccagttcagaaacaccaaataataacatcttttacgcctggttgtagctcaaagtcagaaatgatgtcccattatcttaagaattctataagaatccctactgtgagctgcccttgaatatttgagatccatgcctggtttgtgagagcttcctgtacagtgtgctttctcgatattctcttcggaattattgcatgtaagcatgggataatatccacagcgcattgatcttgcaaccaccgatcactccgaaataaagtgtttgctccatctccaatatcagaccacaaagctatggataagaaacccaacctgacactccaaaataaagtgtttgctccatctccaatatcagaccacaaagctatggagaagaaactccgaacttgatctggaacatgaattgggagagtagcccaaggatggtttggttctgtttttttgcaaccataaccaccacattctcaaggcccaattcaagttttgaagatcggaaaaaccaagtcctcgaagctccaatggacgacagacttcttccaagcttctagacaatggccacctttggcttctttacgagccccataggaaaccgtgtctgatttcatcaatagcttttagcacccaggatggaagatcgagcgccactgcaagatatatcaacacggcagtgagaacaaactgaacctgaactctcctcccggctcttgtcattaagtacactttccaagctggtagttgatctgcaatacgatcaattggtttccatgtttacttaagaatggagatagaggctgaccacatcgggctcctgctgctcgcttctgctggttacgatccgcgtgtcgccccttcggtctatgagaagctaggaaagatcggaggagattcagcactgaataactacctctcgactcacccgtccagcaagaagagggcgcagcttctgtcgcaggccagtgtcatgaacgaggcgctgaaactgtatagggaggttagtgccggccaaggcaccgaaggtttcctctagattctgggacctgctcctctgcttgtttcaaacgcctcacaaagaggttggtggtcttgttagctgcagtagtgacggcctgtggcatcggcgttctgagtggttcagaagcctggaagattaaactaagctatttgctcctcgttatttccagtcgttctgatgtcgaacggggccctcgtcgcttcccctagcagacgcaggatagctgtttctgcatttgtcattaggaaaaaaaagaaattaagcaccgtattattgtcaataattgttggttgacaccagctcctgtttcaagtgtggttttgctctattcatgctgacgcctcaaatgtccgtccatgataaaaaaaaatcttgagcattatttcgtacgcagatatgacatctagtcaggattctaaatattcgccagtcgtaaatgacaaacaatatctcagctttgcttccatcagcagcaacaacatattatagagcaaggactggttggtattatctctgctcttgaatatttgtcatctattaatttatttttaaactaaaacatggtaaacaaaaaagaaattagagagtatttggtcctgacagcgtcatgactcacgagtgattagaccgcagcctgcttgtgtcgcttccgccggatttttgtctcatcggaggcgcggatcgatacgaatatgcagtgccatatacaattgcgctccacggaaacggagtagtttaatagtgagatttatcgatgacccagggctacaaggcaaggcagtgagccgtgatttgttgctttctgtcatgccggccaatcagccctttccggcagcaaaaggatggctggcc

SEQ ID NO: 24133 - DNA, 2303 bp, Zea Mays
cgtcagagtagtggcgaagatttgcccgggcggagaccccactggatccatgcaggtctccgcccgtgttcccgatccggctaactcctcctccgcttccgtctcattcgtccccataatcaaggagtctgctctttctaatatgacccaccgcaaacatcgcgagcacaaactcgattggtgctatctcaacgacgattcgtacacagacatttttcacaacgaggttaaacagcttgtggataaaatcttctcctctgatggccacaaccacgcatgtgtagtcacttgcggttccactagcaaaacccaccttgttatagggtccgatcatcaaccgggcttgctcactatggccatggagcgaatatttgactatgccaaacctattagggcaactgtcagtgtttcctcttatcatgtgcttcaagacagccatgtctttgatcttttggatcctaagaacaacgaggtccttgtgcgagaggatgctgatggaaggactcatctgaagggcctctctatggttgaaatcaattcaattcaggagtttcagaatttgtgttatgatagtgacaaacaccaaaatcgcaccaaagtttccaaagctaaaggacacaatggttttattatttttatttctaaatctgatcagaatggcaaagaatcctctgtatcaaaaatgcattttcttgagttggcagaccatatcaatgataagcaaaagagccatggtgaaagatttgttcaacaaaattccaagaagtccttatatgccgtgatggatgttgtgcaagctctaaacagccaccagagcttcataccctatagaaaaagcaaaataacccatattttgcaagactctttatccaagacaggtggtgctttattaatagcatgtttggatgaagtctcatgccaagatgcaatctctactctaagcttggcttcacgctcaagccaagtggtcaatgaacaacggtacaacttatccttaatcacaaaaggttgttcaaagtcaaatgtaaagctttcagtgaacaataagaatttgtcaagatcgttattgtcttctatccaacaacaaagtcccgtgctggagaagccatacaaaacccaagttaataacattgcagtaaaagcaacaagatctctcaatgccaataagagatctgaaacaagcacacattcagcaaaaaagactgtaaacttagtctctgcttcgattaatttgaaacactctggtgctaagtctattctaagggaaaggaacttctttattccaactactaattcatcaaaggaagataagaaaacttttgtgacaactgcggtaaggaaacatgagagcgatatgcaggagaatcacaatggcacaaaaaatattgtagtatcatctgaaatgcaagtagtaccttgcagcatgaaagagatagtatcaagtgacatgaaagaagaggatcattcctctccaggttttcttgcagagaacttatttgctgacttgggctttacatgttcatctaatgcagctgataaaacaactgaggaaaatccagccaccgttctccaatcttctccgaagataagcgaccaattgagaaagatatcaaattcactgaagcttcttaattctatggcacctagtatagtaaaacagaaaacagatatagttcgtccacaatcctttgacttagttgaagcagaaccaaaaactcctgaggtcaacttaaaactttggcatgctcaagatgcacaagaatcacttaaggctcgtagcacagggattaagaaatctctagctaaggagtgtttgttgtttctaaacagcgctaataaggagcagttaaaaagtttaaagggtattggagagaaaagggcaaactatatacttgagcttcgagaggagtcaccattgaaagagattgatgatcttaaaagcataattgggatgagcaaaagagagatcgacaagatgatgtcaaagttgatttcggactcggagatgaacgagtaagggttgtattgatctcttcccacttaggaaaggaggagaaggaatgtcttctctacgtataggttttatacaggaatgtcttgtctacgtaacgtataagttttgtttttaaaaaaagaatataatcgggtggaaggctttcaggtttgctgtattagacaaaaacctatcagttaccctgtcatattgtgagtgtgcatattgtcatattgttagaactgtgagaacaagatatgtttatttggctccgccaatattgcttagcggcaaagtatctgtatcgtca

SEQ ID NO: 24134 - DNA, 1871 bp, Zea Mays
ttctttcatttgattcaatgtgttaaggattcagataatttagtggatgtggcactgactataatcagaaatgaaatatcttcagttcctatctttaagtgcatggcagattcatcaggggtgcctttccttaatcttgcaaccttacaggggatcttgaaatttctttgctcgaagctacaagaagaggctgagggctgttcccttctgcacaatcagcttctcagtattcctattggtacatggtctccacatacggggaggtcaagtagcaggcaactcagaactttgctactgagttctcctctaaatacctgcctggatattctgcttcaagatagagtaagctcaattcctatagttgatgacaatggatccctccgtgatgtctactcactcagtgatatcatggctctggcgaagaatgatgtttatgctcgcatcgaacttgaacaagtgaccgtacaaaataactgaccagatggctgcaaacaacgtggtagctgtagattgtgacagaactgaccagatggctgcaacttgcctcgtcaatacttcagagcttgttaatgtctactcaaaacaatagtcgtggtaggatctgaatgcggtgagtggtgcaaatatgagttcttaggttggggctcatttcaacggtggtggcagagcacctaggatatggtctgacggagacaacattggattaaggagagttgatggtaaattagctcctcaaacttgctttgaatctaatcagaggaagcaggcagaacaacccaaaaaatagactcaggcctgtttggcagagctcggctcctagattctctggctctgctctttgattctctagtgaagacgtgaagtgattgtacttgattatggtgggggagcagggtgggagtaggtgagatttgattctagatggttttgaacagggagtagtggatatcaggttttttagctgccaccttgtaatgtaaatggagaagtgattcttgcctgcgtccattcaaagtgttgactttatagcagttgttaatgtttttatatttcatcataagacttgcataattggttctcagagaataatacaatccttgtcttttactctatattaggctttggatgtgcaataccaggtgcatggccgaagacagtgtcatacttgtttacagacgagtaccttgctggaagttttggagggattgtccattccaggagtgcgacggcttgttgttattgaacaaagtaccagatttgtggaaggaatcatctcattgagagacgtatttacatttctccttggatagcatgtgtagccattccatacatgaaaaagcttgctgtacttggttcaaacgaaataaaaagcttacaaatgtgatagtcatcttcttgtttccatcttgttttggttgatattatgcctcagacactgcatatttaaactgtgccgaaaaaaaaagaacagtggcaggtgctgcagcccttctaagcagaagtatgcagaagtgttcaggtgattgtttcttgcactcgtccagctaacatttcacgatttgcaggtttgaagaactgctacttgcaagttaggaatgcttcacgaatcacgatatttttaagaggccgagatttctgtttttttaaaacatcgatacaggctacagaatcagtttcgtaccgtctttgaaactagggaattttgaaggaactgaatcttgtggcttttttattttttttggaatgaggtgaaatgacctcttcaaattcgaacatctttttttgcgtggatccatcaacaacccccatacaaatgatttttttgaggctttgtcattctagttctattggatttgcagggtgttcctgta

SEQ ID NO: 24135 - DNA, 736 bp, Zea Mays
cgtgcgtggtgcgggtggtttcaaggacgggcaagcgccacgccgctcgctgccgatcccaatccggctacagcagcggccgcccgcctgcggggcctccctccgaccgttccccccgccctccatggcaggctccatggtggaccgcgccaccagcgacatgctcatcagcccggactgggctaagaacttggaaatctgcgacatctgcaatcgcgaccccgggatcctcattcccccttggaaccgattcttggcaatgccaggcgacaacgttggaggcacagtgtggctttgcagcatgctcttggcaccagtggtgtggttcctcatgttcatttcatttcccccgaatagaagtccatttaagccatcaaggagggaatttggtctgatggttgtgtattatgccaagcgaggtgataagcatcacgctcgtgcaacatttgagaacatgagagcaaggggaatagaacccaatgcgtttgtcttcacaagccttgttcgcgcttatgcagttgctggagatatgcgtggggcactgtcatgcgttgaggaaatgaaatctgaaggcatcgaaatgacagttgttacttatagtacccttatttcaggatatggcaaaactaatgatgctcaatctgcagacaacttgttcaaagaggctaagaccaagattgacaacctaaatggaatcatatatagcaacattatacatgctcactgagcactcaat

SEQ ID NO: 24136 - DNA, 219 bp, Zea Mays
tacacgaaagaaagtcaacacctacatatatagggttgttgacgcaaataattgtactgtgttcgcaaataattgtactgtgttcttggtctagtgtagtacagcagtcctaatgcttaattgttcacaggttatatttggaaacaaaaaaatgttaccctagctataattgtattgtactttgcatgtattctcagataataaagaactggatttccc

SEQ ID NO: 24137 - DNA, 671 bp, Zea Mays
gattgcgtcaaacagtcgaggtacactctttctgctgctgtgacttacatggcttccaagcggataaaagcaaagaaggtcaggttatagcaggaatttagtccaaacttccgcatgaacgtccatttgcgcgcatggtttatgcttctgcactggaagatgcccatggtactggttctttcgtgtctggcaataagtataacattgcacttttttgttccaagttgttctacattgatactgggtatctcacagttgagctctggggttacagcaattttgttagtcagatttctgatgatcataacttggaaggcctgtaagacttgtggtttccttgtagtaatattttggcggggaactttagctgcttgttcttccagcgtttttttttcacgttgactgctccaccggaaaagttgttctgtcgcgggctcgcgtcgaggacacaccagctcaagacagagtttgttcccagattattcatctcctaatggatgcttgcacaggcagctctgttctactagttgccataatatatgaaaactgacatctgaatgaattgtgtctgtattcagtttcactgcacgattggacatggccattgttttttctccatcaacggttagttgcaatgccttctgaaaagggtattttgaattattttcgag

SEQ ID NO: 24138 - DNA, 6596 bp, Zea Mays
gcgctttgatttttacagaagcgtctctctcctcagtcctctttccctctcgctcccggatctgaactcctccgaaaaaatcgtacccgagagaaaccctagcactggaggttttccgccgtggcgcctcgccggagacctccgctcgccgtggccgccgacgcgtcgccctcgtcgtccccccggaagtccggcgaagatgcgccgccgcccgccgggagcacgccggcggcggcggccggcgtcaccccgtgcgagcaagccaggaaggcactgtgtgtgcggtcgccgtttgatggggaggaggctgctggacgggacccctggctgccatcccgtgttgccagatgggcggcggtgggcgacgtgcggaagaatcataagaagagccagccccaacagcagcaaccggagccatcccctcccctggagcagaacccgagagtgcctgccgggcgcaagggcttttgggagaagttggagccctattttcgagagttcacagtggatgatttggaggaattattgacgaagcatcatttctgtgctagccagattgatccatgttttgtgatacctgttgtgggctctaaggagttaggggagaattcagatctatctcatgcttttgaagtagatgaaagtccagagttgagctcgaatttgggcaaccataacaaggatttggataggagcaaagatgatattcaggacagcttggattatattggaggcagtgtagagctgattactcaagatgagagtaataaagataattgtgatcaggacatgcaggaagtgattgtgcagcaagaggagcagccggttgaaatcgctttagatcaaagcaggactgatagcattgttttaccgggatccagagaagatcggtggcgttctctgagctggctcttaggagcaaggggacggtttgtgctcacttcagagcgtccaaacaagaagaggaagctcttaggtgcagatgctgggctagagcaacttgtacttctgccatcccctgaaggcgaggctggttcagtctgtgatgagaaaggtgctctgaaacctttcaaaagggaccctggtccatccatagatggaggaaaccaggaatttgtacatttattttgtagtctctggagaccagagttttatgttgaggacatggaatcaatggagcctgtcaccaatgtagtagatacccaagagaatcaatcaaaattggtgtgcagcctttgcaaggtcatgcatggtgcatgtgtccgctgcagccatggagcatgcaggacttcctttcatcctatatgtgcaagagagttcaagcttcagattgagatatgggggaagtttggtcatgataatgttagttcttcttaaatctgttcattatatttgattgattattattaatttttcttgtttttatctgttactaggttgagatgcgagcattttgtgcaaagcattcttctgtcaaaagcatcagctccatacagaatgacaaaagtgtatctgaactggactccgctcaagttgagctgcatgatggaaagcctgttactgggaaggaacagcaagtgagatttacgcgcagtaacaaggacaaatttgtgaacagcacaattactactagttcttgtagcctaaacgaagcacatacaaatgaagtggctaccatttcacccgttcttggaaggactcaagaaacacaaagtgcagatatggctgctgatcaaccctcttcagatgggaatcttatgagcgattctggagatgtttccggaattcttagaaagctagtcgaccaaggaaagattagtcttgatgacattgaattggagccaagtcttcgttcagaatcagtggaagctgctttccagccggagacaactgcatactcccctggtttgaagttgaaaatgatcaagtggctgcagaactctgagtgtgcaccttctgttcaggttaagtcatttaaagagggttcattggcacaaggtacattgcctaggagtgaaagcaagaacttaaccactgctacatttcaatcaggacaggaggaagccatttcatcgattgaccatcattttctggaaaatgataatgctaataacggggatttggttcaaaatggctttcatagatgtcctgatcctgatgtaaatcagatttctggccgacatttgctcaagtaggcctatccccattcccgatgcctctgtctcctctctctctcccccctttcctttcctctcttcctctttccattacagtcatgtgtgtataatgcgtgggatgcattgcattgagtctctagggtgcatacataggagtacatggcttggagataaggaaggttatctccggattacaatcaatccaacccatcctaaacaaccatatcaggagttgcctaatgtactctaacatcccttgcagtcgtagcgttagcaacacgaacagatatactggagaacaatggagatatccccacgcagttggaacaccggtgcaaatgctgcgactggagtagcctatgcagatgatagccctttgtgtcgataatgtcgaggtagccgagtgcaaggacgcggagccgttgtccaggtgtcgtgtgtagggtagttgtggtcgatgtagctatcgaggatgtcgtagaagacaaattgcacaagtcgtgggcacatgcgcatcatgcgggaaggcccgcaatgtgccaagggacgtcggtgtggatagtggtgtaggagaagggcggcatagacgaagacggcgacacagtcgatgcaattgtagaggaagaagcttatgccgagggtgatgctgttgaaccgccgtgaacgaggcatgctctaggtttgccacgcctgtaaacacgtcatagacgaatgcatgtgtcgattttgctagtattgggcgtactaggtagaaggcccaaccaattgtcagcgtctgaagggaccaacggagaaggcctcaacgacggtcgcgatgtgcaatagaacggcgaggaagaaggtgccgatgcagcccactgttgtcggagtggacgaagtaggcgaggacgagatgacgacgctggcgatgaggttgtgttggacgaaggcaaagaggtagtcgtggcgatagaacgagattcctagagttgctgaggcgagggagccacgatgcataggaaggtccttgacaacgccaatgtagtgcgatggcggtgctttatggtggcgaagaactcgaacaaccggagaagaccatgtgtgagagacgcacaccgataaatcgacaacgtacatatgcaacggtgaggacgacgacagacgacaacgctgctggccgaggaggtgacgcaaaggcaaccctcttgcttggtgaaacatcacgcgatggacgacatacgtctcgggagggcggtttgtctgcgatcggttgatcaggccaatggcgtgcgtggtggcgacgatgagccgacatatatggacgtgcagacgaagaggcgtggccacgccaggctttccgagtacgctgtaggccacaccagttgcaccgttgaagaagatgaagaaaccggtgttgttgaagccgttgtcgatgatgtgcgagttgataggcggtgggcgatgggggcatcctatgggggcgatgggcttggcggatcagagggacccacgatgcatccttcgagggcgctgcccccaggaccttctcgcacattattacaggcagtatttcatttgaatggataactaacttaatcctgcttttcccccatgtagcatggatggttactgttgctatattcatcctatcattgagaaaaggttgcaaggtttgtggagtaatagtttggagcaaactatacagaaaaatggttatcatgaagagttatcttggtctcttcatgacgaggactttggtggttcatcaacaaaacttgtgcaattaacaggcaaaactgccatggaagtctgtaaagcacaatcatcagatactctcaagctttcacctgatgacgaaatagaaggggaaatagtttatttacaatccaggctacttgatggtgttgtttctatgaagcagagatatgtccgtcttgtatcttgcagaagatttgatactcaaggttgtccagaatatttcttatgagttggattctttcaataaaagaaaatgggatcatatcattgtgaatcagtttcttcgtgatctgagagaagctaagaagcgcggaaactcagagaggagacacaaggaagctctagctattctggctgcaactgcaccttctgttacaccgacctcacgaaacacaacagtgaggaaagagacagaaaacaatgtgacacctgctaaacgagagaacatgccaagaagcattactggatcctcaagaattggccaactatcttcttcaccacaagcaaaggatttatcattttccaacagtgatgtctcagacgaaactaactttggcattttcaatctggcgaagttctccaagaaaagtgctcttccctgtgatatatgcatgcgatgtgatacaatattgaaccgtatttttgtttgctcgagctgtaagcaggctactgtacacttagattgctaccagagtctggtgtatcccactggcccatggaaatgtgaactttgccatgagatgccctcagattctgttacctctggtgaacaatcagaccaaaatggtccgaaagcttgtttggtgcaatgtggtttatgccatggaacatctggtgcttttagaaagactgtgaagggtcaatgggttcatgctttctgtgctgagtggctgttggagacaacattcagaagagggcaacataatccagtcgacggaatgaggcttcatcacaaggataaagatacatgctctatatgccaccgctgtgttggtgcatgcttgaagtgctgtacattagattgtcaaattacttttcatccttcatgtgctagagatgctggtctttacatgaatacaaaaagattgggtaatatgttacaacataaagcatactgttgtagacacagtattgaacagagaaaggcctatagtcaacaatatggtcctgatgaaatcaagggcatgaaacaaatgagggctatagcttgaagatggtgaagaaactcttggattatatttatatgtttctgtttttctcgttcttggcaggttgaactggaactattacgtttcctttgtgagaggattgttaagagagaaaaagtgaagaaagatttggttggatgtgcacatgacatacttgctgcaaggaggataactgccgtctcttctttgtggacttcatgttatacttctggacctggagcaagttcagaatctgccactacttctgttaataacaaatcatatggtggaacaattcaaaggtctgatgatgtcacagtgagattggaagatgtcacagtggacagtacagttaccaaaaaacatactgtcaggttttctctgcataacagggacactgataggaacactgctgacagttccacatcaacaatatcatacaaacggaagttggatgatggggaatcacttgcattcaagagtcatcccggaacaccagctactgccttgttggagtcacgggatgcagaaaagccaatagataaaaagaacaagacccctccagagagatatgtttacactcgccgcagctccatgtccaaaaggaagcaatgtagtcagcatgtagttcaaagacctggtggatgacagcaggcgaagtcgcttcttgggatatctggataataatattcttggaagctcgatgcagaaaaggacaaagtaaatacagcaagcggggctggccattaatcatgacagccgcaggggctggcgcgtggccgcactggaatcggaaatttggtgcaaattgggctcttcgaagatttgaccaattgagcccatgtcaccttggagtccaacatgcgctgaattcattcactaatttagtcaagggcaggttttgtgaaatacgcccaattgccagtatggcgtcttcacattatgtcgaagaaggaaatcgattgagttatgtgtggtgaaagaaagtgggtagacaaatattactgactggtgaaagctaccaataggccatccgcacattaatgaccatgtttaggagttgttgctatgtactaacagaactgcatgttttgttgtgtggctccattctgacttgtgaaatgaactctcggtaagtcatagggcatttcatgtttgtacaggcatgtaggtttagctttctggtatgtagctaaattcaaagcatcatcttgtagccttatgtggttaaccagatctttgatctattagttaatttagtaaaccaagagctgccttgtgttcgtatgggttgagtcgggcttttactgtattgatatctattattagcgtgaaggctgtttattgccgatgttgagcttcataagcattatctttttttaacaaaacacagtgcttgttttgtgaatacttgtaacctcgaatgtgtaataaatgtagcacgtctattcaactcaatggctcaagtgtcatatatggtcaaccttgcatgtcc

SEQ ID NO: 24139 - DNA, 1511 bp, Zea Mays
cttgccgaagtcccaacagccagattgtgaaagaggaaacctgggaagcagtaattgctgactcgttgctttatgcgaagggtttattgctggcagttactttggttattgattggtggctggcctttgcctactttctgggatttcttgttatatatgctgtagctcaacagccaccttatgatggcctaggccattcaaatcacttgaccccattgcaacttgaaagtttgctaactgaagagccaacatcacgattttggctggtatttctgtacatgtttttaatggaattctaatattgttatctcccaaatttccagtacattcctgcccgctttactattttgtcaagacttgtagcctgtaggtgcctacaattgttacaaatgtgtcactctcatcttatagaaggattagaggagcctgagaagaatttcatatggtttgatgggctgatggaaaccagttaaattccttgcccaactgcgcaacttgatttagagacacagttgctatataactttagtgcctatcattaaaaatatagtttgtctacttcgatagcaacggtatcaaaatctgactaccttatgaagtttggagtcttctcatttcttttggttagtgagggaacttgtagggggttcttttttaagaattgccccaaaagtttcttgcccataaagttaggtgtatgtttcaatttccctggttctttgatgactggatatttttatttcaatgcaaacaggtagaattccgaacttcattttcagcaaaatgtgtacaagcaagcagcattctgcctgaactttctatcgtgtactccaacaagaacatctcttttggaacaattgaccttgggcatttcccaaatgctgcagcaaagtttgggatatccatgtgggatcatctccccacttacatattgtttgacaaggtgactgaagtttctcggtttccagaaatcacaagtgaatcaaaagtatttgtgccaaaagttactaagaaacttctttgccagcattttgatctcgacagacgattgattggatacctatccacctgatctgacaccgatcccatatgcctcaaaggatggggacatctcccttttttgtcgctgaaccggacatctgtgtgtcagcagcaatcacttcaggggggtatcgtgagccttgtattattcggcgaactgcttattcccttttaattaaggcccagtaaactttgtggcggaaaaacacacacacacacacacaaccaatttctgtctaatctgtctgatactgaattatagaatttcactaccatgcagaggtttctgtaatgatttgccgactatgttttgtcacattgtgactgcagcagcagtcaattcagacagcatccacttccactgagccaggggtgtcccggaatttgttcgcctccgctcctttttctcttgtgttagtggcctgcacggtaggtcttcctggctcccctccgttccatttcgttgtctg

SEQ ID NO: 24140 - DNA, 2400 bp, Zea Mays
ccaaattccaattcaaccccctctctctactctgctcttcaaatcatcaccaccgcttcaccgctcgcgccagccaatgtcaggcgacggcgacggcgacgtgcgcggcctcgaggcgacggctgccgccgcggcagaggcgacgcgggagctgcaggaggcggccgcggccctcgtcgcaacccgcgccgccgaggaggacgcgctgcgccgcagcgtcgtggcgctggacaccgacgtccgccgcctccagggctcgctccacctcgacccctccacgctcgacaaggtcctcatcgcctcgtcttctgcccttctcttcctccacctcttctcctgctaggctctggctcatgaaagcgcggttgctcctcccgcgtctcagatcgcgattagcttgacgacgcggagttatgtccctacggcgaggattcccatccgttgctctccgtgccaatctcgtgcatggcatggagatgcctgcctacacgattaactgggttgccttgtttcgtccacattttttgatgatgctggttgtggaatggatacgccccactactgtttcggatgttccaggataagagcacgtccaattctggtagcttgtcctctgtctgtgtctcataagctgggactgggaggagttgtgtcaacacgacttctatagtgcattcaaagtttcaaacaccccctaattattattctcatgatcatacgcctgtagtactccaatccagtcaacctcctgtacaacgagggacaataccagagccagaaacacttggaacgggcagaagcgtaccaattaataaaatggattcaaacaataggaatgcctcgccggctgcccaaagaagtaaagagcataccttatatttttcatgggtcaatgccaaataaaaggcaatgatacgaacacagtacgttcaaacattcttttgtgtcgcttgttgcttcatgttttacctagttagcttgttatacaactattaagcacggttgttgtttgttggtatatgatccgatattccgacgctattggtttagctttgaaacctagtttttttacattgttgttgctcctactcgtactgatacaccggctcctccactgttggaaggaaaatcagatgccaatgaaattacaacagcaagaatcagcagtggaacaacagcaagggggagaggaaaagctccccgaaaatctcctcctctactttgagcaaatcctccacgatgacccactcatagttccattgcgcaagatacttctggtgcagagaccacaagcttgccatctccgccgagatcctccccgagctttaccatgctgctcgggatgcctactacaacgcaagggatgccccactatcgcgcactaatctcatgaggcacaccaaggcactgctcatactttgtcctgacctactcactgcatggaactccaggaaaatggtgctatcagcgttgtatgatttcacaaagctcaaggatgaactgcaattgtgtgccttgatcctttcctactctccaaagaacgagagcacatggagccataggagatgggtgataaaacaagttgctgagcaacatcaagatatgttggagcttatagggaatgaatccatactggtcaaagagatagcagagaaatcgaaaatgaactatcgtgcatggaggcatcgatgttggcttattccttacatgacaaggaaacaagtgctggatgaactgaatgagtcaacaagatggagtgagctacatgttgctgacaactgctgcttccactatcgaagatctttgctgcttgcgctactagacaacttctttgggaatgaagaggattcccttagttgggagtcagatatttgcttgctatggaaggaggagcttaggtgggatgagatgctgatcaaacgctaccaggggagagagtcgttatggaaccaccgtcggttcctttcacacttgtggatacaacacttgctcactgttgaaggaaactggcccgcaacgacatcccagatggatatgtttgtcatccaggagatacaactgctgtcagagtgcctgcatgatcctgtggatgagtttgaggagtcgcgtgtccaagcagagctttcagcgctctacattatgtggataacaaagcaagtcccggatgtgaaggggaagctggaagagaggttgcattttgcctccatggggaggctgaaggacgtgctggcaggagcctgcaggccagagaagaggttttggatgaatttgctcaacctggctgatcaatccagtgacgtacaataatacatgacctttcttgttgagtttgagccgtcaacatacatgacatggacgccaagctcttgcttcaggtcctgtctcccggatttctgccaa

SEQ ID NO: 24141 - DNA, 808 bp, Zea Mays
ctcttgtcacacacttcaatctgtgatcttgcaggcaatatgtttcatttcgtttgctgatgttcaagccttttaatggggagattcttgttgggaggattactggatatgacgataagggattgcaggtttcacttgaattcttcagtgacatttgcatacctggacacttgatgcagtttggcacagggaccagatggtaggtggatgctgaagactgaattaggcgatgagctttatctagatctagatgacgagataaggttcttggtttctagcacaaaatacccgcctataccaattgatcaaaatgaggatgacccaccatttgctccaatgcagattgttggaagtattaaaggggatggccttggtcttcttgtttggtgggcagctgatgaagaggagggggaggaggcggcagaggaagagcaatagcatcgtgttgcttgagggctcacttcgtgtaatttacagaatcagcctggtagcatgtgtagtgtaggggtcaggttcctaggagaattatgtatgtatgcaatcccctgaaattttctaaatatctgtgagctatatataattttatagcgcagagatctctccctgtaagagcatctccaaaagctccccagaagtctcctctaaatctattttttggggaaaaacacaaaaacatgtctccaacagttcccctaaagcgccccaactttttcatagcccttaaaactccctcgtttgtagctacaaatgaggggtttttttgggctccccagaaacaaactgctgctttaagggatctgttggagaa

SEQ ID NO: 24142 - DNA, 463 bp, Zea Mays
ctttctaaggaagaagggaaggagaaggagggacatggcggagaaggaagcaccacggtcctttctcgctcgccttcctcctctagatcgttcagcggacattggaaatgaagagaagcagcgctgcgtcgtcatcacgcatcatgcagatccagtcctcacagcccccctgctgatccagtacgaaatccgccttccccctctcccccagtcttttgtttcatactgtgccattttaatttgcaccgattttttctttgttgtttggttgacgtacttgacacccctttctccgagacacgtcagctcgtcatatacacccaacaccaccctgcaaagatatataaatttggatcgttaactgaacatggcaaattatttgtggtgtttaatcacaatttatatgtcacggcctctttgctttctatgctgattcatctacgtattattcatgcatgcatac

SEQ ID NO: 24143 - DNA, 2240 bp, Zea Mays
ttctccctcaccgacaggttgaagcgcacatcgttccaatcgtcgccgccggctacctcctccagccgccgcgcctccctcctccacccgctgccgcctccctccaaaacttgtcgtcgtatccctccaacacccgcatctggcgcagacgaccatacacccgctctgatgctttaaatcaatgtgtatggggttccaagcgtctgacctgacaaagaccgccccaagcaacgatgattcttgaagcgattgcagagataaaattgaaagggctgatttccttgatgtgcgcttcaacgagttggagaggtgggacgccagtttttttttttttttttttttgaaaaaaaacagggcaacgaaggggaggtgggaactgggaagacctgtttgataaattacagaggatacttcgccaaccgaacaagcctaagtgggggtgatgatgagccaccggaggcgttctcgcgctgccggctcgccgcctggcgacgccagtacgggtacgccccctactcctgagaagtcgggacgggtccggccgtgggcggcgacagcgtcgaaccggaaggtgctggtgttcgcgctggcgttccgcgcggccaacgcgctgctcgtgcgcacgtacttcaaccctgatgagcactggcagtgtctcgaggtcgcccaccgcgtcgccttcgggtatggtcatctcacgtgggagtggaagcggggcctgcgcagttatctccacccattgctctttgctgctttgtacaagaccctggcgctactccatatggacactccgtgggttatggtgatggctccacgtctcgtgcaatctttgtttgcagcttttggagatctatacctatataaactttccaaacttattttcaatggtcaagttgctaagtggacgttattttctcagttggttaactggttcatgtttttctgtatcacacggactctatcaaacagcttggagactgttttgaccgtggctggactctattattggtttgctgcaatagagtcttccaaggcaacctcaatcgtttcaaagcagcacgcggcctgtgaacaaagtatcccatcaagaaaagtggctcttctgatagcagccttgtcatgtgccattcggccaacaagtgctgtaacatggctatatgttggccttttggattttattcagatgaaatcaaaatgtcgctttatccttcttgatgtcattccagtgggggccattgtccttgcagtaacaacactccttgattggtggatgtatggttcctgggtcatagtgccgcttaattttttgaaattcaacttattgtcttccggaggagactactatggaacacatgtcttccattggtactttacacagggttttccatccatgatttggacattcttaccatttgcattgtgcggtattgtaaagtctcaggaatggaggctttcaggtctaattgcttgggtgttaggggtttacagcattcttggacataaagaattcaggtttgttcttccagtgctacctttagcattgatgttctcaggttactgcttagcttccatgtcacagtccaagggcaaaaatcagcataggaaaggaagtctttcaaggctgcagctttctgttattcttctcgtcataaccaatgttcccatggctttatatatgtccttattccatcaaaggggaacagaagacgttatgtattatttgtcaaaagaagcctatgatggaagatgatagcaaagggaccttggatgagtcagatcgtttccttacaagtccatctgagtttgtcggcgatgtttttggaaatttatctgcattcagtcacattgtattattcgagtcagaagaaagacatgttctccagttgcttctgcacaattcctttcttgagatgaggaggtttttccactcacatttcaagattgacagagaccttcagtcggctgttgtggtttattcatggagggatgtgctatgatttagtactgatgtggcagaaaatgcctgttagctcgtgtaacaatccccacatgtttaatgttgtttcagcttttcatttgagaaatgagttgtggcattgctggatacttctgatatcttaatcctcttggaatgagatgttatgttacttttacccaagtgctttacgacggcataacaattcacagttcgctttcttgcatcgagtctctatgtccatgatatctgcttctaagataaa

SEQ ID NO: 24144 - DNA, 179 bp, Zea Mays
acgacggctgccgggggcgcctagggcccccgggctttggccgccggcgcgggcgacaacggtccacgccccgagccgatcggcggaccagcaggagccgttccgcatacggccggggcgcgtcgccagcccccatccgcttccttcccggcaatttcaagcactctttgactctcttt

SEQ ID NO: 24145 - DNA, 1572 bp, Zea Mays
gtgtttgatattggtatggagatgaaacctataaaaatgatgcgtgcgctccatcttggcgaggccgcgagggcgaccgctacagcagcagccgccgccgccgccagatccccaggccttcgttgaacccttcgccgtaacgagatcagatggctgggtatatgtcaagagggccccaaaatggttctgtgtatgtctgcaatctacctcctggaactgatgaaaatatgttggctgaatattttggcaccataggcttgctaaaggtatgggtcttaccagaaggacaaaaggactgggcgtccaaaaatttggatatacagggacaaagttactaatgaaccaaagggtgatgcaacagtcacctatgaggatccacatgctgcttcagctgctgtggaatggttcgataacaaggatttccatgggagcactattcaggttcacatagctgagtcaaaaagcaaagatgcattcgataaccccacaagtttgaacatcattggtggtgttggtgaacaagatgaactggataatggagcaggcagaggcagagggcgtggtgatggtccaggcaaggcttggcagcaagatggggattggatgtgtccaaatacaaggtctgttatgattgttgtggcaatgtaaattttgccttccgtggtgtttgtaatcgctgtggagctgcacgccctgctggtgctggtggaactgctgctggtggtggcggtaggggtagaggccgtggtagctctgatgcaagaggaagcagccatgctggtgctgctgttggtggtccacctggattgtttggcccgaatgattggccatgtccaatgtgtggcaacatcaactgggctaagcggaccaaatgtaatatatgtaacacctccaagcctggtaccaatgaaggtggtgtgaggggtggccgtggtggtgggtacaaagagcttgatgaagaagaactagaggaagttaaaaaacgtcggaaagaggctgaggaggatgatggagagatctatgacgaatttggcaacctgaaaaagaaatttcgctctaaagctctgcatactgaaggtgcacaggcacttcctgggtctggacgtgctggatgggaagttgagcatcgtggtcctagtgaaagggaaggcagggagaggagcagggatcgtgttagggatgactactatgaaaaggaaaccaggggcagagatagaggtgatcttggaagggaccagcgccggagcaggagtcgaagcagagaccgtgaaagggaaaggagggagaggagaagagaacatgattatgagagaagggagcgtgaccgggatcgggaccgccgccataggtgaagatagaaataacaaggctttctgttcgtacactgcatttgccaatttttgtagccatgcgacccgtggtcttgtgttagtaactgggggcgtgcgttgttgctctgaatctgatttttgctttgaatgattcgctgcactggcattttattcagatattctgtttcttctgtgattacttttatgtttgtggaacacatatgacactcacggatccact

SEQ ID NO: 24146 - DNA, 2033 bp, Zea Mays
acggcgcagggagacagacagagagagcggggtggggggaaacccgaagcgaggcacaagaagaggccaccgcagcgggcgggcggccaggcggcgagcgagacacctccacacgtctctcccccttccgtttcctcccgtccctgctcacacctctgtagctgcgcccgaccgaacccctcctaccccggaatcctccccccgatgcggcgccgataagggggcgagaccggcggaagagcggggaatggcggggcgcggcgagaagcggcgccggacaggaggggcccacgaggagcccgaggaggaggaccgcatctcggaccttcccgacgtgctgcgcctgcagattctgagcctgctgccgctcaaatcggccatccgcaccggcgcgctctcctcgcgctggcgccgcctctgggcgtaccgctggccggagccgtcctcggtgagcatccgcctcccgccgggcggcggcgccgccgccgccgcggcgaccgcggccgcgctcgcggtgatcgaccgccgcgggcggcgccgcgtcgacggcttctcgctcgccttccacggcgggcagctcgcgcaggcggacctcaagcgctgcgtcgactacgcggcggcgtgcgaggccgaggacctgcacctccgcgtagacggcggcgcgggcgccggcggccgcggctcgcgcggcggcacgcgccgcccgggcatgctcaccctgcagttccccatggggtccccgctgctcgtgcgcctgtcggtgcgcgggctcaacctcacggccgtcaacaacgccatggtcgccacgctcgaggtcgtccacctccactccgtcttcctcaccgacgccgcgctgcgccggatggtcgccgcctgtccccgcctccgggaccttgacctccgctactgccgccgcctgcgccgcgtcgacttcaccaacgtcggcgtgcccaacctcaggagcttcaccgtcgtcgactgctcccgtaccaccgagctgcgggtccccgtggctccccgcctccggtccttccgcttcagcggcgccttcctctccagcaacatcctatccggcgccaaggcctctctcgagcatctctacctctgctccggcgggccagagaccggccttccagtcaccaacttgccctacgcagttcctcgcctgtcgaacctcactgtcctcaccctctgcagcattgctctccagccaaggatgtaatggagagcaacctacatggcttgagggagcttcatttgctcatgttcgggatggccaactccaaccttgctgacatctatagcttcctcaagacctgcccgtgtcctcagttagagcgcctctttgtgcagctcccgacaaacaccggtgatgcattcacggagaacttcttgaaggtggaggaggaggacccgccaaaaggtggattagaaaaccttcgcttagccaagctgacaaatttcaaggggcaccgtaatgagatgcagctagtagcatttctgcttagacagtctagtagtctgaagaaactatttttgattgctcccaaggaggatcaccctcaaggactgcgcaaggttcattcagatatgctgcctgattttcttaaaaaagaaatatcgcatctggaaagagcttcagcaaatacccagatatttttcggcgagcctgatgctcagacccacccgttgcattcggaggtctttgtcaggttttagcttgaaatgagcaaaagctgttgtagcccaattcctgctcatatagatttagatttctcgttgttagataacggacatggggaaaaaagtatctgcaaggcatacagagtttgatatatgtttcctcttttgcaattcatattactaaagaagtcctgcatagcagttgaaatgcgagttgttctgatctgccacattttcttatccctctcttctctccctatttgtgtccattgtccaagatctctttggagttggcttatcataagttgctgttgcacacaaccaaccatctatgggaacacaaccacctt

SEQ ID NO: 24147 - DNA, 2676 bp, Zea Mays
tcccccgtcacaaacacacacactgcggagaggaccgcaacgcgagcccaccccaggccgaacgccgagagcgatccctcccgtccgtgttgccctttgcgctccgccttcctcctcttccaccccgtcacttccgtgccatccgcggctcgcctccccaccccccattcccgccgccccatgcctccggctcgaccgtagccgcccgacgacgaccgccatggccgccgattccggcagcggtgcccgccgttcccccccttaatccttgattgggatggccggcctggagatcgggccggcgtcgccgggctcggagggggcgccatcgccggcgtcgagcgtgggcgcctccgtggagcggcccgagcagtcgtcgccgcgggtgaccaagcgcccaggcctcgtcatgtccttctccgggaagcggctggaccagtcgccggccgggtcgccgtcgccgtcgccgtcgctgtcgcgcccggtgctggtcatgtcccactccagcaaccgcctcgaccagtcgcccgcgcgcccggtgctcgtcatgtcccgctccagcaaccggctggaccagtcctccccggcgtcgtcgccggcgccagtgaaggcgcccgtgctggtcatgtcaggctccagcaatcggcttgacagctcgcatccgtcgccgtcgccgtcgccgtcgccgaccgccgcggccgccgctgcgccggttctggtgctctccaactccggcaagcggatggaccaggtggggcggaagaagtacgtcaagcaggtgacgggccgccacaacgatacggagctccacctcgccgcgcagcgcggggacctcgaggccgtgcgccagatcatcgccgagattgacgcccaaatgaccggcaccggcgaggagtttgacaacgaggtcgccgagatccgcgccgctatagtgaacgaggccaacgagatggaggcgaccgcgctgctcatcgccgccgagaaggggtttcttgacatcgtcgtcgagctgctcaagcactccgacaaggacagcctcaccaggaagaacaagtccggattcgatgctctgcacgtcgctgcaaaagagggccacagagatattgtcaaggtacttctggaccatgatccatcccttgggaaaacgtttggccaatcgaatgtgactcctctcataactgcggcgattagaggccacactgaggtggtgaacctactgctggagcgagtttctgggttggttgagttatcaaaagcgaatggaaagaatgccttgcactttgctgcccggcaggggcatgtggaaatcgtgaaggctttgctagatgctgatacccagcttgctcggaggactgataagaaaggccagactgctctacacatggcagtaaaaggtactaacccggaagttgttcaagcgcttgtgaatgccgatccggcaatagtcatgctacctgacagaaatggcaacttagctctgcatgttgcaaccagaaagaaaagatcagagattgtaaacgtgcttctgcttctcccggatatgaacgtgaatgcgttgactagggaccggaagaccgcattcgacatcgccgagggcctcccactatcagaggagtcccaagaaataaaggagtgcttgtcccgcgctggcgcggtcagagcaaatgagctgaatcagcctcgggatgagctcagaaaaacagttacagagatcaagaaggacgtgcatactcagcttgagcaggcgagaaaaaccaacaagaatgtctacggcatcgcgaaggagctaaggaaactccacagggagggcatcaacaacgcgacgaattcagtcacggtcgtggcggtgctcttcgccacagtggcgttcgccgcaatcttcacggtgcccggcggcaacaccgacgacggcgtagcggtggccgtgcacgcgacatccttcaaggtgttcttcatcttcaacgccgtcgccctcttcacgtcgctagcggtggtggtggtccagataacggtggtcaggggcgagaccaaggcggagaggcgggtggtgggggtcatcaacaagctgatgtggctggcctcggtgtgcacgacggtcgcgttcatatcctcctcgtacatcgtggtggggcggcacttcaagtgggcggcgctcctggtgaccctgatcggcggggtgatcatggccggcgtgctcggcacgatgacgtactacgtggtgaagtccaagcgcgtgcgcaagatcaggaagaaggtgaagtcgacgaggaggagcggctcgaactcgtggcaccacaactcggagctctcggattcggaggtcgaccgcatctacgccatatgagggggccggtgcagctggttccttccttcagaccgtctggccgtgatgcagcacggatgcatactgtaaacatcgaatcacggcccttgagatggagatgcgctagggggtggttaactctgtacattccaataagctggtgtaaactgccattccccttgttcatggatcgggcgggaggcgactgtcttggctgtatactactcacagatagatttgtcatcaggttatatatagtgtattatatatgtgcagcctgctgtgtgctccttgtgcgtgaccttcatcagattcatgtcaggccgctgctgagttcgaatggcagctgcatg

SEQ ID NO: 24148 - DNA, 1104 bp, Zea Mays
gtcgattccggggtgaattttgtctgaccaggttgccattctgtgtcgcaaactcgcaaccaatccgtaccggaatcacgggagatgtggacgtgcccagatgaaattccagcggtagatgccaaccttgtgtccggcgaccggcgtgctccggttgccggggctgggtgggcaacacacaaatctagtgcctggcacctggcagcaacggcggagagacgatgcgcgccaggtagatcctcagcacggtctgaaatctgcaaggaggtgggggcgaaagcatgcgctactatgctagaagctcctcatcccggtcggtaaacgccactgccgccgcgagctcacctccgacgggacggaacgaagccgctgccacccgagggaaccgcgtcgaccaatcccaccctaacgacatcgcctcagcaccagcaagctggccacaccaatcccccggcctcgcgcccctcgagcccccgatccaaatggtgcaggcggaccagtagcggcgcccaccgcgccgccaattggcactgcggccgccactacgtccgaaaaactcgcgatcgtgggacctccgatcccgtcccatggtcccgccggcctgtccgtgccttcccaagttcctagcaccaccgccgcgcgccgcgccggtgccgagggagcggcagcagtaaccggcaggcgaatttgaatccagctgcgcggcggggcgaactcgctctcatgcgcaggcgtggcttggcgttcagcgtcggccccaaccgcggccgaccctcgtgcgccggggctacgaccgttcggggccctccctgcctccacgcggaagctcttcttcctccctcaagacgcgaaccccgttgcctctcgggtcatcttcgccacaccgtcctgcccggaccgccgtggcgctctgcctcgatctaccaaatccatggctcggcacgaggatgcggacgcagaacaatcacttccatccgccagcgcgttgtctcgccgtcggatcgcgggatgggagatacgaaaccaaccagattgctcacttttacggttaaaccctaccagctctagcaatgtgaactgaaatgtatctacctctaaaaaatg

SEQ ID NO: 24149 - DNA, 2277 bp, Zea Mays
actactatagttgctaccgacattttggtgtaccagcaatctattggtgctgtttgcggtctggactggccaaggccaaacttcttggtgcaggtgctagacgattctgatgacgctgccacttcaacacttattaaagaggaggtggagaagtggcaacgggaaggcgttcgcatattgtaccgacaccggttaattcgtgatggctacaaggctggaaatctcaagtcagccatgaactgcagctatgtaaaggattatgagtttgttgttatctttgatgctgattttcaaccccagccagacttcctgaagcgaactgtgccccatttcaaggtttggcggacatcttttgcttgcattttcatctaaggatgagtccatgtgaattcaattgtctgactcattgtgcgagaggtttctagggcaatgaggacgttgggttagttcaggcaaggtggtcttttgtgaacaaggatgagaacttgctaactaggctgcaaaacataaacctttgcttccactttgaggtggagcagcaggttaatgggatcttcctcaatttctttggattcaatggaacggcaggagtgtggagaataaaggcactcgaggattcaggtggatggatggagaggacaacagtggaggacatggatattgctgtccgagcacacctcaagggttggaagtttctgttccttaacgatgttgagtgccagtgtgaattgccggagtcatatgaggcatatcgaaagcagcaacaccgatggcattctggtcccatgcagttatttagactctgctttgtggatattatcaagtcgaagatcggattctggaagaaagttcaacctcatatttcttttctttctcctccgcaagctcattctgcccttctattccttcacccttttctgcatcatccttcccatgacgatgtttattcccgaagccgagctccctgcctgggtcgtgtgctacatcccggcgaccatgtccctgctgaacatcctcccagccccgaaatcgttcccgtttatcgtgccctatctcctgttcgagaacaccatgtcggtaaccaagttcaacgccatggtctccggcctgttccagctcgggagcgcccacgagtgggtcgtcaccaagaaatcaggccgttcttccgagggcgatctcgtcgtcgagaagcagcctagacagcaaagggcagggtccgcatccaaccttggttcccttgcaaaggagccttcctccagtctcagaaaggactcccaaaggaagaaacacaataggatatacaggaaggagctggcgctctccttccttctcttaacagcagctgctcggagcctgatatcggtgcaaggaatacacttctacttccttctgttccaaggggattgcgctaaggggaacccagaaaaagggaagaagatgttctgcatgagtgcatcagtagaatgcctacgggctctgtttgtgaatgcaagagcgcaaatcacatgcggctcacgaacggtaatcttccagcccacttgtccagcagtgatggtggagagagacagggtatcaggggaactggggaaggggtttaggaacaacccatctccattcaccaacggcgcctccaactccgagcgccgcctctgcctcgaaaactcttactcgcggagctgcagccaggggggcgaccggtgtgtgaaccgctgccgctatggctgctgcttccgttccgccaacatcttcatccggcggctgggacttcacctgtaaccttgaagtcgattatgggtctgaagaaaatgcatccatagtctacagaacgttagcagttgacaaggagttgcagcctgacaaggtgaagagggagatgactctatcaggcagcaagctggccgtccacttcgcagccgtggaggcccgcttcctgcgagcatcgttcagctcatttgtggatcttatgggactcgtgacgaagctcgtcgaagaatatggtgtggccaatgcagggcattcttgaatcttgatgaacaatctcatacacggcattgcggagttgattttagttcgcctgtgagcaatttggagttttggacagtctttaccagtggaactgctcttgatctgtgtcaagctagtgtagtatttgcccttgattggtcaaatcctattcggaacggttaattcttttcggcaatgccgttgtgaaatgtatagatgatgaataggtaaaaattatctatatatcctcagttaggctttctccacgagtaa

SEQ ID NO: 24150 - DNA, 911 bp, Zea Mays
ttgatggatatattagcaaatggaaaatggaaatatcaaagttcagatatgagctatgcccaagatacatgaaagagcgcaaattctggcgggtatattttttgctagtaaacagctatatagctccgtttgagaagaaatacttcgaggagctgaaagtgaaagcagaggaagagaaaaaggattcccagaaggaagcatcccaagcatctacaactgcagaaccgaaagacacaaaagtgccaagcaagacctcttcgacaaatccagaacatgacctggatgtatttctgctgggggatctgggtagcgatgatgaggcttctgggattggaaagtgatgacgatgacaaaaaggcagcaacagggaaggcagaaggtgtgtagtagtagactatggttttgagagatgacgccaatgatagcgaacttcaggattccatgatgatattgtatattagttgatcgcatgccgtatgttcatttgttatctcccaatgaaggaatgctaagcacttgttattacaattttcgattttttttactaaactgagacacctatctatggatggtgttactcttttcttattagaagtgttctgtgaactgtctctacgaaattgaactccgactgctcgagactgtaattcacatgatgcacccgtgtgtgaagataatagatttggtatatggtgcgatttttcaagcctgacgtacgtttttacacctgattacctgaaataatggggtctcattggaccacggtaaaatttctcgcctgagatttggcgaaattcggtaaaatttactatttctggtactgatcaggaaatggttttcaaacctatttcgttcaattttgtatttttttttgaaatttctgtaaaatcagaaaaatatgataaaaatac

SEQ ID NO: 24151 - DNA, 1886 bp, Zea Mays
cagcaacaaaggcttttaatcccaagcaagttgagttaggctagaattgaaacccaaccgaaaccgcaagtcaaggtttaggcacatgaatagctattttccatgcactcatattgaagactaaatctttagttatattctatccctttgagtctcatttactggctcttaccagttaccatgtcaaattcggtttttccctacctctcgttccgttgctatcgtgccttagagttctactacacactggtgtctttggagacccctgttggacatgtcaaaactatctcaaccggtgatggacaagtttttcttcaattggtgctacccctagcctattacgtatgtcatcattctagactcgatctcttctattttgaccataaatccaacgcaacatacacattttcacaacacttatgtgttgaacatatcatcttttgtaggcaacattctccaccatacagcatatcaggactaattgtcgtcctatacaacttgtcttttagcttctatagtaccatcttgtcgtatagaaaaagccagatgccacttcatccaccatgctttgattctatggctaacgtcttcatcaatatctccgtctgtttgtagcattgaaagtccagattgcccattactaataaatgatttgaactgaagaagtcatttgcaaatacacaatgtgatggatgaatattgaatatattttttcctgattattcttactggatgctcttgctatgcagatgatgatatcatcctcctctcttttgtcaatattagtaattgaaagagttgatgagagggttgggctatcttgtttggtctcactcctatctcttatattagtgagcagtgcatgtgaaagggttcttgatgatatgcgcctatgggtgattctgaactttgttccttgcatcgccattcctgcaatgctattcttgtttcctcccaagtatacgcattcaaggttctggttccttgctacaggtagccgtaactgacaccaacgcaatcaaagtcagttcgcccttagcgaaaacttttatctgactgacatctgggtgccaggcttgtaccttctggcaagatttgaaggcttggctgacaggaaagtctacagcgtgaaccggtacttcatcagcggccattccctggagcacctttgctttgccctggtgacggttatgctaactgtgatgctgaccttcagaaacattaagattgccagaaaattctgtgaaaaaattgcaagtttggaaggcagactccgagacgacacagagattcggctagatgatgcctagtagataatattctaccttaacattgtcccgtttgccggggctgattcacccttttccccgtgttgtttcagactgacggtggcataggtcatatagaggacgcaatttattggtctgcccgattcataccgtggaaggttgtctgtgtccgccgcggcgttacaccaaacggttcgatgcaggcatacagcagctgctctcaagggtttcatgcctagacactaccgatgttgaggtctgctatcgtcagtgagcccaagtagcaggggcattgtgtcctacttggacgagactgatctcatcttcccgttgcgctgccagaaggcggtgtcctccttctcccgagccaggagctcctcgaacgatatttcttgagcctccagctccattgcactcagctccatgatctgccatggcaaaacagtccacacacacacacacaaacaggacgctcaggtggctacaacttacaaggacaagagaagcggcgtaccattttgtatggcgctgacttctgaagacgctcttgcacaaagttgtagatggcggcgtctttctttaggctatcgctttcgg

SEQ ID NO: 24152 - DNA, 2802 bp, Zea Mays
ccaccctgtcgtccgcgtcctccacgccctcgtcggctcgtcctcgccgtcctcctccacaccgcgcgcgcggcggtgttgacccacccacccgttcctcccccaccccatcagcgctggaggcggcggtgcgtaagtcccccggacccttcggcggcggcggcggcgcgcggttatgccgagaggctcccaggtttcatcaccgtgctctgctggagttatagcattttcagcaaggatatggagtacaccccctgcacagcaagttcctttgtatcccacatctcgctgctcgaggaagttcttggctggaggttttgtctttacggagacttcctggtcatctcttttgtcaactgcacttgaggatcaacccacacttagtgactgccttgcctggtcccatgctgtcagacattagagttgcccagtgattacactattacagtgcagctgtagcacatttatttgagcatggtggatctgtttctctggcaacattccagtaatctttgtcttggtgctaatcagccagcagaagttaccatcaagacatctttggacacttggatctaacgcttagagctttgccttcgcatataggctctaggtttgggttttcgttttctgctagctttcttctactctaccactgtaagttttcagtctgatcggtccaaagtttggtgtgtattggttacgctgtccttcaccagccttcactttgcatggcgtgaccttagagaagacgtgttcaagattttgttgtcgcaaaagcatgggaatagcatacatagctttgagaggagtctccagtgactttggtgttgtaacatccaaagacactcctgttatacatatatgagtcctgttttttactatacaactgttctgaaataagggcagttctgtgcaccaccagcgaataaaatggagagatatacaattatcaacgaagttggtgatggaacatttgggagtgtttggcgtgcaaccaataaggaaagcggtgaagtggttgcgatcaagaagatgaagaaaaagtattattcttgggaagagtgcataaacctccgtgaagtgaagtccctgcgaaggatgaaccatccaaacattgtaaagctcaaagaagtcataagagagagtgatacgctgttctttgtttttgagtacatggaatgcagtctttatcagctgatgaagagcagagggaagcccttttcagagactgaaatccgaaactggtgctttcaaatatttcaagctctgagtcacatgcaccagcgtggatattttcaccgtgaccttaagcctgaaaatttgcttgttacaaaggaactcatcaagatagcggattttgggcttgctcgtgaaatttcttctgagccaccttatacggaatatgtgtccactcgttggtatcgtgcccctgaagttcttcttcaagctactgtttataatgctgcagttgacatgtgggcaatgggtgccattatcgcggagctattttcactgcgacctctttttcctggatcaagcattattggcactccaaatcagcgtacttggcctgaaggactgcagctagcagcatctatgggttttcagttccctcagtgtgaaagtgtacatctttcggaagtggttcctttagcaagcaaagatgcaatcaatcttatctcgtggctttgctcatgggacccacgaagaaggccaacagcagtggaggttttgcagcatcccttctttcagccatgcttctatgtcccaccttcacttcgcttcaaatctactggatatgcatcaacgccaccatcagctggggctaaaggagctgttgatcagaagaacattaggagatactacatgggtactgtacccaatgcgaggccaacagttaattactcgtacttgagaaacaatgctcctgcaagagcagttggtgcacaaaggaaattggagttggattatcagctcccagagactaataaccataataaggtgacaaaggcagaagcgatgaaccagtcttggtccagaccagcagcagtaaggagcaatggaaatcatcttgccaacgacctgaacccccgtgtacctgaccttgccgagaagctgtctcagttgtcaatgggccccaacagggtgtcgggtttgggttccgagaggtttgttagaacccatgagaacgctgccaagcgccccttgcccgtgggatccagggcgtggcatggtccagctgaccccttccggcgcccatacgagatgccaggtgatagaactctccttccaaggaatctcgttcgctgaggctgtgaagctcttcgcaagaaacatatccaacgctcgctgtcttcggagctactcttccccggctatttacctcgcaacaataaataaacaaccaaacttcgtttccagcagtgggtgttgctcagcattgtctgttaccgtgcttgtgcgtgacgaggataagaggcgtccgggtttgtgcaccccccccccccccccgggtcctcgagggctccagggctggttggttgcagcatggcccgatgtgcctccatgtgatatcgtttttttaattatgctgtgcgatgtgtgattggtaacactgcttcagttgttaccgctgcttgttcagtgggtttgtatgaactgtgacatgctccgctaaacgttattctaaatactggtatgcaaacatgtcgaaggtgaacaatcaatggtgtatgtagagtagacttaaatggtaactgccttgtttcattctttacaagcctactctagtcccaattcgca

SEQ ID NO: 24153 - DNA, 1822 bp, Zea Mays
aagccagacatctcatgccacgcctctctatcatcattattcaagacaccggaaatgttaccgcataattttacttaaataaatattgtgtgcctttggaaataaaggaatggttattataagaagaccgaaaacccggtccatctctgtgtggccggtatgcttttaaaaaagaactgctacaaagaattgagtgagaggaaacaatcaggcctgatttgataaacaacccccacacgtattggtgaaatgcggcagaggagagatcaggacaccgggcgtgcaaccatgcagggagcaaagacggaaggcagggcggggcgctgtagctgcgacgacgacgacgatgaaggttttgctgctccgcacaccgcgcgcagtggcgacgcgaccacagccggtcgccgcctcggatcgaggaggaggagccgatggaggtgcttgtggtggctacggtggcgaggtgaggaagtggatgcagttggtgctgcgccggagagccccattctccgacgtcgactgcgtagcttcgccgtctacagccgcaggattttcggcttcgaccccggtcgggcccgcacggcgaccacagtgcggtaccggaatagggttctcggcggcggggacgggtggtgatggggagatttttcatgtccgttcggattcgtctgggaccctcgcgcaacggccgttgtgcgaggccttttctggccgtccagatgagatcgaacggttggggaaaaaagcggagtttagtttctttgcgccgctgagcgctggcagtcgcggcccaagcctgaggtcacagccccacagtcgccccttcggacttccctttattccccttcctatataatcccatcgccactgccttcttcttccgcttccaacttccgttccgcaaatcgaaagctcggcgttgccctgcctcgagctcgaaggactttgtccctttacgtcgttgtccagctcctcgcatattgtggcctggtgcagattggagatccgcccggacttggatcgagtcctcctgtctttggacattcattggagtgctccattcattgaggcagcatgcctaagataaagacaagccgtgtcaagtatcctgaaggatgggagcttattgaaccaacaatccgtgagttggatgccaaaatgagagaagctgaaaatgatccacatgatgggaagagaaagtgtgaagctctctggcctattttccgcatttctcatcaaaggagccgctacatatacgatctttactacagaaggaaggagatatcacaggagctttatgagttctgcctagaccagggttatgcagaccgtaacctgattgcaaagtggaaaaagccaggttacgagcgcctttgttgcctccggtgcatacaaacacgtgaccacaacttcgcaacgacatgcgtctgccgcgtccccaagcatctgagggaggaacaggtgatagaatgtgtccactgcggctgcaggggttgtgccagcggtgactaatcttgtcatcatgttgttgggctcacggctcatcatcgcaacgttaaccagatgaggtgccctgctgtgagcatggatccgctgcggtgattagcatgagtttattgggtaactagtggggagtactaaatttcctcacgtttggacgtttcaactgttatgtactacgctttctcgtgtctcagatgcttgcgttaaattagtggcgcttttgcattttatatgagtctgttaattggttattgttatgggttctaacaaaaaaatttctacgatttactacgtttttttttcaaaaaatcagaaaaaa

SEQ ID NO: 24154 - DNA, 782 bp, Zea Mays
tctgattattttttactgtcattgataaggctatcgagactgggactggatatggagcatggctccatggggaggctgtcgcaactggaatagttatggcagctgatatgtctcatcgcctggggtggatagatgactccataaaagaacgtgtgtttgccatactaaagcaagccaaacttcccattgcacctccagagaccatgaccgtggagaagtttaaaaacatcattgctgttgacaagaaggttgctgatggtctgttgagactcatccttctgaaaggaccactagggcgctgtgtctttaccggggattatgaccggaatgcgctcgatgaaacccttcacgcattctgcaacaactgacccatctcagttttggacttcacttctgtatgctaatactaggccatgtatatccatcaaagaaaagattgcgatgtacattatcttcattgtctcattgattgtacgaaggaaatccgggaacaactgctggccggggcgagaaaacactgtgggagtgggactaagattttataagccttttgtttagctggattctaatctgctctaatccatatgtaaaaatggaaaaagttttttttatccttatccattcagtatatcctgaagccaattctattgagaaaatatattgaatatgaaaacctagttaatttaattttcatctcaataggagtgcaactaaacgagcctgagatgaaaagggaaatcaagggcctaacacacctcatactggaatgcttggttaataac

SEQ ID NO: 24155 - DNA, 1076 bp, Zea Mays
gttattcatcatgtccttccagaatgatgacaagaaatttcaaggtgagctctttgggatctgcaatcttttccgtgacttgtccgataagctttttactagtgagattattgagatgcatggagaacatggcaagagtagtgcaacagaagcaacagggataagagaaatagtcgatactgatttatttggttcacaagagaataggaagtcttccacagcaacaacacatacggatgatcagaaattggttgattttgggatagtttatgcccaccgcaacgaggatgtcgtgaacatgaggacagacggaagagagaaaggtggagcagacgagactgtccagagctccttagaggagctgcttagtaagaatgaaacaaagcacactgccatggaaaaatcttattcatcggaggagaaaagggaagtggcaagatcttattcactggagcagaaaaagaaagagtttagctgcatcgcatccttcatgggtatggatgaccttgaatttagcaagtggttgctatcagcctcaccgcaccagcggtctgaagtgctgcaggactacaggaggaagaagaaaaatcagaaatgatgatgcaggtcctcggagctaaccggctaccgcaaagctttgacgtagtgattagcttgtgtagctaattgtggtagttatgacaagggaatggtagtaaaattgacccgtggcaccgatcagtatgtatgtctgcagccccgcttattttgaaccttatattggtgcaaactgagctcagcaaggccttggtcactctccctggccgttttttttcggtcaggtgaaatataatctgtattgtgtctgttagttcctgttcagctgtctaagcctttgtgtagcgagtcttatcatgttaggtggcttgcaatgttaccttggtctgtactaatcatttggatatcgtagtcttctccgtactaaaatataattcgttttagattaaatatacattcattcggtaacttatgaatgtagtttgtctgtgtgtggctacattcattggaacgagttatttacaaacattacactccct

SEQ ID NO: 24156 - DNA, 1754 bp, Zea Mays
gcgtgcccccctccctccctcagtccctctctctcgctctcggcgacgactgggcgaccgccgccgccgctgcgccgcccttgtccaggtgcccaggtcttcgcaggcgccttcgccaggtcttcgacggtaacgagcaccaaccggattcagggaatataagtaaaatgaggccagttttttgtgggaaccttgactatgatgttcgcatctcagaggttgagcgcctttttgggaagtatggaagggtggaacgagtggatctaaagacagggatatcatggagcatatgtgctcttcctggttgatggactggctctacctttactgcctctgcctgtgccccatctcatgccttgtccatctccaggagttcacaagtccaccgtggcatctgttcacatggaaacgaccacctcgtgactgatgtcttacttttacgatcaacattgcatcctcctcccccgcctcatcaccatttcctcgccaatccaaccatgccaatctcatggccggctggagagtggagagaagtggaggttgcaccaccaattctttgatgtgccacgaatgtttggattgttgtactctactactctgacatcatttagttcaacataaacaagggtttgcatttgtctacatggaagatgaacgcgatgctgaagatgctatcagtagacttgatggaattgattttggcagaaaaggaaggaggatcagggttgagtggacaaaggaggatcgcactgttggccgaaaaagcagctcaaggaggtctccaaccaatacaaaaccgaccaaaaccttgtttgtgatcaactttgacccgatcaacacaagaatccgagatctggagaggcacttcgataaatatggcagggtcgcaaatgtaagaatcaaaaagaactttgcctttatccagtttgagatacaggaggatgctacaagagcattggagggtactaatggaagccatttcatggacagggtgatctctgttgagtatgcacttcgtgatgacgatgaaaaaggtgaaagagggaacgggtacagcccagacaggagaggtcgtgaaagatccccaggtagaaggcgttctcctagtccctacggtagaggacgggagagaggtagcccagattacgggagaagcaaggagagggggagcccagactatggcaggggaggacgcagccctgataatggcaggggagtaagcccagctggtggtggcagaggcgatcatgccaggggtggagggcgcagtcctgactatgatcgccagcgccgggaagctagtcctccaggttatgacaggtcccccagccgctcacctgggagggaggcgagagagtagaagcagcgttccattccatgcctgtgttcaagcatcagatgaatgtgcaagttggtaatgttagccagcaggaaacttgtctactatgcgcgttagctcgtgtttgactttccacccatttcagtatgaagcgacctcagaatgtaactcatgtagtagtattttttcaatggtagctttcagcactggtttgaacctgttgttggctttattttctgagtaaaatgcaccactcgaactttacgcattgtgtcacttgggtactgaactcagaaaaccagttaaacggatcatgaaactttgttggcccatgtaaaaccattcaaagtcagttctataaaccggtagccacttttgtcatttgggttctcgaactttcattaggatgttctaa

SEQ ID NO: 24157 - DNA, 2890 bp, Zea Mays
atccggtaaggcgacgaaatgtacggcgacacaatgaagggtcaccaacccaaaggggacaagggcaatagggacgactacaccttcaattcagaaggctcgcggatgtctggccgacatactttcccgaggaggccgaggtcgggctgtcagaatccgaccagaaggtccgcctcaccaccgccctggctgatttcttctccacgcccgagatggcggaagtccttcgctcacgggttgaagatgatggcaacgacatcttgtgtcttccaattgatttccagcagcttcaggagttacgcatgtttattgaagataaactcaatgagtccccaaaagaagccttgctttgcatgggagttgcagctcatctggctctgtgctcggacaaggacaacaaaaggaacaagataaatatcaggctttacaacacgggagcagctattgcattaaagaaactaaaagcagcctttattaagaaacttgtcacagtgcgtggtactgtgctcaaagtcagcactgtaaaacctcttgttttgtggttgaaattccgatgcatgaagtgccgtaaagaaataccccgtgtgttttgtgatggaaaattttctcctccaatgtcctgtaccatccagggatgcaagagcagaagctttatcccagatagatctagtgcacagctgatggattttcaaaaaataagaatacaggagcttgcaagcgctgacaaccatgaagaaggccgagtgccacgcacagtggagtgtgagcttacagaagatctcgttgattgttgcatccctggagaaattgtaacggtaactgcaattgtgaaagtgctcaacaaccatatggatgttggtggagggaagtccagaatcagcagtcaaggtttatactacctgtatctggaggcagtttcagtgagaaagttgaagtcccatgctgtttctgacaaagaaattcaagctagtggaatttgtcattctcagtcttctactgtaaatgatgattttgctgtcaaatataaagaaaaatatggcaccgatgtttttcgcagaatacttcaatccttttgtccctctatctatgggcatgaacttgtaaaagctggtatcacacttgctctttttggcggtgtgcagaagaactcaatggatcaaaacatggtccctgttcgaggagatattcatgttattgtagttggtgatccagggctaggcaaaagccaactcctccaagctgcagcagctgtttccccacgaggaatatatgtatgtgggaatacgacaacaaaggctggcctaactgttgctgtggttaaagattctatgacaaatgattatgcatttgaggctggtgccatggtccttgctgatcgtggaatatgctgtattgatgagtttgataaaatgtttacagagcatcaggctttacttgaagccatggagcagcaatgtgtttctattgcaaaggctggtcttgtagcaagtttgtcagctcgaacttcagtgttggcagctgcaaatcctattggtggccattatgaccgagcaaaaacagtgaacgagaatctaaaaatgagtgctgccctcctttctcgatttgacttggtgtttattctacttgacaagccagatgagtcactagataaaagagtgtcagaccatataatagctctccataccaatgatgttgataatttcagacccaacaagaggaccagaacagggtcacattttgatggtgatccggggcttggagttggtggaaattcagtagcttcaaggctgaggctacacccagagaaagacaaggacttcactccattatctgggcaacttcttcgcaaatatatatcttattcaagagaacatgtcttccccagaatgtcaaaggcagcagctgcaattttgaaagaattttatttgaagctgagaaaccgcagtgcttctgctgatggtacacccatcacagccaggcagttagaaagcctagtcagattagccgaagctcgtgctcgcgtggatctaagagatgaagtgactgaagaagatgctcaggatgttgtcgatatcatgaaagaatctctgtatgacaaatatgttgatgaacatggttttgttgattttactcggagcggtggaatgagccaaccgaagcaggcaaagaagtttctgaatgcattaaacaaggaatctgagttgcagcaaaaggactgcttctcgagaactgaactttacaccatagctgataagatcagcttgcaagttccagacttggacactcttgtagaaaagatgaacattgccggttaccttattcaaaaaagatcagggatgtatcagctggtgactgcgccatattaacaatgcagccaacgaggtcaagatggagagttttcttgaatgaaactagaatttgcacctgctttgtctgtactagtgcctgctctagatctccagacactctggaaggccttaatccatttcaacataattgacatgtacctttcagctcatttccccccgtcccgtgagagatgtatggtttggaagctatgcgtatcgtcatggctgcgcacatacgtgctgcagtgtacaggcgactgaagtgcacgcgtcgcaggatgagcactaactttggtagcttggtgtatgccatggttgcgatatgatatattattgtgaaacaggaacctctagcggttattagtttatagatattcaagtttgccaatgaaacatccagaatagcatatgatgcattttacaccccttacacccgatcactcggaaaacatctagcacgctgtaaattactccctcagcaatagtaattattgctgttactgcgctgcactgcttgggaacactccttttcaaagccacat

SEQ ID NO: 24158 - DNA, 2226 bp, Zea Mays
catcttctatccgcatatcataaccataacgggtccttcaaaatttatttgtgacctttatgctttgatatttgattggtaagggtctacaggatcttatgaccttatttaccatcgctctgagttcgcaaggcataaatattatggttcttgtgaactcatcctcctacatgtaacatgtcgagtgaagcccaagcctggcccaacaaggagtcatgttctttgcagaacaacaatagatagatgccatttaaactaagttgatggttgtttcaatataacacttgaaagaacagacccaaggatgtaaactcaagtgttactacccctcatgcaaaactcaaactaacaagaagatggtctccccaaaggcagttgctcacagaaaatttttgggcaactcaatctggtataccatcacatgtcaccaaggtgctatttcaaatcaaaacaagttaaaaatgtacatctaacaaagataccattgtcagatctttatacaacacaacacaccaatgttgctattcaaaaactgttgctacctgcctagagcccagttctccaacctttccatgtccggggctgggtgcctgggtctgcgttaatgctggacagcagcttgtgattgtttagtgtctgaaaactctagcaaaagtctggtggcaaacaaggttctcaatttagacatatcactgtgtggtagcgtttgctccttaattctatttctaaaacatctgcttattggtgtccatgtgctggttcatatgcaatgatgttctttgtttgtgatggaatcttatgattttgctaaaatgtgcattgttttagtggtacttccaaacagtggccactaaccatcatggtgaggatgcatcatcagtagcagtcagaattattttggtgttttgatggcatatggaggcctccaagatgaaccggattctcccattatattctttggatccttgcagcccatatttgatttcaatggctaattgggttattggtcagcttgcgatatgcctaccagaggacatgagttctagtatttatcagtccttaatgaaggcgttgaccatggagtatgtggaggacataacttgttatccggtttgtgcctctgcttctggtgctattgcagaactcatcgagaatagttatgttccacctgactggctcattcttctgcaagtggttctgaaaagaataagtactggagatgaaaatgagtctgctcttctgttcaagcttctgggcacaatagttgagggtggacaggaaaaagttgtttcatattcctgaaattgtatccaacattgcgagtactataatggagctcctgccccctgtcccagatccttggcctcaggttgttgaacagggtttcacagccctcgtagcaatggtgcaagcttgggagagctctgcaccagatgaaaacaagacacctaaaaagaggttctggcagtcaggccagtctgctattgcccaaacaatttcattactgttacaaaaagcttggttgtttcaagctgacaatatggagggctctgcattaccacctctgtcatgcgtaaacgatgcttctgtgttacttgagtttgtcatgagttctgtcacttgcatggaagaaactgaaagtctgaaggtctttgagctggtagctacatgggctaacgctgttgccaactgggactcctgggagatggaggatcagggtgttttcaacacaattaaagaagctgtcaatttccaccagagatttgacctcgacggtctcttcctgaaaacgcactttgtgagatgtcattccactagctaaaagtttgcagaaatggcaccatcaagatcggtctggagaccaacaagatcatggacttcatcaagtttgatgtcggcaacgtggtcatgatgaccggtgggaggaacaccaggcgtgtaggagtgatcaagaacagggagaagcacaagggcaacttcgagaccatccacgtgctgcttagagctttttgctatgtctagttttctcctatttgttgtataggaaaacatagaatggaattcaaatttggtggccgcaaaatatggagacttgaattcatataaagttaggcttaacattagtgcaaacaattgtattttagtttagatttagagtacacttatgtatgtgttgtttgacaatgcttatttatgatatattgaatggtacttatttatattata

SEQ ID NO: 24159 - DNA, 166 bp, Zea Mays
gcatatgtatgtgtatttcaactgcatgtaacacctcaccgctcgcgcaacctcccgccccatccgccgcctgtcgtgcccgccgtatagcgtcggtcgtccgaccccgctatcctcgtccccaagccaccaacgacctcccccgccatccatcgcacgccgtcaa

SEQ ID NO: 24160 - DNA, 2475 bp, Zea Mays
ccaggacgacggcaaatccgcccacgcaaaatatcagcccaagtgcccatcgcccaagcttcctagctcacccgccgccacccactagccaaattccccatccctctcctgccgccacccatcagccacatctctccctcctactccctctccggcagccatcatcagacaagatccctcccccaccatcgagccatgtcgagtcgagtgcatcttctgcaagcacggccatcttacgaaaccctagctggctcgaaggaccactactgtccggcgccctgaacaacttggcatgatgccgacgaagggtggagcaaacaaatcacaatgacatcgggtagtagatccaccattgcatccctatgaagaggagcgccttagacaatgtatgaggaacaattcgaggttgcaacaacttggaattcctgctttagtcagcatgtgtgggaacataaattccatctctaggaacaaaaagccaaataacagggataatgaagattctgaatctgagtatgatccttcacatgacgattctattgaaggggatttgtttgaccatgatgatcataataagggctcaaaggacactaacagaagaactattcacatggctcctggtggaatcaagcctcgaactaagagagtttatgcagagcaacatactactagaaatacaagctaatggccctacccaggttgacaacacccacatggccaatcgagaagatggctttgaccaatttgatgacaacatgaccaaccaaggggaaggcattacccagcctggtggaaaaggtgatggtatatttctatatttaccatattgcatattacatcactagttgcttgctaaacctatcatgtgtcattagtttctactttactggatgttcttttgaccttttcaattagattcatgtgccatgtgtcattagcttgtcaatagtccattggatgatcatctttgatccatgtttgatgcacctcacttattgcaatttctatgtgaatctaaaactaggagtaaatcagcatagagaaaggggacttaatatgggacttggtctccaaaggatgaaccgagctcggcgtggcaaactgccaattgtcattactgaaggaaggataaggcctgtggcaccaattgttgctgcaaagtttgcaactgagtgcaacattgcagttcggaatcatgtgcttgtgcttaagtcatggaaggaatacgagaagcatcctgggctctttaaattgtttacagcaaaacttagtgcaaagtttgatatcaatacagaagatgcgctagttaaaaatgcttgtttccaaatgatgaggaatgcactgcgccaacaacgatataagctgaagaaacaatattttgacccttttccgctacatctagtgaggaaaacatctcctatcaaatcgacaagtgatgaacaatggaatgaccttgtggaacattggaaaggtccaaaaaatatggcgacatgtgaacataacaaaggcaaccgaggcaaagttaagttccatcaaacaactggatctcgtagctatatggttcatgtagaaaatttgggggacaagtacatggatcaagaacctgatgcattggatctgttcaaggagtgccactacagtaagaaaaagcaaggctacacttccactgtacaactggctattactcaaatggaagacaagcgatctacaccaggagaaggtgaacaaccaatgtctacgactcaggttgtagctgatgtgcttgctgagaacacaaagaagaatcggtttcttcaaaatgtgggaatccaaaatgcacgacctagatctagtgtacaaaatattgaagcacaacttgaagtagagaggaaggcaaatgcagagcttcaatcacttgtcagcatccaacgtgagcgcatggatgtattattaaagcaagtgcatgaagcagaactggtaaggattagagagcaagaagagatgaagaagaagcaagatgccatggatgctcaacttgagcttatgctaagtcagattcaaccaagttaaagctaactagtatggggtgttaggctttgttggtacttctcttttgctgatgctattgcattctattgatggataaatacgtttcaatccattttttgtctattgtgctgctagagtagctttagcggcatgtgtggtgtgttggagtggcttacgtgtcagtggttggatacttgctgtaatgacatgctattggatacttgcatgtaatgacatgctggagtgtggtcagtattttttgtgatgagatgctggattaaaatctgagttgtgatgtaatagaattcaacattttgtcattatgttctggattataattaatatatatttaaattattgtgtttgcaaaagctgcgaagctgtccatgggctagaatgttaattgtaatgggctgaaacaaaatgggcaaaaattgcaataaaaag

SEQ ID NO: 24161 - DNA, 886 bp, Zea Mays
gcaggaacgggatcatgattgtttgactgatggagaatggaaatgtggaattttttcggggtgccgattcctgctgaccaagttcatgccatcaatgacgaactgtcatccgagggggctgcaggggactacgaaactcgtttaaagcagcttgctaagaacggtgtgatcgaactgtcgccggtgtccgggttccccaagttcgaccttatgcttatggggatggggcctgatggccacgttgcctcactcttccctggccaccctgttgtcaatgaaaaccagaagtgggtcacctttgtcaaggactcaccgaagccgccgccggagagaataacgttcactttcccagtgatcaactcgtccgcacacatcgcacttgtgatcaccggtgctggcaaagctggtgctgtgcataaagcactttcagaagggcaaagtacatcagatttgctgcctgtcgagatggtttctcttcagaacggggagctcgtttggttcactgacaagccagcggtgtcaatgttgtcgagcatctgaagcccacgattgtataaatttgaagctttaatttgatgggattcatacacgattgggccttgttcggttgcatggtgattggaggggattagggatgattaactctctttctatttaattttaaatagtaagggacttaatctcctctaattctcctcaatctagttttaaccaaacaaggtctttatggaaatctattcggttcggcatggaactctgaggtgtcgatttcggggaaatttgtcttggattccattttgtacccactaataattatttagacccccgtatatttccctttactttgagaagttggaatctaattaatggagcagactattatttt

SEQ ID NO: 24162 - DNA, 1960 bp, Zea Mays
cccataaacaatcaccccgaagaagaaaatcacgggcagacatcatcagcaacgccggccggcgtcaccgccaccctcccctctcgcggacaccggaaaccatcacatcaaaccggaaaccacccttccctccagaactccagaccattcccttctccctttcctcttctccacgcttcgcccctcgccgactattttaaacccacgcttcttttagttctttcttccccgtcggcttccggagtggaaaccattttcctaccacccgcgggagatccacacgcccacgagcagtggagctcggcagcgaggcttcggagttctgccattaatgcagctcatgtggaagcttcaagtgctgaaaatggaataggtttagtgaagcttatgggtcgctatagtggatttattgccatgtatgctactcttgcaagcagagatgtggactgctgcttgattcctgagtcacccttttatttggaaggggagggtggactatttgagtatatagataggaggttgaaggagaacaatcacacggttattgttgtcgcggagggagcaggacaggatcttattgctcaaagtatacctgctgcagatcagcaagatgcatctggaaataagctgcttcttgatgttggtctctggttgactcacaagattaaggattattgcaagagcaagaagatggagatgactattaaatacatagatccaacttacatgatccgtgctattccaagcaatgcatcagacaatgtctattgcaccctgctcgcacatagtgccattcatggtgcaatggcgggatacagctttacagtcggaatggttaatggcaggcatgcatatataccatttcatagggtaacatctacaaggaacaaggtgaggataactgacaggatgtgggcgaggctgctgtcttcaaccaaccaaccgagtttcctgagccagaaggacatcgacgcggccagagaagccgacaaggcggccaaccgcatgaagagcagagaggacgcgaagaagcaatctacaccagtgttggcaaatggcaccgacggcgtcgaagcgcaactcgccgcgccgatactcccacagcagccggcaaccgatggtcctgtgccacaacctgcaagacccgacgtcaacaacgcgacggcacctgatgcaggtgatcaggaggaagcacgaaccacggggaccgacgttgcaggcggaaccctgacgcaggcggaggtgaagccgacacccggaacaaacgtctcgtggcccacgacaccacctgatacgccagagcgcgacgtggcgccggcgcctcgaaccgagcacgcacaggcgaccgagatggaactggacgtcgacaccgcgaggcccgaaggctgcaccacgccgccgccggtgcaggactcggaggggtccgacacgcagagcgccgactgccgcgggagccccatgcatgggatgcaggcaggcgcgagcgtgaagcgggacgatgtggccgcctccaagtcgaggctgttcgcgttccggtccttcacgcgggacaagaagaaggtgatcaagcccgccggggccgcagacacggcatctccagatagtcgcaagacggaggaggcggccgcggagaacaaggagaggcggaagagattctggaagcgatgatggatggggtgtgtgctagtttttgccatgcacgtcacacagcggtgactgcagagttgtttagcaccatgtgtgtaataagtatcatgacaaggtatatataacatgaatttatcgctggttctcttttcgtgtaatattttgtcaacagatgaaaagttacgagcacgacgctggaggaggtgtacctagctaggaggctaggaccaccaccctggctagggaaacaatgtacccacaagcttagaaacatcaaacatttggacgaaatagaagtgcgatccgttgttgc

SEQ ID NO: 24163 - DNA, 197 bp, Zea Mays
aggagaagagcaggtggtcgaagaggagccgcctaacactgaggctttcgacttgatctaggtggcgtctccgagtcaactttctggcgccaaggatagattttagaccctgttatatttatcttttatttttgtaagtcttccgctatgtaataaatactctgattatcatgacatttatctctatacactctgtt

SEQ ID NO: 24164 - DNA, 465 bp, Zea Mays
ctcgtgggcccagatgaggtagcgagccgtccccgatcccgtctccatgggaagaagaacgtggaaacctgcggggaagtaaacggcggcgacaggcggctgcgcgtcgccgcggcgacatgacgtcagttaggcacccgatcgacaagttgtcgctgcagcgaatccacccacgaagggcagcggcgcgacccagccatgtgcaggtaactaaatcgacgtacgggatggcctaagatgatagagctcctttaccagccagagcgaggggagacaccttttgctaataacgggcaagtaaaagttttaaataataggaagaaaaagaaacgaagggaaagctgacaaaacagagaataaaatggttaaatcctatgtgttttacttctggcatgtgcttagtattcgtttgcctttaatctataacagcttctactgattttacagtatttttacttctatcga

SEQ ID NO: 24165 - DNA, 2251 bp, Zea Mays
agcttgcgcagcctccctccgcccgtccctggcgtctacaaaaagccctcggcaggtggcgagtggagacgctccctcatacctaccagccaaaccaagcaagcagggaatccccacaaggcagcagatggaagcgaaaggtggcggtggcgcggcgtggcgcgggcgcgggcgcggctagctaggccggctcgtgtgcgtgcgcgaggagacagccacagccatacagggatgctgcctgcttcgtgaccgtgctggtggtggtgggctgcagcctgcagctcgtatcacacgcccacagtgcaggaaggagggagtggaagaagagagaggaagttgtttttaaaggcaacagcgagtcccgctgctgtccctctccttcgccacctccctccctcactctcttccctccctctcggaggaggagagagaagagagggagccagtccagctccagccagccggacgcccggaccaacaccaccccgcctccccctccccccgccccaccggcccgccctctcgcgctgccgtacccacggccccacgcacgttcacaagtctcgtcgccgccgcaatggagtccggcggtggcggggacgaccagctgcacggcctcaagttcggcaagaagatctacttcgaggacgccgccggctccagcagcggcagcagcagcggcggtggcagcgcgcccgcgcctccagcgacgcagcagccgtcgccgccggccgcttcgcctagggccccggccggcggcggcaggaggggcagggccgcggccggcggcgcgggcccctcgacggcgcccgcgcccgcgcgctgccaggtcgacggctgcaacgttgacctcaccgacgtcaagcccgcctactactgccgccacaaggtgtgcaaaatgcactccaaggagccccgcgtcctcgtcaacggcctcgagcagcgcttctgccagcagtgcagcaggttccaccagctgcctgaattcgaccagctaaagaagagctgccgcaaacgcctcgcaggccacaacgagcgccggaggaggccgccgcctggaccccttgcgtcacgatacggccgtcacgctgcgtcgctcggcggctcagaagcttcatgctggatttctcgtacccgagggtctcaagcgccatgaggggtgggtttccggcggtgaggcccggtggtgaaagggtgcctggcggtatccagtggcaagcgggcttggatcctcgtcaccaccaaggcgcggtcgcgggatacggcgcccactatgggagcgagggtggtagctcgtcgtcggcgaggccgccggtgttccctggcccggagctgcccccaggtggatgccttgcaggagtccccgcggactccagctgtgctctctctcttctgtcaactcagccatgggatgctgcccacagccacagccacagccacgctgcgccaacagcgggtttcgacggcggcagccctgtggcgccctccctcatggcggcgagtagctacatcgcgccgagcccctggaccgagaccgactcctggggccacgaaggcgggcggagcgtgcctcagctgccacctgacgacgtccccctcggcgaggtgcactccggctcgagcagccaccacggccagttctcaggtgagctcgagctcgccctgcagggaaacaggccagcgccagggtcggcggcaccgccagcgccgcgcaataatcagggctccgcgggcacgttcgaccaggctggcaacacgatggactggtcgctctaggccgggggccgaaataaagcgcagcagatcctagccgcgcagggagatggaggaggctgaaagtctgatgctgcacgctgcttgcttagcttagagcatccagcatgataagagtgatgaactgatgcggtgtcaggagactagtttattctgtgcttcaccatgaactcgtctgtcgcggcgtctatgtagacagacggcacacgtccgtggttcgaagttaccagtatgcttgtcggggactttgctcgcgatgcattaatctcattgttcaccatccagaaatctcatgttctctactcgtttgctggcccgtccatgctgccgctgctgtggtctttacatcaccatggctccgcctccatgcatcatcatttctactgaataataatgtgcttgtaccctccaacgttgccgcctggcattgccaagaatcggttccaagggggtgttgtttaagtaaagcgagaccaca

SEQ ID NO: 24166 - DNA, 1844 bp, Zea Mays
gtccatgctcccccaccggcccacctaaaccaagaaagatttttgggacactccagcggtccagcccgacctctttccaaaccggcaaatcctcagatccgccccctcctccgcctccgcctccgcctcctgtaccctcacgccgtgcttccacagccctcccacctccgaatccagatccgccgccaccaactcctgcttctcacctcctaggctgcttcgcgcgacaacctccgcgaggagcagcaggagcggcggcggcggcatggggcgggacggcggtggcggtgtcgccggcggaatgtctgaatcggtgctgcggaaggtgctcctctcctacttgtacgtcgcggtgtggatcttcctctccttctccgtcatcgtctacaacaagtacatcctcgaccccaagatgtacaactggcccttccccatctcgctcaccatggtgcacatgggtttctgctcatccctcgccgtcgcgctcgtccgcgtgctccgcgtcgtcgacctccccacctctccctccatgacgccacagctctacacctcctccgtcgtccccatcggcgcgctatacgcgatgtcgctctggttctccaactccgcatacatctacctgtctgtgtcatttatccagatgctcaaggcgcttatgcccgtcgccgtctactccatcggcgtcctattcaataaggagaccttcaggtcctcctccatgctgaacatgctctccatctccttcggcgtggccatcgccgcctacggcgaggcgcgcttcgacgtgcgcggggtcgcgctgcagctcgctgccgtcgccttcgaggccacgcggctcgtgctcatccagatcctgctcacatctaagggcatctccctcaaccctatcacctcgctctactacgtcgcgccgtgctgcctctgcttcctcgtcgtgccctgggtcttcgtcgagctgcccaggctacgcgccgtcggcaccttccaaccggatttcttcgtctttgggaccaactcactctgcgcctttgcgctcaaccttgctgtgttcctgctagtgggcaagacctcggcgttgaccatgaacgtcgcgggagtagtcaaggattggctgttgattgcattctcgtggtctgtgatccgggacaccgtcaccccgattaacctgttcggatatgggatcgcgtttttaggggtggcctactacaatcatgtcaagctgcaggcgctcaaggctaaggaggcccagaagaaagccgcacaggctgatgaggaggttgggtcgctcttgcaggagcgcgatggacatggtgatcataagagcgacaatcaggcttagactgtcagatctgatcctggccttcccatattggggatctgatgcaaggtgcaaagaccggagtttggtctacggttgctttcaaggaggtggatgacggtttcttgcacttctttaactttgtgtctggagagaaaatcagagacttcagcgcccagaagaatgcttgatctgttgttgcggcactacgcaagtcaacgagatttttgtcgctctcttgatgcacatgggggaagatcttgagcaactagtgggccatccaaagcgtcgtggcttcgaacagaaggcaacaaccaacattctaccagtcctcttcgcgaccgagctgggtgttttggttacggtttcagtaaaatatactgcgttaggatacttttcaaatatgcaaggaatgacctctaagacagggtgaattagacggtctaatttctctctaatttatgatctttaattttcttccggtcaagatctatgcaaagaactaagctattttatattattttcg

SEQ ID NO: 24167 - DNA, 1699 bp, Zea Mays
cacagccgcccgcactctcaagtgaagcctccaggagcgcagccgtacatcggcgtcaactacggcgaggtggcggacaacctgccgtcggcggacgagacggcgaggctgctcaggtcgacgtccatctccaaggtgcggctgtacggcgtggacgcggggctgatccgcgcgctggcggggtccggcatctccgtggtggtgggcgtggcgaacggcgacatcccgtcgctggccgcggacccggcggccgcgtcccggtggctggccgccaacgtgctgcccttcgtcccggcgaccaccatctccgccgtggccgtcggcaacgaggtgctggagtccggggacgccaccctgggcgccgcgctgctcccggccatgcagaacctccgcgccgccgccgcggcggcggggggcggcgccgcggggatcaggttctccaccgtgaacaccatgggcgtgatggcgcagtcggacccgccgtcgacgggcgcgttccacccggacgtggctccgcagctgcagcagatcctggggttcctcagcaggaccggcgcgccgttcatgatcaacccgtacccgtggttcgcgtaccagtcggacccgcggccggacacgctggccttctgcctgttccagcccaacgcggggcgcgtggacggcgggtccaagatcaggtacaccaacatgttcgacgcgcagctggacgccgtgaagtcggcgctggtgcgcgccgggtacggggacgtggacgtcgtggtggcggagacggggtggccgaccaggggcgacgccggggagcccggcgccacggcggagaacgccagggcgtacgtgtccaacctggtggcgcacctgcggtccggcgccggcacgccgctgatgcctgggaaggcggtggagacgtacctgttcgcgctgtacgacgaggacctcaagcccgggcccacgtcggagcgctcgttcgggctgtaccacacggacctcagcatggcctacgacgccgggctggcctcctccgcggcggcggggggtcggggcgggggcgggggcggcgcggcgcagcccaggggcggcgggtggtgcgtggcgcgggccggcgcctcggacgcggagctgcaggcggacctggactacgcgtgctcgcaggtgggcgtcgactgcagcgccatccagcccggcggcgcctgcttcgagcccaacacggtgcgcgcgcacgccgcgtacgccgtgaaccagctgtaccaggcggccgggcggcacccgtggaactgcgacttccgggcgtccgccacgctcacctccgacgacccaagctacggggcatgcgtgtacaccgggggaggccaataatgcacggcgcactggaagaaatttcccgttccttttcagctgcaggctacggggcatgcagtgcagatcctcttgtttgtttcgtcgtaccggaagaaatttcccgttccttttcagctgccctgactgcctgcctgccttgggacaggctgggatgtgtcatgtgtgagtgtgacttcgtgtaaaagaactattggacgctgtcagtgtcgccgtgagctctgtggacggtagtagtacatgtgtctaatgtacaagtagagtgagattgtatctatatatgtattttttccctaaaaataaaacttcattcggctctcatcggaatgcgagattatattgcgag

SEQ ID NO: 24168 - DNA, 2107 bp, Zea Mays
agtccactccaccaccgttcatgcatgaccatggagagatctcaaccgcagcaccagcagtctcctccgtcgccgtcgtcctcctcgtcctgcgtctccgcggacaccgtcctcgtccctccgggaaagaggcggcggagggcggcgacagccaaggccaataagagggcccgcaaggacccctctgatcctcctcccgccgccgggaagaggagctccgtatacagaggagtcaccaggtggacgggcaggttcgaggcgcatctctgggacaagcactgcctcgccgcgctccacaacaagaagaaaggcaggggcgtacgacggcgaggaggcagcggctcgtgcctatgaccttgcagctctcaagtactggggtcctgaggctctgctcaacttccctgtggaggattactccagcgagatgccggagatggaggcagcgtcccgggaggagtacctggcctccctccgccgcaggagcagcggcttctccaggggggtctccaagtacagaggcgtcgccaggtggttactgctcattaatctactcattatactaaaaccttgatttgaacacctacgcctcgatctgatcacctaatgttagtttaaaccctctcactagtcactagaatttacttacaagtaggatctgtcattcatgtagaattgtactagtactactgtgctagctctgactcggaccaatgctctctagttgggtgattgtgaaatgggggtccaggcttcacactgactcggaccaatgttctctagttgggtgacacggtgcaagatgaggcccacctgtaacgtcagatcaggcatgcatcacctgggcctgtgacacgtcacacacgccacgccagccattgtgctgtgcatgactcatcaccaggcactgtgcttgtgcacctagaaaatgccagctctgaactgcaagcaccacagactactttgaaaccagtgcatgattttcagctcatttcggtctgaaaccagctaaaaaggacgaaacttttgatgttcttgttgcttccatggtctaggcatcaccacaacgggagatgggaggcacggatcgggcgagttttagggaacaagtacctctacttgggaacattcgacactcaagaagaggcagccaaggcctatgatcttgcggccatcgaataccgaggtgccaatgctgtaaccaacttcgacatcagctgctacctggaccacccactgttcctggcgcagctccagcaggagcagccacaggtggtgccagcgctcgaccaagaacctcaggctgatcagagagaacctgaaaccacagcccaagagcctgtgtcaagccaagccaagacaccggcggatgacaatgcagagcctgatgacatcgcggagcccctcatcacggtcgacaacagcgtcgaggagagcttatggagtccttgcatggattatgagctagacaccatgtcgagatctaactttggcagctcgatcaacctgagcgagtggttcactgacgcagacttcgacagcgacttgggatgcctgttcgacgggcgctctgcagttgatggaggaagcaagggtggcgtaggtgtggcggatttcagtttgtttgaagcaggtgatggtcagctgaaggatgttctttcggatatggaagaggggatacaacctccaacgataatcagtgtgtgcaattgattctgagacctatgcgtggcgtgcgacaagtgtcctgtctttgggtatacttggtttgtccaatgccacggtgccactgctgcgagtcagctgaacttcttgtagaaagcacatggcagcttggcattagacaagtgtgttggtgttccttaattctttggatatgctttaggcattgactaaccttaagggttcgtcactgtctcgcttagcttagattagactaatcacatccttgaatctgaagtagttgtgcagtatcacagtttcacatggcaattctgccaatgcagcatagatttgttcgtttgaacagctgtaactgtaaccctatagctccagattaaggaacagtttgtttttcatccatacatataacacgctttcagaagcagac

SEQ ID NO: 24169 - DNA, 5632 bp, Zea Mays
ccttcacctctttacgctagcccgccagcttgctcgccccgtttaccccccctgcctctgccttccccagcctcgtatcatcttcatcactttctctctgccccaggccagtgcccacctctcgcagtcctgtacctaccaaccacatcatattcgggtccgtgagcccgtgggagaccgcgcggcggcgacgacgaggcctcgacctcgagcgagggttggtggacgtcgacgagctagggttaggcgggcttttgagcttaagcttgggttgggggggcctgctgatccatggacggggggaccggcccgggcgccgaggtgctctctcccggcgaggccgagtggcccccagagctccgcctcccgccgctgccctccgtgccggagcccccagggccgcccccgcccgcccccgcctccgcttcgctgcgactgcgaagcgtcggggtcgcgccccatctgcacggggaggtctttgatgatgacccgcagttcctcggatcgatcatgggggccgcggccccgcccccgccccagcagcagcagcagcagcccgccgccgcggcaccggtgaagaggaagagaggcaggccgccgaagaacagggacggtgcggcgccggtgcctgcgccggtgaagccggggaacaagaaggacgaggaggaggtctgcttcatctgcttcgatgggggcagcctcgtggtttgcgaccggaggggttgcccgaaggtgtaccaccctgcgtgcatcaagcgagacgaatccttctttcggtgccagggcaagtgggattgtggttggcacatatgcagcagctgcgaaaaggcagtacagtacatgtgttatacttgtacgtactctgtctgcaaaggatgcatcaaacaaggcaaattctttggcgttagagggaacaagggcttctgtgacacatgttatggtactatattattgatagaatccaaagaagatggtgcaaaggttggtgttgattttgatgatatatatagctgggagtaccttttcaagttatattggttggatctgaaagggaagcatttactaacgattgaagagctaaaaagtgccaagagccattggattgttcctactactgctggtagaagagagaaagaggagtcatctgatgaattatatgatgcaagcaatggccaagatgctacttttgacatttcgtcaaagaaacgaatacagaataactcttcaggaaaaagaggacaaaaacgcaaaaaagacggcaacattacttcaaggaaatgtggaatctcaattaacagtgctggaggcttaccaaatggatcaacaggtgaagggatggccttggctggtgacaaaaactgggcatcatctgagttattggaattcattggacacatgagaaatggtgataattcttatatttcccagtttgatgtccaggttcttttgcttgaatatataaagcaaaataacctccatgatcctcgcagaaaaagtcagattatatgtgatgcaaggcttagcaatttgtttaaaaaaccacgtgtcgatcattttgagatgttaaagcttttggagatgcattatcttgtgaaacaggcttcaacaccgaatgcagacagtcaaagagcaatttattcagattcagctcaagtaaataatggaggacataatgagttggccgatacattaggttttgataggaggaaggctcataagaagattgaaagagaattgacaattaatccagaagattatgcagccattgacatgcacaatatcaatctaatttacttgcggcgcagtgtgatggaggatcttattgatcaggttgctgcattttctaacaaaattgctggtgcttttgtgaggataagaatttctggtcttggcaacaaggaagatatgtaccgactggtgaaagttcttggtacgcataaagttgcagagcgatacactgtcagtaagaagacaacagattatgctcttgagatatctaatttagaaaagaaagagattatcacaatggatacgatttcaaatcaggatttcacagaggaggaatgcaaacgattacgtcagagtatgaagtttggtctaactgcccggttaaaagtggtagatgtctatgagaaagctaaaatcttccaatctctgcgatttaaagatcttctgaacacccctgaagaaaaggaacgcatgattaatgaagttccagaagtacatgttgattcccggatggatccaagttatgaatccgctgaagaaccagagtataagaaagctgttgattggaccatgcatcggaatgggccagatctattatttccaggaagaaaagggacagaattgaattctgtggagaatcatacacaaaagagtctggatacaagcagtctacctacagaggacgtggaccatagatcaggtgcaggaagtaacattaatttaaacaacatggcacctgagcctgcatcacttggaattttatcaaatgacactgagccagaaaaggtttggcactacaaggaccctaatggaaatgttcagggcccgtttactcttttgcagttatccaagtgggcaagttttttcccacgcgacctgagagtatggcttacatttgagagtgaggagaactcactactgttgactgaagtgctcccaaagcagcagaaagattttattcagctttcaacagttactaccagtgataaatcaatgtgggcaggctctggtcaagatagagttaactcaaatgcaaataactcttcctcccctatgggttataacatggtctatccttctgcattatctagcccgtctgctgagtgttatgatccaacaaaagatctaaagcctctgggtggaacttcgccatcacgatctctgaaagatgctcatgctttgcatgaggttcagaatcaggttaactattcattcacaattctatcttcaactggttcatatgcaccacccggttctcatgatggaagggtttcaagagacagggttgatgaatggaacagtagtcaggacaatggtggtatttggaggccaaccatgaattctagtcagaagactaatgcacagcagcatcctgatggttgtactgggaaggacctaatgcaaactgaatctaaatgtagttcacatttggtctcagttcttacttcacaacactctgagagagaccctgccacttcccttagtactacaagttggccggtgttcagaaccaggtgccagcaggaaggttcttcatggacttcagctacaaatgctggagctcatgaccttcagttatctattgctttagcaaagccggagacctgttctccaacaaatcctgtggaagacagagattcaagttctgcttctgctttgtcttgtcagtctggggctcctgtctgcgttccccaaccagatccaacatctacatctaattcaaggaagattgatgcaaccatggatcagcatagaacatgccagcctgacacatcaagtgtatcatttgatcttcttcatgagcctaaaagtggctcactcttttccttgaaaactcaagatcttgagtttgagtaccctagtcctatcccaaaacaggaggggaaggggatttctgtgaaccagtcaggctcaacatcagtagcacatgagaatttagctacaaagacatgtgtccgcgcacctactagcaaaattgatagcttacaaccacttaaggaaagatcacattcgacagatagggactcaatcactcaattagagcatctgtttgaagagaatgtgataaagagaaataacaaagtggtcaatcctgtatctgatgctgaagggattgctgtatcagatgtgttggaatccttaacagaacaagattgtgaaaaatgtagtatacatggggtagcgccttcacaaaaaatggtgccagcttcagctgaggaagatcaaccacaatgctccagtcctattgcattgtccccttggggtgaaccaagttactatcagggtgaagctgttgattctgctctatggggcgtccaagatgaccctggtaatgacatgtggtcaatgccttctccaaaacctggtttccagccctcatcaggtcttggagctgatggcaaagacgcttcatgcatcatagaggaggcgagagcggacccaggagatggtgcttttgtcaaaacattaccaacacaaggggagaaaaagatggaacatggaaattcaagtgcctcaggttctggagtgtcagaacgggtaaaaccaaaaggaagcgctgcatcaggtccatctctagatgggagcacaaaagttatgggttggcaactgccgggctcatctctagagggcagtgcaaaagtttcaggttggaaaccaccagtcttatcacttgaagggattgctaatggttcaggttcacaagcatcgtgtccttctacgcaaaggggcacaaaatcttcaggttggcagcgatcaagttcatccccggatgggagcagaaaagcctcaggttggcaacagtcaagtacatcaccagaggggagtggaaaagcgcatggctggcaacgatcaggatcttttacccaggggggtacaaaggctgcaggtcggcaaccctctcgttcctgtacagatcggattgcaaaagttgatggctggcaacgaacaagttcatctccggagggaagcagaaaagcttcaggctggcattcgtcgggtcgtgacagctcaaagatcgcatccagtgccagcgaaaaccgtaaattgtcttctagtcaccaagcgacgacaccaacagggaggcactcgttggcaaagagacagggaagcagcgacaagggtgctgctggttgggacgaggctctggggaactcttcggaagcatcgaagagacaacagggaaacagcgacaagaatgcaggctcgggagtggctctcggaagcaacaggagctggcatccatcgtctggtaaccctagtcggggcggccaggggaatcaccaacatgacagggactctcacagcggtgattcgcggcggggtagctcgaactacccccggaggtccgacaatcgtcatgaccatggcagtggtggttcgtcacgaccctcgtcaagagggcagtcccagagggggctatgtaaacactacgagagtggccactgcgggaagggttcgaaatgccagtacctgcaccggtgatcgccgtggccgtgtggaagcgggacccctgtttgcctggccgtcctcacatttttgtatagcaggatgtggtttcgtcgtagtcagtatagtagaacgcttattaaccgtgtcggcaccactaagttggtagtagtacatatctttcagggcaggagcatgactaaagtaggatttgtaagttttattagagccactgatggccttggataaagattctccgctttttggttcgggaatgcacgctttttgttcagctaaacggagttgtgggcttctacaaacatggattttctcgctaggtcagagtgctgtgctatcgtacagaacagctgcacgtccgagtggtcacggacgaggcgcgtgcaatcgtccgaatgcctacaaaagagtggccaccggcgtgtggcagacatgtgaa

SEQ ID NO: 24170 - DNA, 166 bp, Zea Mays
ttagtttgagcctaggtttaagttccttgacctctcaaattaagtcaatttgaaacatgattcttacacaaaatgtgtagcgcattgatcaaggaacaactttgcccattgcagtaggtcgggcttccacatgaaatcatcagaacgggggagctgaggtttggct

SEQ ID NO: 24171 - DNA, 292 bp, Zea Mays
actcctataaacttaatgcacatttcactagacttaagtgtataaaagtctttttaaaaatacaaggaagaggtaaatgcaccggggcttgcctttgttgcagtgaagaggctctagatccctctatccaatacccagttagatggctcctccacttgattagcagccactggagtagactccttcaaacaccacttcttctaggtgttctacaagtcaattacaaatacatgtatgcttttgtaatgatatgaaatgcaaactttcacaaggagagctggggaacataaac

SEQ ID NO: 24172 - DNA, 1329 bp, Zea Mays
atgctgttgttgcttctgatgaactcctccttgccaagaaaactactacactgaaaaggcgtcggcacgcgggcgctcgcgcagatggagcacggcgtagccggcgcctcccatggcgcgccgagcttcctgttctgcaatggcgcaggtgcagccacggcagactcagcctcgctagagacctcgtccggtgttctcgacacctccccacgaggcggaggcgctgattctggcggtaggaaggccccgacgaagcccagggaagacagcgccagcgccagcgccagcttcagcttcagctctgcgcactccaaggactcgagctcgaagggaagcaccaagaataggggagggaaaagaggcagaagcagcaaggaggtagacgaggaggaggagcccaaggggtacatacacgtcagggcaaggagagggcaagccacggacagccacagccttgcggagagggtgaggagggagaggatcagcgagaggatgagggtgctgcaggccctggtccctggctgtgataaggtcactggaaaagccctcgttttggacgagatcatcaactacgtgcagtccttgcagaaccaagtcgagttcctttccatgaagatcgcttcactgagccctgtgctgtatggctttggcatggacactactgacgctttcagcactgaccatactactcaaaaaatcgaagggatgctccagctccaccacgaggcgcttgcggtgcctagctctgccctgagcagacctccattcgaggctatcgcggacagtacgcacgccaccgcctctgcctcctccccccggtcctacgagctccacggcgatggcggcggcggcggcgccagcatctctttcccgcaggacggcggcggctacatggcgcaaacagtaggtgggccaaggccagagctgttcaaccaagtggtgttcagtaaccacatgtgctctttccagtagggcgagggtgatgagaagacgacaggtaatgcagcaagcaaacttgcaggacggaggagatgatgctggctgggaggatatatgatctatttgggaagcgtgtgtgtcgccggatgagtctgtgatgttggacgacgcacgtagtccatccccttgtctggtggccgtaacgggacggggcatgcagtagcttgcaatagcattatttagctgttagatttgaggtctctgtcgccatcgcttcatctaggctctggaaaatcatttgttcatacacaatgttaatctgtgcttcctgaacttcagatgtttacggtattggaaaatgggaagcattttgtttgctcgaccgtcaaa

SEQ ID NO: 24173 - DNA, 158 bp, Zea Mays
ctcccattgcgtgttatcttattctggccttagtcttcccgaggcaaagcttacccatgacgaggcatgtgaccagttaaagggtcctcggtcagcagtcctacatcgacatggtccttaatcgactcagacggagacactacaccgagactcctttc

SEQ ID NO: 24174 - DNA, 3276 bp, Zea Mays
cccaaatcagggctatacatttggccagcaggctgggacgctcagctcccgctcccggacgacgacgatggccttggcgctgcaatggcccctccaattcccactccagctccaggcgcggcctcccgccgttaccgcgggccatcaccgtcgccgccaccgagtcctcgccgtctgccgctccccgccgctcccagctcgctgttgtgccagcgccgccgctgcggccgacacggggaaggcgcagacagcggcgaggagggcttacccattcgatgagatcgagccgaggtggcagcggcactgggaggagcaccgcacgttccgcaccctggacatcggcgaggggctcgacacctccaagcccaagtgctacatcctcgacatgttcccctaccccagtggggctgggttgcatgttgggcacccccttggatacacggcaactgacattctgtcaagattcaagcgcatgaaaggcttcaacgttttgcatccaatgggatgggatgcatttggtcttcctgctgagcagtatgctattcagacgggaacccaccctaagattaccactgaaagaaacattgagcgctttcgcacacagcttaaatcgttgggtttttcatatgattgggatcgtgaaatctccacgacagagccgggttattataaatggacacaatggattttccttcaactgttaaagagaggacttgcttatcaggctggcattgatatcttacaatcaggctgaggtacctgtcaattggtgccctgctcttggaactgtcctggcgaatgaagaagtagtagatggtgtgagcgaacgtggtggctatcctgttatacgaaagccaatgcgccagtggatgctaaggataacatcttatgctgatcgtcttcttgaagatttgaatgatcttgattggcccgagagtatcaaggaaatgcaaagaaactggatagggagatcaaaaggtgctgagcttattttttctgcagttgaccaggaaggacatgacctgggtgccactttattggtttacacaacgaggcctgacacgatttttggtgcaacatatcttgttgtggcacctgagcatgttttactgtcatctctaacatctgaggaacaacgagcacatgtagaggaatacagagaactttcagcaagaaagagtgaactagaaaggactgaacttcagaaggaaaaaactggggttttcagtggttcttatgctaagaacccagcaaccggggaaatcattccaatatgggtggcagattatgttctaggaagctatggcactggggctatcatggcagtgcctgcacatgattctcgcgaccatgaatttgctgtgaaatatgaacttccaatcattaaggttgtaagtccaccgaatggtaattgtgatccagtggaggcatatgaagatgatggcatcatgattaattcatctagttcttcatctggactgaatattaacggaatgctttcccaagatgctgctaagaaagttactgagtggatagagaataatggttttggaaagaaaaaggtaaactacaagcttcgagattggctttttgccagacagcgctattggggtgaacctttccctgtgagctaccttgatgataccaatgaaatggttcctcttacagaagatgacttgcccttgacccttcctgaattggatgatttcactccaactggtactggggagccacctttgaccaaagcaacaaattgggttagaaccattgacccttcatctgggaagcctgcgagaagagaaacaagcaccatgccacaatgggctggatcttgctggtactatttgaggttcatggatcccaaaaactgcagtatattggttgataaggctaaagaaaggtattggggtccagttgacatctacgttggtggtgctgaacattctgtcttgcacttgctttatgcaagattttggcacaaggttctttatgacatgggtgtagtctccactaaagagcccttcaagtgcctgataaatcaaggattgatactaggagaaattgagtatactgcatatagagacaatgaaggcagatgggtttctgcagactcagactcaagtttgattgattgctaccaagaaaaagtagctccagacaaggttacaaaagttggagatcattatgttctgaaggataatccaaacattcgtctgaatgctcgtgcctacaagatgagtaaaagtcgagggaatgtcatcaaccctgatgatgttgtttcagaatatggcgctgattctcttcgcttgtacgaaatgttcatggggccattgagagattcaaagacatggagcactgggggaatcgaaggtgtgcaccgcttccttggacgaacgtggagactcatagttggtccacaattatctgatggatcatataatgatggaaccatgactaccgaagatgaaccaaccttggatcagcttcgagttcttcacagatgtattgcaagggtcacggaggaaattcaggaaacaagatttaacactgcaatatctgcaatgatggagtttgtgaatgctgcatacaagtgggaaacccagccaaaatctgttattgaatcctttgttctgctgctttcacccttcgcgccacacttggctgaggagctttggtttcgcctcggacatccacaatcattggcctatgaacagtttccagaggcaaaaagtgagtacctggaggaatcaaagcttgtactccctgtccaaatcaatggaaagaccaggggtacaatccttgttgacaaagcgtgctctgaggatgatgtttttcaaattgcagcctcggatgagaaactctccaaatatcttgatgggaaaggcatcaggaagaaaatttatgtgcctggaaggatcttgaatgttatcttagatcaacaaaagtcaaggacctgataattgctcttgtttgtccatttatctcgttatgagtcaggaatagagatcaataagacatgacagatctgtaaatttgttttttagcacttgcagtttactgtcaatttgccaacaacaacaacgtcgaacactcgttaggttaatgttaaaatccaacagaaaccgtcagtcaaggttaagcatatggatagttatttttatgcactctttggggtatttgaaactgctctaggttccagcttcagtgtggagctgtagtttacaatacagatttaaatagttttaacaaatatttttaatcaaaataataaacaaa

SEQ ID NO: 24175 - DNA, 151 bp, Zea Mays
acttcttcgtcttcctctccatagagcccgtgaggtggatcatgtccgaggtggtggcggagctggcccatcactctttgcgaggagtccgttgtggccaccgccgggctgaacagctctcgacacggcggctccgacctgttagttcgat

SEQ ID NO: 24176 - DNA, 4318 bp, Zea Mays
ctggaggcgacccgtaacaacgcggagcgtcagcctatagccgtcgctcccgtgtcccgtccgccgtcccccttcctctcgtattcgcttcgccgcccaacccactgtgcaccgctgccttcccgaccgttctcgccgccgccgtctccgcgcctgccaccccgcgcgctcggccaccggcgcccacggtgcggctcgatcaaggccagatcagaacccgccccggtccgcgtcacgccgatattttctgttttttggtacggatctagggttttcctgctgcggattcgttcgattcgctcatggccgctgggcgccatgggggttacagggactacgaggcgagggagcgggagctcgacgcggaggcctccaggaggagcaaggagcagcaccaccatctcggcggccgccaccgcgacgtggaccgccaccgcgatggcgggcgcagcaggggtggcagagactttgccaacggctacggtcgccgacgctcgccgccaccccggagccggctggcgggaaggcttggtgaccgtgagcctggcgaggtgctgagcggtagtgcatctgatgactccggtgggaggccgcatagagggagggagaatggcgtgctcagttccggcagggagggtgatgtgatggcagtcactgatgactccggtgggaggtcgcataggaggagggagaatggcgtgctcagttccggcagggatggtgatgtgatggcagtcacagggatatcttcgccgagcaagaagaggaaattctcaccgataatttgggacagggatagcccaaagccaccacattctgatgcagccagggacaagaaagctgtagaacctgtgccttctgagctccctccgcccccgccgttgcctccacaagaccacatcacactgaggttggctgtggagaagtcacttatggatatagaacctactgttggtacagagagtgctgtgcagttgctggaacatgaggtgaataaggtgacagagcaggaagaggagtatgcaacaatgaggaacatatcgacttcaagatgggctggtgctaatgatgatgatgatgatggggcagctccagtgaagaagaaaagtctgtctcctgcagactcctctgtggcagggcagtggaaaagagcaagtccagaacctggtgaagtatctggaggaaggacaatgtctaggtcatctgactctgggaaaatgagtaatgatgagaaagaagactttgaagcaaatgaagatgactatatggatgtcgacaagggacatgctagtgacagtgatacagaaaaccgtatgtcagatactgactcagacaatgaaatacacagacctgaaacccctgaaagagagaaggcaccacacaggtgtatcaatatgcttcaagattgcagaagtgttgatgagtttgagaggctcaacaaaattaacgagggcacatatggtgttgtatacagagcaagggataagaagacaagtgagattgttgcattgaagaaggtaaagatggagaaggagcgagaaggtttcccattaacctctcttagggaaataaatatcctcttgtctttccacaatccttcaattgtggatgttaaggaagtagtagttggaagtagtctagatagtatttttatggttatggagtacatggaacatgatcttaaaggtgtcatggagaccatgaaacaaccatatacccaaagcgaggtaaagtgtttgatgcttcagctgctagaaggtgtaaaatatctacatgacaattgggtgcttcatagggatctgaagacctcaaatcttttgttgaataaccgtggtgagttaaaaatatgtgattttggactgtctcgtcaatatggaagcccattaaaaccttatactcaactggttgtgactttgtggtacagggccccagaattgttgttaggaacaaaggagtattctactgctattgatatgtggtctgtgggctgtataatggctgagcttcttgccaaagaaccgttattcaatggaaaaacagagtttgaacagctagataagatttttagaacactcggcacacctaatgagaagatttggcctggctatgctaaattaccaggtgtgaaagtaaattttgttaaacaaccgtataatagactaagggataagttcccagccgcttctttttctgggcgaccaatcctgtctgaagctggttttgatctattgaacagactgctgacttatgaccctgataagcgcatatcagcagacgatgctcttaagcacaaatggttctctgaagttcctctgcctaaatcaaaggacttcatgccaacattccctgctcttaatgaacttgacaggcgttccagaaggtatctgaagagtcctgatcctctggaagagcaacgtttgaaagaactgcaagggaacataggcaaccatgggctttttgggtgaactagaagcacttgattgggtctgcaagggaacataggcaaccgtgggctttttggctgaactagaagcacttgattgggtcctgtccgtcctaactgttatgcttcacactgaaatcctgagttcatgaggttagatatcttctgaggcttggtaccggtttaaatggataaggtttctccttgtggcccatcatagaaattttgttgcaggattaacgcttcatccagatcgatcataaaagcaaatataatctacctgcatcataaggtgtggcgtgttggcttttattggttacaccagtttcacctttggaacttctctatgtaaaatattccagattggtacgttgtaaacaatgtccagtgtgttggatttaaatttaaaacgaaacatcatcattattagttttctttatgctccttgtgccttttcttttgatctttgcgttttgtttgcaagagacaaaagaagcgcaggggaaggatgccttttgctttcatcaggaaatcaatggcattaatacaacttagaaggtaatgtatgaaaagccaattgctgcaagtgatgtgttgctaactaaaaactagtgagtgtgggagttcttcactgaaagatcagctgcacgaaatgcatgatatcatatcactatttatgtgaacagacttagtgttaatgcaatatgtttcattttgatgtgctggctgtgtcgtgtttgtgtgcagagcacatagcatttacagagcagttgctcccatattagaaagctgaaaacgaaaatgatttcaagaaatgacctacgtgagatatttcttgaatggacgtattctcgttgccatttcaactacaagaaatcagtttgagttcatagctactaccattggagtgcttttctgaacttatgtgcactgccaatatatataggtgatttaactgtgacatgttcacaaaataaaattggatcttgaactaatgcgtgcatctaacatctatttggtatttaccttccatcttcatgtttttaattttgtaactgaggagagaaatcactttgaatttctggttattcattatgcggtgcatcttctgtcttatatgctctctgctcctctgttggttaacgcattgcttgagttagaagtaagtagtaggttcttgttcctcagcgccaaatggtttagtacttgttcaggaaacaatttttaagacgagtgtggaatagcaggaggataactgttatcaagataagtccagcactgtaatcatcgtatgttattgagcagttggtcatatatgtgaccaattgtttaagaacaataggtgacatgcatgatgatgacctgttgttgcttgtgcacctgcacgcagtttttctggtagccgtgactgggagattgcttttctgtttcttgttagcttatgattattccatcattatgtattcttcaattgggtatagttagctacttatttattccactcaagagctcagagtttgtgaaactcactacgattgttgtataacacgtctgcagctaagctgtggctgcttcaagataggaagcttgatggctgtcagcttattgtacctaagtgactaaattttgtggagggccttcaaaagtgttcatctcttactagtgaaccatggtgggattgccgagccgttcggctaaccgggctagccgataattggtggtggtcggctccaccttatcactgttttggattttgaatttggtaaagtttgtaaattttgaaaacttttgatgacattttttgtataaatactatatattatttgaagattttctgctgaaaccaaatttcaaaatacacaacgaatttcaaac

SEQ ID NO: 24177 - DNA, 1054 bp, Zea Mays
gaaaaccctcccttgccttgcccagttgcccccaaaccccagccaccagctataccaatggcggccaccgcgatggaccatgacggcggcgacgacgtggtcacaccaggggagcttctcggaaactcattaaccctcgcggccggacgtggcgcctacgccgacggtcgctctgtgcgcgcgtcggtcaccgggcgccgccgcatcgtgccgcccgcacctggctccgacgaccagagatccacggtggaggtggtggggcacaaggcccatggagctgtgccgcagccgggaagcgtcgtcatcgcccgagtaacaaaggttatggctagaatggcctctgcagatatcatgtgtgttgactcaaaggctatcagagaaaagttcactggcatgataaggcagcaagatgttcgtgcaactgaaattgacaaggtggatatgtaccaatcatatcgtcctggggacattgttaaagctatggttctttctcttggtgatgcaagggcatattacctttccactgcgaaaaatgaacttggagtcgtttcagcacaaagcatagctggtggtacattggttccaatcagttggactgagatgcaatgtgatttgaccggtcaaattgagcaaaggaaagttgcaaaggtggaatagatgtgctgtggccctcctgataaatggtaaacatgtggtggcggtatacaaattgtggaccagtgacaccaggtccttgggcggactacccaattctgcgacgcccaacttcattacagctgcattgagcatgggtttttaaaaccctggctgaatttaactagacatgaatcgtagccatgggtcctgtaacccaaccttgggatctgaatcatagccatgggttctgtaacccagtaaccttgcccttgtgatttgttactctgtgagctaatgacattgcagttttccacctcgtgatttctacaagttttgttgcgcattgttgagaacttgagatctgttgctgtctttctggcatgatgtcaaatggctgtaccggacttgtttcaaacgg

SEQ ID NO: 24178 - DNA, 3079 bp, Zea Mays
  misc_feature (3078)..(3079): n is a, c, g, or t
cggctcctcgcaattcgcctcccaccaaatattcctaccccgctgctccaccccctgcgtctgacgggcatggcccacctgcagctctcagcggtcgccggcgcccggccggccgccgcgggcgggcgcggcgacgagatggaggacgtcgcgctgctcgactcgtacgacgaggagatggggctgccgctgccgggtgcatcgggcgccgaggctgcggaggcgcacgtgcgcgtcaccggcatgacgtgctccgcctgcaccagcgccgtcgaggccgccgtctccgcgcgccgcggagtgaggcgcgtcgccgtgtcgttgctccagaaccgcgcccacgtcatgttcgatcccgcgctggccaaggtagaggatataattgaagcgatagaagatgctggatttgaagcagaaattatccctgaatctgctgtctctcagcctaaatcacagaagactttatcagcacaattcaggatagggggaatgacatgtgccaattgtgtaaattcggttgagggtatcttaaaaaagctacctggtgttaaaggagcagtcgttgccttggcaacctcattaggggaagttgagtatattccttctgccattagcaaagatgaaattgttcaggccatcgaggatgctgggtttgaagcagcattcttgcagagtactgagcaagataaggttttgctgggactgattggtttgcacacagagagggatgtagaactattaagtgatattcttaagaaaatagatggcttgcgacaatttggtgtaaatagtgttctctcagaagttgagattgtattcgatccagaagctgttggtctcagatcaatcgtggatacaattgagatgacaagcaatgggagtttgaaagctcatgttcagaatccatacactcgaggggcttcaaatgatgcacaggaggcctccaaaatgcttaaccttctacgttctagcttgttcctcagcattcctgtatttttcatacgtatggtttgccccagtataccatttttaagtacactactaagcatgcactgtggaccatttctcatgggggatttactgaagtggatattggtaagcattgtacagtttgttgttggcaaacggttctatgttgcggcttatagggctgtgaggcatggctctacaaacatggatgtgctagtggttcttggcaccactgcatcatatgcatactctgtctgtgcactactatacggagcatttactggatatcatcctcccatatattttgagacaagtgcaatgataattacatttgtgttgctcgggaagtatctcgaggtgcttgcaaaagggaagacatcggatgcaattaagaagcttgtagaactggtcccttctactgctgttttggttctgaaagacaaagaagggaaacatgttggtgagagggagattgatgcacggttggtccaacctggtgatgtcttaaaagtgcttcctggttcaaagattccagctgatggtgttgtcgtttggggaacaagtcatgtgaatgaaagtatgataactggtgaatcagcacccattcctaaagaagtatcaagtgtggtaattggggggacgataaacttacatggtatccttcatatacaagcaacaaaagtaggatctggtacagttttgagtcagataatctctctggttgaaactgctcagatgtccaaagctcctattcagaaattcgctgattatgtggctagcatttttgttccaattgtcatcacattgtctatagtaacattttctgcgtggtttttgtgtggatggttaggtgcatatccaaattcttgggttgctgaaaatagcaattgctttgtcttctctctcatgtttgccatatctgttgttgttattgcttgcccttgtgcccttggtttggcaacaccaactgctgtgatggtagcgactggaattggggctaatcatggagtacttgtaaaaggcggagatgctttggagagagctcaaaatgtaaattacgtggtttttgataaaacagggacactaacacaaggaaaggctgttgtaacagctgcaaaggttttctcgggaatggacctaggagatttcctcacactggttgcatcagcagaggcaagcagtgagcatcctcttgccaaagctattttggactatgcattgcatttccatttctttggcaagcttccttcatcaaaagatggcattgagcaacgaaaagacaaggtattatcccagtggctgcttgaagctgaagacttctctgcagtacctggcaaaggagttcagtgctcgatcaatgggaagcatgttttggtcggaaaccgttctttgatgactgaaaacggtgtgaccattcccccagaagcagaaactttcttgatagacctggaatcgaatgcaaaaacaggcatacttgtggcatatgatggcgattttgtgggtttgatgggcataaccgaccccctgaaacgggaggctgctgttgtagtggaaggactaaaaaagttgggtgtccatccagtgatgctcacaggagataattggaggaccgcgcaagctgttgctaaggaggttggtattgaggacgtgagagcagaggtgatgccagccggaaaagctgacgttgttcgctccctccagaaggacgggggcaccgtcgccatggttggcgatggcatcaacgactccccagccctggcagcagccgacgtcgggatggccatcggcgggggaacggacattgccatcgaggccgcggactacgtgctggtgcggaacaacctggaagacgtgatcaccgcgatcgacctatccaggaagacgttcagccggatccggtggaactacttcttcgcgatggcctacaacgtcgtggccatccctattgccgcgggcgcgctgttcccgtttaccgggctccagatgccgccgtggctggccggcgcctgcatggccttctcgtccgtaagtgtagtgtgctcgtcgctactgttgaggaggtacagaaaacccaggctgacgactgtgctgcagataactgtagagtgnn

SEQ ID NO: 24179 - DNA, 591 bp, Zea Mays
ttgtagattatacgaccagtacattattgaatggcattttggtgttgcgccatataatactgctcctagcctgacgttggacccacaaacgccaagggaatacgcccagggctcgatgtcagattggcttcacatgcaggtcggcaacgcatatgaaagagtgacatgaataaaacgaggaatccataaaacaagctgaattccttgtggtagccaataaagagtaccaggatcaaccgagtccacagtaccaggttcattttcttcttcttctcgtggtcatcgtgacgccaaagttagtttattttattcctagtttgggggcattagcgccgtagatgcgtcattccacatccatctaggagggagcactgtcgtttactgtatacggatttcgtgatgtatcccgggaaatttttgtagatcggactcgtagaagaagagattgcaattgcaatactgtgtatcactctgatgttgtccagtttgagaacttgacaggtgtatgggatttgccccgaggctgctggttttcctgctgcttggtttgggaaaccgatctctcgattgtgagatacaggcaggtttgcg

SEQ ID NO: 24180 - DNA, 1027 bp, Zea Mays
aggagactgcaggaggttccaagccagttcaaaccggattgcagctttctggctggaaatagacggcgaccaccgcctcaacggcgacggcagcgacggccaccattcccttccaatctgccgcacaacatggcgtcgtgcgtggccgcgatggcgctggtcggcgcccgacctccgtctcacgccgctggccctgcggcggccagctgcagtggccgcgcgcagcttagcttccaccgcctcggcgctcgcgctcgcgctcgggtcatccgcgcctaccgccgccgcccacaccatccctcttatgtgcctgaggatggggtcgttctggagtggctgaggagcgcggccgccgcgctcgccatagtaacccagatttccgtctcgctgccggcgaacgcggtgctttactcgcctgacactaaggtgccgaggaccggggagctggccctgaggagggcgatccccgctaacccgaacatgaaggccatacaggaatcgctggaggatatttcgtacttgttgaggataccgcagaggaagccgtacggttccatggagggcgatgtgaagaagtccatgaaaatagcaatggacaacaaggaggcaatcctggcaagcattcctgaagagcataaggaggagggtgccaagctatatacctcattactcgaagagaagggtggtttgcagactctcttgaaatatattaaggagaataaccctgacaaactttctatagcacttgcttcatcacttgacactgttgctgaattggagctgttacaggctcctggtctgtcctttctcctgcctcaacagtatatagaatatccaaggctgacaggaagaggagttgttgaattcacagttgaaaaaggtgatggttcaacattctttccaactggtggtggtgaaccgaaaagtgttgctacaattcaggtcgttattgatgggtactctgccccactgactgctggaaactttgcaaaattgataaatatctcttcagtaacttttagtagca

SEQ ID NO: 24181 - DNA, 2074 bp, Zea Mays
tattgatgttctcaagttggtgacaatgttggagattgtgctgcccgaggcgctgatctttttgagagcatagcagcagaaattatcagtgcaatgatacttggaggaacaatggcacagcgctgtaaaattgaggatccgtctggctttattttgtttcctcttgttgtgcattcatttgatttggtggtgtcatcagtcggaattctctcaatcagaggaacacgtgactctgggctcatttcccctatcgaagatcccatggcaattatgcaaaaaggctactctgttactattatgcttgctgttcttacatttggagtgtctactcgttggctcctgtacacggaacaagcaccttctgcatggctaaattttgcattgtgtggcttggtggggatcatcacagcatatgcttttgtttggatttcgaagtattacacggattataaacacgagccggtccgccttttagctctttcaagttctacaggacatggaactaatattattgctggaacctctggcttggtggacgagtctggcaacccaactggtggtctttttgggacagctgtagcgacaatggggatgcttagcacagcagggtatgttctcaccatggacatgtttggtcctatagctgacaatgctggtggtattgttgagatgagccagcagcatgaaagtgtgagagaaatcacagatgttctagatgctgtgggcaacacaactaaagctactacaaaaggatttgccataggatcagcagcactggcatcattcctcctgtttagtgcatacatggacgaagtagcttcttttgctcaaatgccgttcaaggaggttgacatagcagtcccggagatttttgttggtggtttattaggctcgatgcttatattcctgtttagtgcatgggcttgttcagcagttggcaaaactgcacaggaagttgttaatgaggtcaggagacaatttatcgagaggcctggtattatggactacaaagagaagcccgattatggacgctgtgtcgcaattgtggcctctgcatccttaagagaaatgataaaacctggggctctagcaattatatcacccatggccgttggcgttgtcttccggattttgggccactccactggtcagcctcttcttggagctaaagttgtagcctccatgcttatgtttgcgacggttgctggtattcttatggcactcttcttgaacactgctggcggcgcctgggataatgcaaagaagtacattgagactggtgcccttggtggcaaaggcagtgagtcccataaggctgcggttacaggcgacacggttggagacccattcaaagacactgcaggaccatcgctgcacgttcttatcaagatgctcgccacgatcacactggtcatggctcccatattcttgtgattaaccaaccagatttatcaagcttgccattaaccctgcggagatgtatctatgcgacttgtagatgaggtgtttacctgcatgtgatgtaatgatccaatcggttttagtgtgactacatgttgtacccaaagaaagaaagaaagaaagcagcgatctgtacccaggttttaatggtccaatcggttttagtgtgactatatgttgtacccaaagaaagaaagaaatcagcgatctgtacccaggtttgacggtagatattattctgaatttctgacgggtagtgatggtgcaaatgccatattttgtgacggacgtcactgaactagtagcccaagtgttttgtatttgtttattgctgggaacattatgacatccgttgagcttagctgtaagaaaggaacgatccacgatggattttaggatcgtgactgggtctacaccttacctttgactcttcacattaacaaagaaactgatgttatgtaatggtgttaatatgaccgattgtgagcacttctaagaggattaatatttaatagcttccagcacagaaaacatgcgcagataacaaaagaaacttcatatcaatctcaacagaagctgcatccttaaccatcctgcatttgtggtgcttgtt

SEQ ID NO: 24182 - DNA, 995 bp, Zea Mays
aaggccgccgccctcagcaacggcatcagcgtcttcccctccctcgtctcgtcaatcccctcgcgccctctcctccggtcctccgcacacggcacaccgtccggtgaccctgcaatggaagggcgccgctcaaatgaagtatcatctgccgaagctgtcttggtgggagcattgtcgtctggtgtcaatcattttcgtcgaagaactttgtaatcgttgcacatgttcttctgctggtgactattggaaccgtgctatttgtgctgcttaacaggtttctggctgaagttgggctcgtgcctgttgaacagcagatgaaggagatgggcatccacaaaacagaagccacagatgaagacaagagaaattaatcagtgacaccttttttttttgatatggaaagcagtttaacattcaatggacagagtgacattatctctcatgatagaatcagcactcacttcagagacatgaagttcagacaccacaattttgcacagatgaccatacatctttgtacgtacttccaaatggaaacccaggtcgaaatctgtagtgaaaagggatgtagctgcaagcagagcacatcaagcctgctttccctcttccttgggcttgctcttttttttttacttggtgtagcagaagcatgagcaccagggaaactgaaacaagaactccattgccagagaaatcaccaatacttttgtttggagaagtgtgcccaagggatttgcatgcaatgtaacccttacatatacgacatggatgccgtttatcagtggacattaggatttatggtctttgtgcaatatatatggtcgtgtcagactatcgttcctttcatttattctttattaaccctcataaacctgattgtgagaagtcatgatggcttttgattctttgaaggtcgattgaaatgttggaaaagccttccggatggaaagcatatgttctttagctgccgatgggtaaccttttggtcgttcagg

SEQ ID NO: 24183 - DNA, 1136 bp, Zea Mays
gttctgttcctgttgttctgacaggaggcaagtcttccagaggtgcttactgttgagaatctggttgaacgtgcaatgacaaggagccgagctaatggaactgcatcccctgatttgccaaaacctgaagcgaactctccaccggattcctcaaaaaggcaacggacagtctctccagttgactgtgtgatgcctgcggaaggtaatcaaggaacaagtgatccttctaccaacagggaatctgttgagttggtatcccacattgaagaaatgaagctaaataccaccacacatgtggatgcaagttctagtggttatcctggatttcttgagccagacgatgtttccattgagtgtattaaaatttcagttgctccattacaccaatttggcagaaggtcatctatccagcacagagattgtccactgcagctttgttgtgcaggcttgaaagtacagtttggtgtcagcacgaagtttctagataatgcagggcggccaaagatgagcatagtggttgagatccctgagaacctctgtaaagttttggaattctgcgatgttcttgctagaaagctgtcccaggaatctggtagcagttctgaatggagacccctgattaagaagtatggatacattaatcgtccaactatccgtctgaacatccctcctatttccaacagcgatgcggtggccttctcaactgatatatgccagagagagcctagtggtaacattcagaagcttgctttcggcaatgtgggcgccacggaattggactctctgttcgttaaagggagcaaggtggacgcatttttttcactggagttatacgattaccagcaaaatgctggcattcggctggttgcaaagaggctggttatacactcgaattagcaccaggctcatttattaaaatactagtactagaaactaacccttgcactgattcaggggcctttagaccaccatatgtatttaaccaattgtagtttgtagattatgccgagtgcgtaagatctcgccacaaggaggtattgagctgttgatggtaaattaaaattgaaatgttgcaaaatgttttaacaatctgtgctatttatttgtgaatagaatgcacatttgttgctactaca

SEQ ID NO: 24184 - DNA, 1640 bp, Zea Mays
atctcgatctggttgatgttaaattgtgattagctgattatacttgttgggaaatggtgtggagagaatttgtctggggaggaatggcaggtgcatttggggaaggcatgatgcatccagttgacactctgaaaacaaggcttcagagtcaagctataatgacaggggctaaggctcagaagaatatattccagatggtcaggacagtttgggcttctgatggtctaagaggtttttacagaggaatcagcccaggtgttactggatctcttgcgactggcgctacatatttcggtattattgaatcaaccaaagcatggttggagattgctaatcctaatctaagtggacactggtcacattttatcgctggagcgattggtgatacacttggatcctttgtctatgtgccttgcgaagtcatgaaacaaagaatgcaaatccaaggcacccaaaaatcttgggcatcagctgtagccaaaggaaatatttctcaaactcatgggatagagatgtatgggtactacaatggaatgttccatgctggctgttctatctggagagaccatggcttgaaggggctttatgcaggatactggtctacgcttgccagagatgtcccttttgctggtctaatggtcactttctatgaagcaatgaaaaagatgtctgagtatgggaaaacaaagtatttgccacacagtgatttgcatgttagcaactcctttgaaggacttgttctaggaggattggcaggcggctgtagtgcatacttgacaacccctttggatgtgatcaagacaagactgcaagtacaaggatcaacgtctaggtacaatggatggctggatgctataacaaagacgtggacttccgagggggtgcgcggcttgttcaagggaagtgttccgagaataatatggtatgttccggcatcagcattcacattcatggcagtggaattcctaagggaccatttcaacgacaaggttgatgcggatgcccatgaagtaacctccctgtcaatggacacaaaatcagaagttgagaaatcagcttagggtttcttttcttatgatctatgaagtgtattggtatccctccccggtggaaattatccggcgggatctttctgtcttgggcaacaaactatgtttcggtcatgtaaatgcggaggacattcattggcagctgggcggagacattgttgtgtaccagaaagaaagtaattgacaacaacatgatcatattgtggcgggaaatttggatccatatcattaaaagatcaccactttggatccataccattactatctcacttacatgtgggtcgacatgagtcaatgacatgtggggtccatggtatatatttaaagtttggatcttttaatggtatagatccaattgttcctattgtggcagcaattttcttagatagatagatattggtgagtggatggaatgagagaagtgaacatgtaacgtttctggaacgaaagaccaatgccaccggtgtattagagcttctgaatctctgttgctgatgttattgccattcttgcgtattgaaatattggatcgatttgccataaatcgtatcctgcgcagcgcagtcgaattggttacaaaatcaagaaaaa

SEQ ID NO: 24185 - DNA, 192 bp, Zea Mays
cgagagtccattgatgggctggccggcctacgccgacgcacttatataaaagccccgaaccctagaggccagcagcacattcttccccgagtcgccgtcgtctgctccgggctgctgttctgcgcctccacaaggctttggcctctgttgtaagatctgctttatttccaccctactaatgtgtaccaggcc

SEQ ID NO: 24186 - DNA, 935 bp, Zea Mays
gtgcgttgcgtccccggtccagtccaggcgtgcgtggcctcgagatcggaggcaacttcgtcaagttcacggccatcggcgtgtacctggaggacgcggccgtgccggcgctggcgaggaagtgggccggcaagacggccggcgagctcgcgtccgacgccgccttcttccgcgacgtcgtcacgggcggcttcgagaagtttcgcgcggggtgacgatgatccgcccgctcacgggcgagcagtacgcggggaaagtggcggagaactgcgtggcgtactggaaggcggccggcctgtacacggacgccgagggcgtcgccgtggagaagttcaagcaggtgttcaagccccatacgttcccgccgggagcctccatccacttcacgcactcgcccgccggagtcctcaccgtcgccttctccagggactcgtcggtgccggttgccggcggcgtggcgatcgacaacaagcttctctgcgaggccgtgctggagtccatcatcggggagcacggcgtgtcgccggccgcgaagctgagcctcgcggcgagggtgtcggagctcctgaccaaagggaccgccgcagccgcagccgcgctgcgggcggagcccgtctcggttaccgcctgagcggtccagcgaaccgcgaggagaaagagaaccgatcaagcaatcacgtctgccgcccttgcgtgctcctgctccgaacagatgccacgacggacggtgacgctgtcgcgtctgtttgcgctgtggcgttggcgtcgtgtctctgcctttctggccgcatgtgttcgctgtggtaacatttgaataaaagaaaacgcagatttgtttgcactgcaccccctaattccccagcgtgtgtggatcaatgtttgactcaaccacggactttggagattgcttattagtactgtgacgccgagactag

SEQ ID NO: 24187 - DNA, 1951 bp, Zea Mays
atcagcttgatcatcaaaaagttaccttgtttctagttttattttctttcagtgcattttgcaagcaagcatgggggatagttttgatgaagagcttgaaactggtgagttagatgacattctttcgaagttgaagagttcagttgagttagatcacaggcaagcagctgtttggaatatcctaggtttagttcttcttcggggtggtcagatacagagtgctatctcagttctatcttctctcacggctgttgctccagactacttggactcccttgcaaatcttggcgttgcatacattcaaagtgggaagctagagctgtctgcaaagtgctttcaagaacttcttctaaaagatcaaaaccaccccgctgctctggtgaactatgcagttcttcttctgtgtagatatggatctttgtctgcaggggcagggggcaatgtcagcacaggtccttacgtgcatcagaaagaagccttagttgttgcaaaagagtgcttgcttgcagcagtgaaggctgatcctagagctgcatcagtttgggttaatcttgcaaatgcatattacatggatggtgagcataagaactcaaagaggtgcttggagcaggcagcaaaattggaacccaatcatatgcctgctcggtatgctattgcagttcaccgtatcagagatgctgtaaggtcacaatgttctgatgatcaacttctttgggctgcaaatgaaatggcaacagttctaaaagaaggagacccttccgcagttgacgccccaattgcatgggctggattggcaatggctcacagggcacaacatgaaattgcagccatctatgatactgaaaacatcaatcttaatgatgcagaagagcgagctcaatatacactaaaacaggcaatccaagaggacccagatgatgctgttcaatggcatcaacttggcctgtacaatatttgcatgacccggttcagcaggtctgtaaattttcttaaagcagccttagcccgttccccagattgcagttatgcttggtcaaatcttggtattgcgttgcaactatcagacgatccatcctctgaaactgtatataagcgggcactggtactatcatcaactcagcagctgcacgcaatcttctctaatcttggaattctttatcggcaacataggaactatgaatttgcaaggaagatgttattaaggtcgttggaactgtgtcctggatttgcaccagctagcaacaacctgggtcttgtatttgtcgctgagggccgttgggaggatgctaaaagctggtttgagaaagctctgcaatctgatcccctgcttgatgcggccaaatcgaacttgttaaaagtcctcacattgtctacgaaacagtagaacaagagaagacctaactcctaaggaaattgccactgaagcctcagagttcagacacggaagcgcggtcaccaaatctctgttctgaagtgtctcaactgccagctcaaaattgatgcttggtgcctctagtctactgctcattgctcacagagtcacaggtgtaggaagtttcagaagtgcggcttcgaagactgcatttgattttgactgagttgctgcctatatgacaatcaaagctgcacaggctccgaagtggctgtgatgtgttcttaaagagtcgcatcagcgcaggaagagcccagattttgaagttcatgtgtagctaaatttcgatataagcttgaacggcttcccttagctgatgtatataaataaatatactccaacttgaggtgtactccaagttgagcatgtgcaagttataggttcagtgttccagagcaacttatggttctgtgcggtgaaactaacagcatctaaacctcaaatttggcagcaatttcactttggagtcaaaagggcgtcctacgagtgtataaaaatggagacgttaactgattaaca

SEQ ID NO: 24188 - DNA, 63 bp, Zea Mays
gtaccaaagtccaaacttaggagtataaactaaatatctaatgattcttttcacggccctaag

SEQ ID NO: 24189 - DNA, 2390 bp, Zea Mays
gaggcccatggtcaaggggtcgtcgttaatgattttacatgcttctctagtagtccattggagtaattaacatcgattacacggtcatggaagagcaccaagtcaagccatcggatctgccacccactagtttgcacaaccaggattcagccgcaactcctgttaccagtgctgaccctgctcgtcctgctgcttcaaatgattctcccagtcaggttgccagtgcagctcctgctgctgtttctgcacctaccgctgctcctgcagaagatgctgcagggcgtgaggcgtcagcatctgtgttctctgcgtctggtttatcctcctgggctaagaacctaaaaattcctcagccttcaccaggtcaagaatcacctacaggaaagaatacctttgcccgtttaacaagtggccttggactgcgtttgtctccaaaagcggcacagcaagatgagggtgctgaaggaagcacctccccaacaacaggacagcctggtgtttttggttctttaacgaaaggcattgtggattcctctaagaatgctgtaaaggcagtgcaagtcaaggctcgccacatggtctcacagaataaaagacgataccaggaaggaggatttgatttagacatgacatatattactgagaacataattgctatgggttttcctgctggtgatttgagttcagggctttttggatattttgagggtttctaccgcaaccacatggaggaagtcatcaggttctttgaaatgcaccataaggggaagtataaggtgtacaatctttgttctgaaaggctatatgatgcatctctttttgaaggaaaggtggcctgctttccttttgatgatcataactgccccccgatacaacttgtcatatcattctgccatagtgcctactcatggttgaaggaggatatagaaaatgtggtggttgtccattgcaaagctggtaaggcaaggacaggattgatgatctcgagtcttctactatttctaaagttctttcctactgctgaggagtccattgaatactataaccagaaaagatgtgtagatggaaaagggctgattctaccaagtcagattagatatgtgaagtattttgagcgcatcttaacttacttcaatggtgaaaatcagccacccaggaggtgtatgcttagggggtttcgtcttcatagatgcccctattggattaggccatcaattacagtctctaaccacaatggtgttcttttttctacaaagaagcatccaagaacaaaagaactaatgccagaagatttctggtttagtgcaccaaagaaggggattatggtttttgcattgccgggagaacctggcttagccgaggtagctggtgatttcaagatccagtttcatgatcgacagggagatttttactgctggctaaacacaacaatgatggagaacagggtaaccttgaacccaactgatcttgatgattttgacaagagaaaactgccctcacctggattccagattgaggttgtcctggtagattacgatggctcgcaaccagcaaaaccaaaaccaggcgctggacctgctgctgataaatctcatgctgattcctcggctagcacggttgcaaaagaaaatagtgctgcacctgaagaatccaacaagggaactggaagcaataatgatagagatgaagtcttctctgacagcgacggggaggatggatcttctaacggaaggaaggagaagactgccggcggtggtcaaagcagtgtaaatgctgctaaaccatcccagacaggcaacatggaggaggcggcggcatctgctgctgctagcagactggacaaagtggctataagcagcgaacagggaaccacaaaggcacctgatggtacatctctcaaaactgaagtcagcagcaaggccagctccaccacagcaccacctcctccagctgctgactcttccagcatgagcgaattcaaggcgattgccgcagatgcctcggtgttctcgttcggagatgaagatgattatgaaagtgagtaatgattctatgggtgggtacggtgttgagtttccgctgtacagtttggtgcttctaggaccccccatcatagaatgccaaagtccagagatgttaattcattcttgcatttcgtctccactgtagcagtgtcatcggtctgatgttgtacccagatgatgaaacttgttgtaactcaaccaggtcttgaacctctcctgtttgtttacagaaatgccttgtacacgaactcacttaaacagcgcaactactttttattattgatagttaaaagtgtgggtaatgtgtgtgcagccttggaaattaacaacggaaactaacactttggttgttttcggataaaaaaa

SEQ ID NO: 24190 - DNA, 1964 bp, Zea Mays
  misc_feature (1964)..(1964): n is a, c, g, or t
cacgcaccaccaccatcactggccaaaccaccagcaccacctcaccgaggcgggcgcaggcagcgaggctggcaggcattcgcaaggcaaaccgaggcaccgacgcccaaaaataaactaggcgtccccacaaatcgctccaccttccttccctctcccctccccttctcgctccgcttgcgctagccccgagatccacgccgcctcctctccggcgcccccgccctcgcctacggcggctcacgctgcctcctggccatctctgcgcggccgcgaccgaccgccggttttgctaaccggtccagggagcactgggcaggaggaggaggaggtgggttccgtagaggcgcggtgccagcctgagcaagagggcgggcgggcggccgggcgccggtgacgttctcagcttcctgcaagctcgccgagttgccgggcggcgtcctgggcggggttgttggtggcgcagggaagcggggaggaggctcgccttgctcgtagctgcattggccgcgtgcgccgaggaggcggccgatttaatcccaggaggagcctccccagcttgtttcgcacgctcccggcgccctaggtgcttctcgctccgcttccgcttggtccatggtccatggggtggaaggtggcgtcagggtgtaaggcggccggcgacaagctcaggctcccaacctcctccgccgccgcgcggtcgcggatgaagctctggttggtgcgcgccaccaccacggtgctgctctggacctgtgtcgtgcagctcacggccgtcggggacacctggggcccgcgggtgctcaagggctggccctcctgcctcacgccgcgcgaggaggaggcggccgccgcgcgcccgcgccctctcgtcgtcgacagggccgcgctgccgcccaaaagaatatataggaataatggttacttgatggtttcgtgcaatggtgggcttaaccaaatgcgagctgcaatatgtgacatggttgtaattgcaagatatttgaatgtcactttagttgtgccagagttggataagacttcattttggaatgatccaagtgagttccaagatatatttgatgtggagcactttataacctcgttacgaggtgaagttcgcatcctgagagaattacccccaaggatgaagagaagagttgaacttggaatgtttcactccatgcctccaattagttggtctgatatctcctactatcaaaatcaggttgtccatctgaatagaactgatgctaggctagcaaacaatggtttaccgatggagactcagaaactgcgatgccgagtaaattatgcctctcttaaatttaccccacaaattgaagagctgggcaagagagtaattagaattcttcgccaaaatggacctttcttggtacttcatttacgttatgaaatggatatgttggctttctctggctgtactcaaggttgcagtactgaagaggcagaagaactcacaagaatgaggtatgcttatccatggtggaaagaaaaagtgattgactcagacttgaaaagaaaagatggcctttgcccattgacgcctgaggagactgctcttgtcctcagagcacttgacattgatagaagtatgcaaatatacattgctgctggggaaatatatggtggaaagcgcaggatggctgctctaacttcagcatacccgaatgtggtgaggaaggagacacttttggaaccttctgatctgatgttcttccagaaccattcatcacaaatggcagcactggattacttagtatccttagaaagtgatatatttgttccaacatatgatgggaatatggctaaagttgttgagggtcatcggagattcatgggctacaagaagacagtcttgttagatcgaaaactcattgttgagctagtggaccggtacacaaatggttctctgcaatgggatgagttctctgcattgatcaagn

SEQ ID NO: 24191 - DNA, 1238 bp, Zea Mays
cgaacttattcaacggcctattatgtctctgttgtgcatgtgtgtgaggccactctaacgaagcgattgatagagtttgaaaatacggattctggcagcttaacgttcactaaactgtcgggtggactagaaggtggtgctaaccctccagcattccaacgagctgaaaacaaaagacttgaagctgctaaaagggctgaagaagctgctgcagttaaggaggcagcgctggaagaatctctttgcgacacacagaattctgagattgagagtaccacaactcctaaaaaggctttaagcggggataaatcttcaacaattggatctgggggactcataaatgactctgtgccaccgaaggatcctgaagagggaggtgaaaattgtgaaggcaatgctgatccagaaagcctttctgacatcgacgatgtagaggttgattggtaccttcacaatgaggaagaaacacaatataaaaagattatctgggaggaaatgaacaaagagtaccttgaggaacaagcagccaaggaagctttggcagctgaattggcagctagagggattgttgtggaagagggaaagaaaaaacggaaacgtaacgaagacaccaagagctcgacgcctgctgacacaccggcagaagccacatacaacatgctgaaacggaagggacttggttccaagatcaatgagggagctgttggcgaattatacaagactaaagatgaagttgagagcgcgagtaggaaagaagagatggagttcgacgcactgtttgggccggacaacgctgatggcgagacggtcgatgatggtggttacggctatgggggctgcggcgatggtggcgcggaagcctacaatggcattgatgacgattttgatttctaggaggatgtgttatgtgtagcagcatttgcagctgaccagcacgggctagattcttcatctgtgcgttatagtttatagttagtttcatttttcttttgttaggggagtttgaccaaatcattatggagctattggatagtgcacttagttttggttgtataataatgttgggaactaggttctgcatgggcgtcgtaactgtcgcaagccctatgtggtcaagcgcctataccatgggcatttgttgtacatcccacctccaaaagattgcaagtggtgatgtaacattttgtattagcaataaaggacacaagaatgcattcatttgaaactttgaaaatctc

SEQ ID NO: 24192 - DNA, 2727 bp, Zea Mays
tattgattaacaatcctcgcatgtcgtgtctttttaagattagctgtttaaatgtggcaagtgctacacattgtttataaatatactaggtatatgctcgtacgttgctacgaaatcaatatgataaaatacattgatatacaatggctcacagtctagcataggtaggaataattgtataaagcagctacgaccattaaacaaagatgggatggacaataatacatgtagtagagaccattcctttcatcagttgcaggctattaggcttgtcattgcgcttcctcggtccatgcgttaatcctgatcacaatgccatttcagcttgtagtgcagccagctcatcgtatttagctataactttctgtgaagtagggcaagctagttgcttgtttcctgggacatgcactggatgcaccgaaagagctgcaacaggctctagaagcttagattccaactcttctccttccagctcttcaggttttgcatctagttcatccttgcaaaatatttccacgtcgatctggttgtctgtgtgaacgatgatcttcaggacaaaacagtgtgtgatggcgcttttgcaccactatgaatgtaactagaggaaggtagccctcttccaagctggcacacgcctaagtacaaacacaaacaataaattatgtaaacacagttaggagaatacatcaaaagagaataatattgcgaagaaaaaacctttctaattgcatccacttcataatgcaagaaccggctaaactgctcctcactggcatgtctctgcaaatcaaggaaacaagtaaagtaactccaggattcttctccaagtatacaaggtgtagctgtttagctgttgaaatatgtactaacataaagaaaactggcaggtctttttctttacatgcaaggaaaagagatttaagtttagacaacaacaaaattcattcaaacagacaattacgaacccatagaaaattttcctatttggtttgcggctcccatttgccttatagaatggcacgagtagttccctgaagcaaaaatatgacatttaaaaaaaggacaaatcatttatctgaagaactaagttagacaactaagatgtttagcatgcctgatcattccatagggaacaaatcccttttgtggatccttcacttgtgtgaaaatatcagctatgatattttccctatgaccatgagaagacaccaagcacctatactttgaaaattctagccaatccatttatgcaacaactaatcataaacttttacatgtccaattagaaaccagaaacacacagagatctctctccaataggccatgtcaataagaagtcaaggtgaaacaacaaaatgtttctttaaaattctgacaaggtggagcacttgacatgtagttttgcagaaagttgtgaggcctcaacctcactattgagctggcttcgaccgacggcgcgacgcgacgtgtcacagacttcacccatcatattctcaatgcaagatcagacaaaatttgcagcctaggaacacctaccatgaagcaaaactccctagttctataggacaaaacactactcgcaactaattagaacttaattaatactcattccttcctctataaaaaggccacctgcatgtatccatattcagctccatgaacaatcctaaatttcataaaaatctactgttgtttgattctacacatgtgtatttcatttccagaggcaggaaatctccatggatcccacaccaaccgcagaaaacaccactgtgctggggaagcaacgaacccaatctcctgcgttgagaaatctagttaccattcaaaatataactgacccgatgagtggccaagccacgaactacaatgttgcaatgttcttcttcgcatgcacactgaatagatggttttccaagctccctttggccatgaactcatacacgagaagtagttcacagtcctcccatccaagagcttcacaaggttcagatgggagagtcttcctagaaaatttatctccgacggcgtggatggcgctcaccttgattacctcaccgaagggaagcttcctcccatcccatgtcacggccgcgacagcaggggccaacaacctgcagcagttctttctagctaccccgccaacaccttacgcttgtgcttcttcttcaagctgtccacccacacatccgtcgccccctccaccgaccagcccgacctcatcccttgcgctgatcctccgcttcccttgccctgggtcccttgcccgcctctgtgacgccaggctccactgcgtgcggatgggggttgagtgcgagcggtgaggggcggctacgactggctgtggctcgcatagactaaggagacaacagagaggaaatcagggggcgacgcatgcaagcgggcgtatccaaatccttgatgcaacgctaggcgctgatgtcagcgtttccaaattggggaacaagggttgcgtctcgtgcatgtcgccggcgttgatggaaggtgggcgggtggcgatggctcgggttgtcggcatggcgttgatggcggcatggtggcgcagcgcgtggggaaggggatcgcctggggaagggcagcgttgaaggcgggatggtggagcagggtgtggggaagggcggtgatggatcgggtggctcgagttgaggtgatggctctggtggcggagcgagtggggaggggatcgcgttggatgacattgacgcg

SEQ ID NO: 24193 - DNA, 1349 bp, Zea Mays
ggccactgcagactgcactcacactcactaagcagctggccggcatggtggagaaggcgtcgatcgaggacgtgatgaaggtgctgatggcgtcgcggaagcaggacctgcaccagctgtggaccacgtgctcccacctcgtggccaagtccgggctcccccctgaggtgctggacaagcacctccccatcgacgtggtggccaagatcgtggagctccgcctcaagtcctcgatgtcccgccgctcgccgttcctcgcgcaccaccacccgcaccaccacccggcggcgggcggcatggaggcctcgtccgcggccgacatcgacgagcaccacaagatccgccgcatgcgccgcgcgctcgactcctccgacgtggagctggtgaagctgatggtgatgggcgaagggctgaacctggacgaggcgctcgcgctgcactacgccgtggagaactgcagccgggaggtggtgaaggcgctgctggagctcggcgccgccgacgtgaaccacccggccggccccgccgggaagacgccgctgcacgtcgccgccgagatggtgtgcccggacatggtcgccgtgctgctagaccaccacgccgaccccaacgtgcgcaccgtggagggcgtgacgccgctggacatcctccgcacgctcacctccgacttcctgttcaagggcgccgtgccggggctggcgcacgtggagcccaacaagctccggctctgcctcgagctggtgcagtcggcggccatggtcatgtcccgcgaggacgcgcacacggcggtcaaccccgcggccgcgcccatgtacggcgagccttccggaggcggcgccgtgtacagcgcgagcggcaccagctcgagcatggtgaacctcagcctggacaacaggatggtgtatctgaacctagggatggacgcgcagttcggcaagatggacgacggcggcgacggtgatgacggcgggggcagagggcaagggggcccgccttctttgttctccccgcatggctaccattgacacaagctggccggagcggctgctgctctacgactatctctccttgtaagctttagaactaattaattacatgttgttattcatatccacattacaggagatgatgatgatggtgagataatccgtttggccctctatcatcctctgagccttttaattagcagagccgattagagagagatcacgcaaatgcatgcatgcagagtgatgcatcgtcatcacaagagtatgcatggatcttggtgagttgcctactccagttgttgtagcatgcggcgccgggggggcgttgtctgggacattttaagaggtaaaactgttctt

SEQ ID NO: 24194 - DNA, 5097 bp, Zea Mays
tgaagattgtgcctatatcgattgttctagttttgaggcaaataacatcccacggtctatccgttacctatccatttccatgcaagatcattgtgctcagaatttcgaggaacaaatgggaaaactgaaagaaaagatatacattaacaatttgcggagtttgatgatatttggaaaatacattatgttacatctgctcaatattttaagggacacatttaaggaaataagacgtcttcgtgttctatctatattcatatactcccatagttccttgccaaacaacttttcagagcttcttcatctccgctacttaaaacttttgtcaccttattactcagaaatgtcattgccaaacacggtctcaaggttttatcacctgaaatttctagatcttgaacaatggggaagtgatcgttctttgcctaaggacattagccgccttgaaaatctatgccattttgttgtttcggaaaagattgattccaatgttcctgaggtggggaaaatgatcttcttacaagaattgaaagaattccatgttaataaagagagtgttggatttgagctacaagaattgggtaaactagatgagcttggagggaagctcaatatatacgggcttgaaaatgtgagaaccaagaaagaagctaaagaggccaagctgatgtcaaagaggaatttagttgagttgggattaatttggaacatgaaacaagagtccaccgaagatgatatcctagatagtatccaaccacactctaatgttaggagtctttttattgtaaatcatggtggtaccctcggtcctagttggttgtgcagcagcgacaccatatacatgaaaaacttggagactctacatctagagagcgtatcgtgggctaaccttccacctattgggcagttctatcacttaagagagctaaggctgagtaaaattgttggcatatcacagattggacctggcttcttcgatagcacgacagaaaaaagtgtctcacacttgaaggcagttgagtttaatgatatgccagagcttgtcgagtgggttgggggagctaactggaatctgttctcaggaattgaaagaatcaagtgtactaattgtcctaggctgacagggttgctggtttcagattggtctatttcttctatataagacagcactgtatggttccctaatcttcatgacctttacatttatgaatgcccgaagttgtgccttccacccttgcctcacacttcaaaggtatcccgtattcatatgggagacttttcttatgaaggtcgtaccatgttgaaaattaataacccctctagatttgccttcgaaaatctgggtgacctagagacattggtagcttgggatgcactacccttgtcctttatggatcttaaaaagctacattccttgagacgtataaatgtcactagatgtgaggaaacatttttgagaggactggatgatggtgttgtgctacccacagtccaatctctctaccttggacgatttacacctaccaaaaattatttgtcaaaattattcaaatgttttccagcactttcttctttgcatgtgatggcatcaccatcagatgaggacaacgaggaagtggtactgcattttccaccctctagctcgctgagagatgtcaacttcacagggtgtaagaatctgatcctacccatggaggaaggagctggattctgtggcctctcgtcgctcgagtcagtgaccatacacaaatgtgacaggttattctctcgatggtccatcggaggacgagcaactcagactcagagcatcatcaaccctctcccaccctacctgaggaaactcttcctttcttatatggaaactctgcctcaggaagctctgctcatgaatttgacatctcttgagaaactcacactatgtaattgtcttggctgtgagcaaagcaccgagcgaatggctgtactcgcgaatctaacatctcttaccacgctatatttatataattgcagaaatatcacaatggatggattcaatcctcacatcacatccagcctcaagtatctatgcgtgtacaatgagagaaatgatggaactgatccgtattctgtagcagcagatctacttgtagcggtggtgaggaccaaaacaatgcccgacgtttccttcaaactggtgggactttatgtggacaacatctcgggagtgcttgttgctcccatctgcaagctgctctccgctaccctcgagacgttaaacttcagtaatgattggcggacagagaacttcacgaaagagcaggacgaggcgcttcagctcctcacgtctctccaattccttgagttttataactgcagggctctgcagtccctcccccaaggactgcaccgccttccttctctccacggaataactatctatgggcctcaaaacattagatcactgcctaaggagggcctccccgattcactacgaatactacgtataactaactgttgtgctgagatttatgaggcatgccagcaattgaagggaacaaggccagatataaatgtacttgcctccaaagctcgtgtgcaaaattgaatacctgcttctgcatgtcttcacagtcagctctgcttcaacatgcctttcactctacaggtaaatactgtgaaaacatcttcctatacgtgagatagttgatcttcatcgattctacagccaggatgatgtcttattggatgatgtgttggtcatggttggcacaaaattcagtagcgttcaaggcaataaacgagaacaagcatgggatgtggaaaattttagaaagtaaagacaagtgaattcttgacgacgttggcttggcaccttagtttgagtacataatgaaagaacaaccttttagcaaccctggagcatctagaaaatatcagtcatgtaactatcgttaatcatttgaaaaccactggaagacaggagatgtagcaccacaagccattcctttgatcatttgaaaaccattgcggctctttctgattatatcaaccagttgagtggatgaaagaccaaaaaatgctttggaagaagggctcacaattgtggataataaggcatccagtattatagaggaaacaaaggaaattcaaattagacggaaacctgctagtccaagttcttatatgccaaattcatcagtagatacacatacactctacaccctaatcttctttgttatgacatttattgtttttttcatgaactacgtacatcttaattttcaattcatctagaatactgaataggtgatgattcatcaccaaattgataagtgaatattaatacatctgaaacctaaaattaaatatatattatataagttgttgttaatgttcattccatttttgaacacttgcatgaattttagttctctgtttcttttgaaaaattctgtgttgcaaaaatataaatttatatgaaaatatattatatggtgatgagaagtttgagtttagtatatggtttcatattagctatacattgttggtactatcggcttgttctctttttgtttgaaaaaaatactatcggcttgttcttaaggacacataaaggactagttcggaagcaagagaattagaggagagatggctaaaatccccttcctaattaaataggaagggaatttgagcaccctcaatcccctctaattcccttgctttcaaactagcccaaagagtgtcactgcatcctctgaattatgatatattgaacatggtgttataattgtgaaccgatgagtataacttattttctccatattctgaacaacccattacttaaacagatttgcatcctactggagacattgctggcagaggaattgagactggcataggagaactcaatatatgcttgtgaataacgcatccagtgaaagatagtagattttcatcaattcactacccaggatgttgtcgcattggatgagaatgacatggaagacggcgaactagaggaagacaacaacctcatctaagctgaaaatgtgttgcctgtggttgaagaaaatctagcagatgaacaacactgccttccctgtcctctctagacctgaatctctctgatggtttggattcgtccatgattgatcctgtacgatgaaggatcagctcgtccaacgtttttcaaggaacgaactcaatctgaggaattaccttttcattggtcacctggggtactacgaggaatgacttcacgatagacgactcggttttgcgacgcaaaccaaacgccatggttaggctcagatgttggatcagatgattcctcgtggcttcgtgacgcaaaccaaacgacatggctaggctcagatgttggatcgtatgatttctcgtggcttcgtgacgcaaaccaaacagcctcatgctctagccaaaggcatgatcgtcatcgttctgaaacaaagaaaatgatgtgtattcctttcagtgagcggcctttgcatgctgcatgagatcaagcaagccgccgactggcaatgctccacctgccattcagttcgttggtgaggtattaatcaccagccatgttggcacttggcggcatgcagatggagcagaacatccaggtgaagcggacagatacatgatcgatcatgagttggcgcagacacaggccagacaaccagaggctatattccaattcatacattccatgataagcaaaggaagatccaagacaacacaaatatacaaatagttagttatacaagcaaaaatcctgttgttttgtgcctcccattttctagtccagaattaatatgacaatttttcactgaaactggttggatcagagaccaggaaaaaaagggaaatgacaactacagctgtgttttttttttcaaagaaggcagctgcccgtcgatgatgtgctcacttgaggatttcctctgccttttcagtgacactgcttcatccttttcagagtcaaatgaatctctacctcatttcactgcacatacttccaaactgatttgctgtaacatacttgagtttcggtatgacattaatttttaactcataagagaacaaaatcagaagaaaaaaaaacaacaa

SEQ ID NO: 24195 - DNA, 5686 bp, Zea Mays
cagcagtcagaattttcgcgcacagcagccgggcgccggcggatcttcccagtttcacaccacacgctccacggctggggatcacgctgtcacgctcacgcgcccctccccccgccgccaacgcccacgctgcgagcgcgaatccatcttctctacctcctcgtccattcctagggttcctcctctgccgaatcgcggggaactctgcgggcccaatttggtagggtaatctcctaccaggaggtcaaattccagtcaacgccgcttggttttgtagccgaccggtcgatttgaatccaggggcaccgattggctgggtgagagggcaggctcgatttgaacccgcctctgcccttttcgtggaagttttgggtcttattaggcgcggattactggggtctagggatgtggtagttactagctgcttgggttaggcggcgcgccgaggtgcttccgtgcttggctgactagtgtcaatggcgggatctgtcggcaaggccagggcggcgctgcggtcgtccccgaagcggtacagcggcacggacccaccgttgtctctggcggggccgacgttggcggatctgcagaggacggccgagctggagaagttcttggttgaagcgggcctctatgagggtaaagaggagtccgcgaagcgggaagatgtgctatccgagattggtctgatagtcaaggaatgggtgaagcagttgactcgtaagaaaggatatgctgagcaattggttgaacaagcaaatgcaatcctttttacttttgggtcttacagattgggggtatcggcttctttggttcttttatcatataacaacttttcttgacattcagatattgaaatagcacaactcattgtatctatagtcttattaacagcattcaagttccacttgctgaatataacctagatttgttagttttcttcagggttcagaacctcgacttagttttatgttctgcataagcagaagggcttgcaacttaagaactagtaggtgctttcaagtttggtactccacttatcattaagttttgcataccagcatttgtcattaagaaattactgtgatttgccataaagataagagttggttaaaaggaatatgatggaacattactgttgattattttagtatggaatatggattgtatttttattggaacattcagtgcctggtcttcggttggcctcttgtgctagttgataagttaaacaaaatgacagattgcatttcttgtgttgcagacaagatcaaaagagtttacggggtctatagttttctttcttcattcaaatactatttattgttgtgtttaagagaaaccgtactaccagatgtctgagtggttacaacctattgtgtgtaactcatatatagagcaccgacacattcttgttactcgaatagtgcaaaactatgaaagcttggatatctgtttataagcagtaacttgcaggacaaggggctgtagattttagatgcttattttacagctattgtataaccagttcgctgctgcatctcacaaatcaacttcagtgttataaagttgtatttattgatatcgattaatcacaattagttgtcctagtcagtatcctgaacttgactaggggctacgacctgattaggctgattagttttctggtagtctgattcattgtcgacttctgatgattagtcggatgactagtgggtggaagaatagaaaaaatggaattgctgggcagtttaggacatgggctacatctgggatggtttacggcaattggcctcatgtttttcagcccaatttgcaaccctacatgcagccaccactctggagttgtctccatgcttgatttgcactctagaacatatactatatagtgtatatttggtatactagtcctgatatatataggttgagtaggatagaccagggctgactagtcgtcctggttgatgactaatcgtgactagttgcctggtgggtcccatgttgattagaattgatcagactgcttgatatcatttaattaatgaaaattttatgtaagacaataaaacgtccttccctaggtttttatgtcattttacttgattttgtgaggtgctgagacagtatgctatccttttgcattaaatacttttaatcgataaattttatcttataaccttgttaggttcatggacctggagctgatattgataccctttgtgttggaccttcatatgtgaaccgagaggaggatttctttgtcacactgcatggcatattagctgagaaggaagaagttgctgagttgcaacctgtacctgatgctcatgtacctgtattgaaatttaagttccgtgggatatcaattgaccttctctatgctagcatctctctttcagtgataccagcggtaagtcattccattcatgcttatcatggtgccgcctagtcgccgccaaggtgtccagtcagccgagactggatgccatggctgttcgcctcgcccagaggaagttaggcaggtgcctgggtgggtccggattcaccgtgctgcctaggcgtccgctcagggacgccgtgacttcgccgcgccgccccagcccatttggcccacctcttatctctaattctccttcccctcaaacagcgcctccagcccttcactcaccctccagctgcctcccctcctctcctacccgccagcatccgccagcccctcctctccaactgccagccgccaccagcagtatgaacttatcacctatatttatttgctatgaagtatgaacttgtactcttaatctctaaattgctactgattactaactactgaccattgcctaattggcgcctaggtgcctgactaggcgtccaggtgcccagctggcgcctggcctcaccgtgggcgctgtgataaccttgattccatatttccattgaatacttctatatgttgatgtgtccttgtttggctacatttgttaaagaaaaatttcctgcataaggagtgtactttttgcatgggatagtgatctagccacttaagttatcttatattggttcctgcttttcaagggtggaagttgcgatagattttgttctttttattaaaacctgttttcttaaaatgtatatcatgtgagcatgtacatttatcatttaataatgtgaattagctgttggatgttgaatgttttccttcatgtcatctgttttgttaatcttaccttttaagatgacaggagggataaaacatataccttaaactgtttatttcgccttcttgaagtcattctccctatttttgtaaatattggagattttgattgaaatcaacatgggatatctttctgaagaatatacatgcatgcagaatgctgttgaacagatgtatcgtttatttgttttcttgtactgctgcaggatttcgatatttctcaaggatctgtactttgtgatgttgacgaagcaactgtgcgaagtcttaatggttgcagagtggcggatcagattcttcggcttgttccaaatgttgagaatttccggacaacactcagatgcttgaagtactgggcaaagagaaggggtgtttattctaacattactggtttccttgggggtgtgaactgggctctgctggttgctcgtgtatgccaactctatcctaatgctgtgccaagtatgctggtttctaggttcttcagagtttttactcagtggcaatggccaaatccagtgatgctatgtgcgattgagaataatgatcttggtttttctatatgggatccacgcaaaaatccacgtgacagaaaccatctcatgcccatcatcactccagcctacccatgcatgaactctagttacaatgtttcaaccagcacactgagggttataatggagcaatttcaatttggcaacaaagtttgtcaggtacttcctgaaaatttacagctgatagctaatgttcttggtatggtctcactgcgtatcttttatgcaggaaattgaacttaataaggccaattggaatgccttatttgagcctttccatttttttgaggcatacagaaagtttctagtggttgacatagttgcagaggatgacgatgatcttcgtctttggaagggatggatcgagtctcgtttgagacaacttactttaaagattgagcgggatactaaaggaattttgcagtgccatccgtacccatgcgagtattcagatcccacaatagagtgtgcacattgtgccttctacatgggcttatcaaggaaagaggggttgaaaaaacgtggtcaacagtttgatatccgtgggacagtagatgaatttatgcgtgaaattggcatgtattcattgtggaagcctgggatggatctggctgtcacccatgttcatagggagcaggtcccatcttatgtatttgagcaaggatacaagaaaccctgccctacaatgcatgcaaaccaacaagagcagtctgatggagatggaacatttagcccatatctggagagtcagcttaagagaaagtacatttccgatggagatggtcatgtggatctttgcaaatctgtaaaaagggcttcagtaagcccacctggtgtgggaaccccacctcatcttggaaatagtgtcagtaacgttgtttgtgacagtccagtcaaattcgtttcaagtgtcgtttgcagcggagcgcatgcttcctcatcacatgatgatataaatatagaacaagcacaattaactacttcaccatatggatctgaggatacctcagcatcaggtacaagctgtgcagcagtgggagcagttattttggctgatgaatccagcaagctcggtaacttgacatcagatcttgaagttgatacaattcagacaatgccactgcacacatctttagaatgcgtcgctcaaaagggtgaaacaaagcttgaggaaatcagaaggttggcgagcaacaattgtgctgagtttctagagagctaagttcttgctgacaaggtacacttagacttaggtgggcatgaagtgaattgaaacatcattccagacaagtcaatgaaacatgtggttcgaagcggtttcgaaaggtgatgcaggggtgaagtttgcatagcatcgataggccggaaatcggatttgaggacccaatgatatgccgctgcatggaaagtttcatcatttcatgcctgtggtcggtttgctcgtgaagattgcttttgttcgctgtggaagcgggtgcaagtattacacagcagcaatatcgggactgttgtgaaggatgaagttgagagtcaacatctgagaaccatggagctcaccatacgccacaaaggaactaagctgctggtttaggcatggttaagagagtcagtgctggtcctttaggttaaataaaaactttgcggggctgcacggtgtgcagaaaaggttgagtctagggcactaggctgatggtctatgtatgtgatgtacgcagataggcagatacctatgcgttcaaagtagcgcatcaaattttggccccattattttcactgcagtatcatgatgtgatgttgatagtagagatagagcaagtatgatactccctccgtccaaaagtttgtcgttcttgctttttaaggagtcaaacatcttgaactttgaccatatttatataaaaatattattatttatagt

SEQ ID NO: 24196 - DNA, 2237 bp, Zea Mays
ccgggcgcaccgtcaccggggtgaggctgtattgcgtcgacagcaacacctgctttcgctacgacgggagcaccagaggctaggatatattgcttcatcagtgacagggagccaagatgccggccggagggttctcggtctcggcgccgtccggcgtcgagttcgaggctaagatcacgccgatcgtcatcatctcctgcatcatggctgccacaggcggtttgatgttcggctacgacgtcggcatctcaggtggtgtgacgtcgatggacgacttcctgggcaagttcttcccggcggtgctgcggaagaaactggaggacaaggagagtaactactgcaagtacgataaccagccgctgcagctgttcacgtcgtcgctgtacctcgcggggctgacggccaccttcttcgcctcgtacacgacgcggcgcctcggccggcgcctcaccatgctggtcgccggcgtcttcttcatcgtgggggtgatcttcaacggcgccgcccagaacctcgccatgctcatcgtcggcaggatcttgctcggctgcggcgtcggcttcgccaaccagtccaagccaacgtatacgacatgcaccgcgcaattatgtcagagcaggcgagactgggacagtgttcatgtggccgttcccctgttcctgtctgagatcgcgccgacgaggatccgcggcgggctcaacatcctgttccagctcaacgtcaccatcggcatcctgttcgccaacctcgtcaactacggcacgtccaagatccacccgtgggggtggaggctgtcgctgtcgctggcaggcatcccggcggcgctgctcaccctgggcgcgctcttcgtgacggacacgcccaacagcctcatcgagcgcggccgcctggacgagggcaaggccgtgctcaagaggatccggggcaccgacaacgtggagccggagttcaacgagatcgtggaggcgagccgcgtggcgcaggagatcttccagcagttcacggggatcaacgccatcatgttctacgcgccggtgctgttcaacacgctggggttcaagagcgacgcgtcgctctactcggccgtcatcacgggcgccgtcaacgtcctctccacgctcgtctccgtctactccgtcgaccgcgtcggccgccggatgctgctgctggaggccggcgtgcagatgttcctgtcgcaggtggccatcgccatcgtgctgggcatcaaggtcaccgaccactccgacaacctgggccacggctgggccatcatggtcgtcgtcatggccttcctctccatgctctgccacctcaagtacgccatcttcgtcttcttctccgcctgggtcctcgtcatgtcgctcttcgtcctcttcttcctgccggagaccaagaacgtgcccatcgaggagatgaccgagagggtgtggaagcagcactggttctggaagcgctacatggacgacgacaaccaccacatcgtcaacggcaagctcaccggcgcctccgtttaactactccgtctgctctgttcatgcatcagactcacttgatagtactacagcactactactgcaacaccgcaaccgcaatcccgatggcaattgctagtactgcaactgcgatggcaatgccgccttgttgttgtacaatagcccagtgtttcggccagagtccgtgctcatctttgatttgtagtatctttcaattttcaagcagagtttacacggattgtaatcacatccttgcctggtcatctaaaactacatgtgtactatttccggcgctataacgtgtggttgattcatcacagacagtcagtcgtactcgtaggctcgtaccatgttctgagcttcaggcaagcatatatatatagtttttagtgcccattgtgcgtccagtaaacatgtgatacttacttcaggaccaagagtgtcttaattaaccattcacggagtagctgcacagtcacctttttttgttcaggttttttctcgtgatccttttgagaatctagctgcggagagaatttagttatggagaccggagagaatcctagtattgtgcagagtaagtgcggcagggtttaggatgtataaaatgacggttttctattatcacaacgactcgaccgatttcatatttacattgattttggacgattttgactaaactggtacttatagaagcgaactgaaaagctgagcgtttcactgtctgcagcaacttctgttggc

SEQ ID NO: 24197 - DNA, 1610 bp, Zea Mays
gcacaactccaccctaggcagcgccctgccccgtcccttcctctgcacactccccagactgcccactcgtccgccacccaacgcgacgcgtcgccaactcgccatggcgctccgtcttctgctcctcctcgtcactgttactaccgccgccgacgcgctcacgccggacgggcaggcgctgctggcgttcaaggcggccgttctccaagatcccacgggggcgctcgccaactgggtcgccaccgccgcggacccctgctcatggaacggggtcacctgctcctcccctgaccccggctccgcgcagcaccgccgcgtcgttgcgctctccctccctaagaagcgcctcgtcgcggagctccctagggccccgctcccgtcctcgcttcgccacctcaacctccgcagcaaccgcctcttcgggcccatcccacccgcgctcgtcgctggcgcacccgcgctccagagcctcgtcctctacgggaacgcgctcgacggccagctccccgaggacctcggtgacctggccttcctccagatcctcgacctctcctccaacgccatcaacggctccctcccggcctcgatcctcaaatgccgcaggctccgcgctcttgcgctcgcgcggaacaatctcacaggctcgctccccgctgggttcggcgcccgcctcggggcgctggaacggctcgacctctccttcaacggcttctacggcaccatcccggaggacatcgggaacctgtccaggctccaggggacggtcgacctctcgcacaaccacttctcgggccccatcccggcgagtcttgggaggctaccggagaaggtctacatcgatctcacctacaataacctctccggtccgatcccgcagaacggggcgttggagaaccggggacccacggcgttcgttggcaacccgggcctctgcgggcccccgcttaagaacccctgcgcgccagacaccatgccttcctccaatccttccctgcccaatgatggggactcgtcggcacctgaggcagccggtggtggcaaggggaagaacaaggggctggggaagattgccattgtggccatcgtgctgagtgatgtgatgggtattttgatcattgcactggtgttcttctactgctactggagggcggtttcatccaagggcagcaaggggcacggtgtggctgctggttcaaaagggtccatgtgtggcaaggattgtggatgtttcagcagggatgattctgagactccatccgagcatgtggagcagtacgatctcgtggcattggaccaacatgtgaggtttgatttggatgaactgctcaaggcatctgcttttgtgctggggaagagtgggattggaatcgtgtataaggtggttcttgaggatgggctcacaatggcagttaggcggcttggtgaggggggattgcagaggtttaaggagtttcagactgaggtggaggcgattggcaaggtccggcattccaacattgttaccttgagggcttattattggtcttttgacgagaagctgctaatatatgattacattcctaatggcagcctctctgcagcaattcatgctgcagtagggtggaaatctg

SEQ ID NO: 24198 - DNA, 2869 bp, Zea Mays
agcggttgcccgagcgaatccacgcgtccgcccgtttcgctcgctgtctcccgcggcacggggctccagcgccgaacggaaaaccccaccccaccaccactggctactcccgatccccagtccccatccctctcctcgcaaaaggccaccgcgacgcgaccgcgtactgggggcgagacgccagtgcaggcaggcaggcagaagaggagtcgccaggaagcaaccgcgagggagctgcaagcgagcacagcagcagcgcagaaaaaaaattctggaataatttttcttccctttggctccgtgaggttccggtgctcgctcgctcgcctgagcttcgatcgagcccggtcggcgaggcaggcgcccgatcgccgctctccgggagcttccggggggccgtcggatggagccgtacgcggcggcgaagagcggcggggccgacgccggcaccggcaccggactggaagactcgatgcggaggctggggctcggcgacgacggggaagcaggggaggagaagcttccggagcggccgggcgaggcggactgcgcctactacctccgcacgggcgcctgcggctacggggagcgctgccgctacaaccacccccgcgatcggccggccccggttaatggagttggaaagaccgcagttacagtggagtacccagagcgtcctggacagcctctctgtgagtactatgcaaagaatggcacctgtaaatttggttccaattgcaagtttgatcatcccagggagggtggttttgtacctgtcacattgaacagcggtggattccccctgcgtctgggtgaaaaggaatgttcctattacatgaaaactggacattgcaagtttggagctacatgtaaattccatcacccagaacttggtttccttacggagacgcctggcatgtacccaccagttcaaccaccacctatttcctcctcgcatccatatccacatcttgccaattggcaaatggggaggcctcctgttgtgccagggtcatttttaccaggctcgtatccaccaatggtgcttccacatacagttataccaatgcagggatggaacccttatgttgtatgtttctattatcattttgtactttattactttatataaggcactccattatataaattaggaagatatctttgttccaaattggctggtctaatattaagctaaataatgagaatccagagataagttcatgctgtcctttatgtaacatttttgcctatcacaagttcacgaatcacgacaaaacggaagcaatggccttaaaatggagattttataaggccgcaaataattggatgctagtaattccttcatgtcttgaaaatgcaattgtagtcatgattataagagaccgctgatcacctaatgatttttttactctatatggttctcagccacctatgaaccaagttacaccagctggaggacagcaagctgttccagtaggggcatcttatggtttgtcgcaccaggggcctacctctgccatgacttatggcagtcattatgcgcaattatattcttcatctgggacttcaagcagcaacatacaagaatatgcctttccagagcgaccggggcagcctgaatgtgaacattacatgaagactggaacctgtaaatatggggcagcctgcaaatatcatcatcctcaatacttcagtggaccaaagtctaactgcatactgagccctctgggtctccccctccgtcctggttctcagccatgtgcttactatgcacaccatgggtattgcaagtttgggccgacatgcaagtttgatcacccgatgggtactccaaactatagtatttcaacatcttcacttactgatgtgccaatcgctccatatcctcagagtttccctgttactcctatgccttcatatctgccatcttctgatctgcgtccacaatacactcaagtcaaggattcctctgctaatccaccaccatcgcctggaactacttatggtcctgttgggtctatatcaaaggtttatgctccccacacgcttatccgatccccggcttctgcagctgctggcatgcaagcgtcctaatgagacacggttgagagcattagtcctctctgtcatgaagatagttcttgggcaatcttctcaggtttttctaccattggcggaatgaggtctcgattcttttttgctccagttcgacttcccagcaattgtgaataaaggctgcagctgacatagaaaagtctcaataaatgcaaagataggaattggcaagctcattcacttgccatttttctgtccatctcggaaatgagaggagaaaattctgattgtagtaggatccagagctacgttattatcctgtataagatgcaccgatgcaagggattcgtatctgaaagctgatgggttctgtagctcaaaaccttttgtttatctcaccatcatatatatagagagggcagatcaccctaggtgatgattatccacgctggaatggtttaacaaatcttcaataattgttaaaccattcgtgctttttgttaaaccatctcaggatgggtgatcatcacctaggtgacgaatagccatatatatgaatatgagcagcagctatgacttcacaacatgtatatctacctatatatatgaactgggaacacggcatgttgtagcgagacgctttggaacccttgattgaatcatctgaaaccattcgctggtcatcccctgattttcgggtgttttagttctgctaactttcagattccttgtttatatgaatcggttgggtttaacgtcttgtttgtaaaccgtggaatttattgcctgcctgttttttttacctcggagc

SEQ ID NO: 24199 - DNA, 193 bp, Zea Mays
gcggcttgcaaagagaaattaaacatatgacatgaactgaattaactagtgtgcacgactagtaaaaaaacaaacttcctttgacaataagtttctaattaaatcatggctgcgcctgggcagcgttattgtgagagtgaaagtggacgtgctgctactcccctcattcccaacatgtatcaagtacctgcat

SEQ ID NO: 24200 - DNA, 2123 bp, Zea Mays
aaagcgaacaatccacaattcccagtaccctcacgccggcatccgtcgaagctgctcgacctcgactcaagccttccttgctccttgccgccgtcgagtcgtcgcaggaacgatgacccggcggaacggctgtacgatctacgtgggcaacctccccggcgacatccgcgagagggaagtggatgatctcttctacaaggtgagtggttggttgggttgtgtaccgagcttcccaccctatttttagggcttctcgtcgaatgctagatccgtggggaggttgttgtggtgtcagtcaagcctgcgagtatgatatggggagattagaggagtgttggggatgttagaggagtgttggggatgttttctttatggctatggctcaatattgctgaagtcgaagagatgcctatgatgtaatgtagcgtttgctcatattgatatttgcagtttaataaactcttactgtgagttttataatcgtcgtgtgtgttagacaatgcacttgtttttttcactgtattgtcacaatctattttggtgatgattgaaagttctgttcgttgtgaacttcaccactgctaattgtgttttgccttctaacaccatctaatctaatatggatggagctctggaagggaaggcaatgtggattgcgaatgtatggacgtatagtggaaattgacttgaaaattccaccaaggcctcctggttttgcttttgttgagtttgaggacgcacgtgatgctgaagatgcaatatatggccgtgatggatacaactttgatggccataggttgcgggtggaattagcccatggtggacgaggcacatcttcttttgatcgatctagcagctatagcagtgctggacaacgcggtgcctcaaaacgttctgattaccgtgttatggttactggattaccttcttcagcatcatggcaagatctcaaggaccatatgcggcgagctggtgatgtctgtttcactgatgtgtatcgtgaggctggagcaactattggaatagctgattatactaactatgaagatatgaaacacgcgataaggaagctagatgattctgagttccgtaatgctttttcaaggacatatgtccgggtgagggagtatgatgctaggcgcagccgttctcgctccagaggcagaaaccgctctaagtcaagaagcagaagccacagccactcgtactcaagaagcagaagctgcagttatagcaagagtaggagcccaagatctagatctgcttcagagtcaaaatcacctgttaaggcaagttgcacaactgaaacaagaaagctgtggccctgttggaccatttcaatccatgttggctatatctttgtttgctgaattgtagtttcctcttatatgaaattgcaatttctaaatagatttgagcttttttatatatattctgaatggcagaggcacgggtggatattgcatgtggccgcttaatattttcagaatatatatatttatgggttctacgatatttgggctaaatcatattttcatgcagcattatggactaacatttttgtatacgttttgcagatcaccatccagatcccctcctgtttctccccggcgtgacaagtctgcaagcaggagtcctgccaggagcaagagtctgccccgatcttgttctccggcaaaatcagagtgaatcggattctgcacttgaaacgttcagaaaggcagagctcgagctaaaagattgctgtacggattatgagcactgtgctagtagcattgctgtcccttccatatttttacaaatactctgttctttgaggagatcactgtatgctactactctgtacctgacatgatgcaaacgttgttggtttttgaacttagcagaacgatgactttgatcagctccatccattccttccattttttttttctgaatatttcaaaagattgtagtatgcagctattgttattctctgatgcactcctgtgtcctgtcattgtggaaaaaaaatggaattctaccattcatgtgatgtgtctaaaaaatgcaactctagcttgcgattagatgcagttgtttgcttttgttcaatcaacagatatgaagaataaaaagagtag

SEQ ID NO: 24201 - DNA, 349 bp, Zea Mays
aagagaagtgctgctttggcttaccaagaaaagaggtgtctcatatcggtgattcagcagctagctctcgattttggggcaatcaagaggtgaaattgcgaagaacatgagtaccacaactgccaagggaaaaggagaacctcaaaatgcaaatgatgcaccactcgatgttcagcccttaacaatagcgtatccgggggaaccagtggtctgcacaccaagacccatcgtgtcgcatcctgcatataatggtggatggaaggttctccgccacatcaggccaaatggaagatctgatttcggagtggcgaccgataggccgggtcgtcgagctgggtgcgctactcgc

SEQ ID NO: 24202 - DNA, 1000 bp, Zea Mays
ggtggcctgatattccagcctaaggttatttggtcccttgctgatgtacaggcaacatgtggaacacttggcttatctacagcaactgtgaaactgatagggccagatggagaggagagaatagcatgttcagttggaacaggtccagttgatgcagcttacaaggctgttgaccaaataatccagattccaaccgtcctccgagaatacggcatgacttcagtcacagaaggcattgacgctattgcgacgactcgagtggttgtcaccggagacgtggccaacaactccaaacacgccttgactggccactctttcaaccgctccttcagcgggagcggggcggcaatggacatcgtcgtgtccagcgtcagagcttacctgagtgccctgaacaagatgtgcagcttcgctggcgctgcgagagccagcagcactgaggtgcctgggagcgcaagtgttcaacgcgcagaatgagctcggcggcgttcgcgttcgtgttagttctcgtatgggatgccaggatggactgtgcgttgtaagagcttgtcaagctgttgaggtgacatttcgtttcagtaacaggctgctcgatattatggggtaccccttgtcagtggggtgacgacaatgctgttctttttctgggaggatagtcccttcagcttagaacatgcaggaaattttggccctatgtagtgtacattttgtatctttaaacatactttcaataatgaaataatattagggtccatctagccacatgggtggccatcggcatgaaaatgatcgaaaataaatatttattcggtttgtcttttttttattacggataaataggatatagaatttacaatgaaaatatatattcttatttttaacattaaactcataaagattcataaaagataaaccttaaaattatcatatatcttctcaataaagtttggatatagattcagatataatttcgaatgttttttcttctttttttggttgt

SEQ ID NO: 24203 - DNA, 218 bp, Zea Mays
ggagaagagcaggtggtccaggaggagccgccctataatgaagaatacgagttgatctaggtggcgtctcccagtcagttgtatggcgccaaggatggacgtttaattcgctttattattatcatttatttttgtaagacttccgctatgtaataatgacatttatgatatttgtgacatttatctctatacactttgtaattatatgtgttgttctt

SEQ ID NO: 24204 - DNA, 1252 bp, Zea Mays
gttgcgttccttccacaaattccatatggtccgagcagcggaatataacaatgtaaggagccagcttactgcaatcaacagaaagcaaagtgggagcttagcagttcgtgatctttccaatctggtaaaaccagaggatatggtctgctcagagcatctagtaacacttcttgctattgttccaaagtactcccaaaaagactggttgtcaagctatgaatcactcgacacatttgtggtacccaggtcatctaaacagctctatgaagacaatgagtacgcactctacaccataacactttttgctaaggttgttgacaactttaaggtccgtgctcgcgagaagggtttccaggttcgtgattttgagtatagtcctgaagcacaagaaagtagaaagcaggagatggagaagttactgctagagcaggaagttatgaggacctcgcttctgcaatggtgctatgccagctacagtgaggttttcagttcctggatgcacttctgcgccgtgcgcatatttgtagagagcattcttagatacggtctgccaccatcgttcctgtctgccgttcttgctccgtctacaaagggcgagaagaaagtgaggagcatcttagaggacctttgcggcaatgtccatagtatttattggaaaggcgaagatgacgtggcagttgctggtctgggaggtgaatcagaggtccatccttacgtctcattcaccataaactttgtttgagcattactggtgttacgccgtcaagtaaatcgaaacgatggaatggttctgtacattgctagtgttacggcaattctttgttgatctgtcagcttttatctgatcatgtaatttatatattggatatataagccgatcaataatgtagcttttgaggagactggaagtagatggatcacgatcaccatgtaatttgtaaaatggggctactgttactgtaataaaggcacatgtcaaatatcttcagctgcggtggcctcttgctgagctccctcggcctcctcggtactagtactgggcgcctcaaccaccaccgtcttccttacacggaacatggccaagtggatgtcaccgaagatgagtaggctgccggggtcgacggacgcggggaagcccgggttgagccggcgctcgttgatgtaggtgccgttggtgctgtccaggtccgtcaccagcaggctgccgcccttcttctccagccgggcgtgagcgcctgaaactgcatgacca

SEQ ID NO: 24205 - DNA, 2637 bp, Zea Mays
agaattcaaaaaactcgcagacaaagcattcaagtgattcatgctgactttcaaggatggttttcatggaaagaaatccactcggttgagaagcagatcttgccttctttttttaatggaaaatctgtgaagcggacacctgaggtgtatttggcgattagaaattcaatcatgatgaaatttcatgccaatcctcaattgcagctggagtccaaagatctggctgagttgtcaatcggagagagcgatgctcgacaggaagtcttggaattcttggaccattggggcttgataaatttccaccctttcccaccagctggacatgaagagagtaagccagaggagagccaagacaactctaatgatgagaaagcttctttgatcgagcagctgtttaaatttgaatcagttcaatcatatatgacacctttactgaacaaagaagatgtgggagctccaccccctctgcctagcttgtttcctgaacctgtactcattgaaaatatggttgcagcagctgagccttctgttgagtaccactgcaactcctgttcagttgattgctcacggaagcgctaccattgtcgaacccaggcagattttgacctctgttgtgtttgctataatgaagggaagttcgatccaggcatggccaaaactgatttcatcctcatggattctgcagaagtttcaggtgctagtggtactagttggactgatgaagagacattacttcttttagaaggtttggaaatttttggtggaaaatgggctgagattgctgaacatgttgctactaagacaaaagcacaatgcatgttgcactttcttcaaatgcaaatcgaagaccgcttccatgatggtgacgatattaatcaaaacatcccagtaagtacagagcaagccacaactgagaaagccattgttgaaacacctgagaaaatggaagttggagataaagtggaaggaagagataatgcggatgagaaggcctcggagaaaacagagggaagctgtgaagaaacaaaaactgaagatgcaaatgttgtaaataaagatactcagaaatcaggtggcaaagattcaggtgcatctccaagcactgaagaggcaaagcaatcttctgatgatcaacctatagtaaaggaaaattctgtagatgtagatacttctggtgaaaaactatcaaatgttgctattgatatcctaaaatgtgcatttgaggctgctggtcacagcccagaatatgaaggttcatttgctgatgcaggaaatccagttatagcactagcagcgtatttagctggtcttgtggaagatggtaacgctaccacttcattccgtagttcactaaaatctatatctgaggtgcctcctgcactccaattagcaagtaggcactgttttattcttgaggatccaccaaatgaactcaaagacatttgtgttagtgtaagtaagaaaaatacagatgctgatcaaacaaaagatgaggatatgatttcaaattcaatcgccaatgagaaaaaagagatcaatgagaaagaagataagtctttatctgtggaaaagacaaataattcatccatgtcacaaaatgaccatcaagaatcaaacattaagagtgtctcacgtgatgattgctcctcagtggagccaaaaggcaataatgctaaggagtcaagtgattcaactggtattggggatatgagtgcaatcggcactacaaaaggttcgataagttccatgaaagattcagtttcttgtagataatgcgagtgaatctggttttatttgcttctccagatgttgttgcaggcaattctaaacaagtgaacgactcacctagtgttgaggtggaggctcctgatgactcttctttaaaaagcaaggatgagctcaatgatactgaagatgcagtggcgacaccagctaccgtacaggaacagaaacacagccaaacattggaaaatggtgataaggcagaacctaacaatattgaacgtgtagttgtccatgagaagggctctatagtgactgccaaccaaaatgattccataactaggctcaaacgagcagcagccactgctgtttcagcagctgctgtcaaagctaagtttctcggtgatcaggaggaatatcatattcgaaggctgacagcacttatgattgaaaagctgaagtgaagatgtcgttgttttcagagattgagcaggtggtccttcgaacaagagagtacaccgagaagaccagaaaaaaactcctaatggaacgaaatgcgattattgcagctcgtatgggtgcattgccgtctaggccaaaccagcctggtgtagccggcaacaggttaccacctggatatggcaaccctcctttgaggtctccaaacgcaatgccgcggccttccagctgaggaaaatccggattccggacacccagtggtctatactccattcatttagaagcatacggacctcaaaaacctcaaacctgccagtttgttgtagcattttttagaaagtacattgtacaattgcctgtataactgcttatatgaaaattcaccattttcacttaattttgatgcacttgcttctaccaaacctccgcaactgtttaaaccttccatcaacagca

SEQ ID NO: 24206 - DNA, 1929 bp, Zea Mays
gttcgcgacaccccgtgcagccgtgctcttccgcttgaactagggcgcctccgcctccgcgcccgcgccgccgccggctgtagccatgtccgacgaatacgtggacttgcccgtctcggacgaggatgaagaagagctcgaagatgagatggatgatggtgatggggagagtggtggtggaagctcgaagaaaaaggccaagcagcacgtggagcagctcaagcggctgcagcaaaaggatcctgatttctataaatatttagaagagtttgataaagatttgttgggatttgatgatgatgatgatgaaatcgagaaatcttaccaaaaaatttatgattggcaatacatattctgccttgagctttggaccagtgttgtgtgcggatgtagttctgaggaagaattccgacctctagcttatccgttgacacaaataatacatggtgtggcatgcctcgtacctagcgcacgttacttccctgtgcgctttaggtgtgtcagaatgcttaattgtattgccgaagccactggtaccttcattcccgtgtcctccctgctgcttgatatgcttgaaatgaaagaacttagaggacgtccagatggtgttggcaaagccgtgaatttgttcagtgttaaacaggttgacaagaaaacagtaaagacacgtgcctttcaggaagcttgcatttattctgtggtcgatgagctggctaaacatttgacccaatggagctactccattgccttctttgagatgtcctttattccacttgttcggctccgaagtttttgcaaaaccattaaagcggacagatttaggaaagagatgaaggatcttatctatcagatagaggccaatgtcgagttcattaagtcaaaacgagtggggattgcattttcacccaatgacccagctgtagagtcatttctgcagaccgaaaaggaagaacgttgcagccctctctcaaaatttgttgctactttacaccagagagcgcaagacaggatggatgctctggatgagaccagtgtgattgtgggtgccgagtcctcaaccttctcacggaggttatcagaagcgcagaagcaacaggatgagcaggacgatgatgaaggcactatcgctttcagtaagaactggctgtctgaaaataagaaacccaagtatgttctggcttacctctttttttttcccattacttggcgtggaaaacacaatcatactgttgttcggtgtgcagaaccccaaaggaggataaaaagcgaccccgggaggatgatgatgtcgcgactgaggaggatcgggttgaggatttggtcttgagctcagatgaagaggatggcaacaatgaggaagcagacgatggttttgttccggttgaaggtgatagtgatgaagactttgtagaccctgacagcgaatataagaaacaaaagaaggcgaagctgaagaagaggaacaagcgccagccatttctgcacaaggcgccctctagaacaaaaagtaattcagggcccaagaagaaggccagacattagttatgcctgatagggcttggcaaatatgctgccgttgtgatgtatgcttctgagttccgaccgataaaaacattgtcccttgagtggaaaaattattatattttttcaagaaaaatttcaagtctttttttgaccccaacaggactgagatagaatttccaatctgagttttcatttcagtgctcaagggtttacatgattcaaatgtaaagggtttacattgccatggaaaaaattgtacaccaaacatcacaaatatctacctgttcctggtagtgtttatatacgtctagcatgggcgaatgtccatattattgtctgatttgattcatggatcgtcctttcagttctaaatgaactgccaagggctttccacggtaacttgac

SEQ ID NO: 24207 - DNA, 1705 bp, Zea Mays
gccacatgaaaacttgcattttccagattttgcactttttgggaaatgaaggaccaaggacatcagatccaagcaggtacattcgctacatatacaaccgtgtgatattggaaaatgccactgttcgtgctagtgctgtcagcacgctggcaaagtttggtgccctggttgatacgctcaagcctcagatctttgttctcttgcaacgatgcctgtttgatactgaagatgaggttcgtgatcgtgctacactctatctccaaacccttagcggtgaagttgccattggtaatgatgagaaggatgtgaaagacttcctatttggatcttttgatgtgccattagccaacctggaagcaagcctaagaacttatgaaccttcagaggagccatttgacatatctttggtgtcaagagaagtcaggtcgctaccacctaaagagaaggcagcccctggcaagaggccacctgctggtgctgccgccgccgccgcccctgtttcaactgttgatgcttatcagaaaatgctttcgttcattcccgagttctctgggtttggaaggctcttcaagtcctctgaacccatggagctgacagaggcagaaactgaatatgctgttagtgtggttaaacacatttatgacggctacattgtattgcagtacaattgtgcaaacactatagaagaacaactgctagaagatgtcactgtttgcgttgatgcctcagatgctgaggagttttcagagatttgttcaaagcctcttgcaagcttgccgtataattcacctgggcaagtttttgttgcttttgaaaagccagagcgtgtacctgttgttgggaagtttttaaatttgttgaagtttacagttaaagaggttgacacaactacgggggaagctgatgaggatggtgtggaggatgaataccagttagaggactttgaaattgtttcagctgattatatgctgagggttgttgtctccaacttcaggaacgcctgggaaaatatggacccagatagtgagcgtgtcgatgagtatggactcggggttagagaaagtttggctgaggctgtcaatgctgtcattaatatccttggaatgcagccgtgtgagggcactgaggttgtaccgaaaaatgcaagatcgcacacctgccttctatctggtgtatttattggcaacatgaaggtcctagttaggttgtcatttggactgagcgggcccaacgaagtggcaatgaaattagctgtgagatcagatgaccctgaagtcagtgataagattcatgagattgtcgccagcggataaagtgcaagacatacaaatcttctgccaaaagtgtagagcgggtagatagcctttatacttcgatgcttacagccttgtctcttcgtggacatctcagattatcagttagcatattctataaatttttttgctgtacaaataacatcaggtattatctgatgtttattcaagtactgatttcatggaatattgggaattggaatgtactgtagcctccgtggtttccttttgatttgtgctgaactgtatcccacctttcttgagaggaaaactcgtggaatctatctaccttatttccgatccgttacgataccttattttcgacccgaccttatttttgacccgttacgataccttatttccgtcccgttacgaccggccgaaatagaatg

SEQ ID NO: 24208 - DNA, 2912 bp, Zea Mays
gcgggcgccggcaattggcattttgcatcgccacggcagcgaccagacggtccctcccgcccggccgtccctcgcgctgcacaactgcagtctgagaagccacgcctctcgacagacagggatcgggccgggccgaacaactgcagtctgagaagccacgcctctcgacagacagtcggcgtcggcgtcggcgtcggcgtcgagtgttgcgtgccggcttccaccgcagaggatcctcgcgcggcacccctctcatcatcgtcttcgtcatcagcgacgatccagtattggatccagccggccgttccaccactacacccccccaaaaaaaagtgactcccactgaaactcagtactactagtaatgaacggctcgcctctcgcaatcagcagggcacccgcgcccacacgccagtgacgaagccgccgccgccgccgccgcacgcacgcaccggcggcttctgccttctgctgccgatgccgctcgcccgctcctgcgattgatgcgcgcacttcaacgcgccgtcctgacgcccgggccccaccaccacaccgctttataaagtgaccagctcgcgctgctggccccgtctcttcttactcccttcttccgcggtggtagtaccgcgacggaagcagaggcggcggcagcagtggacgcggaggagccctagccagcctccgggtgccggcgcggcgaggttgtggattcgatggcggtggcgtcgcggctggcggtcgcgcgggtgtcgccggacggcgcgcgccccgcggcggcggcggcggcaggggggagggggaggagcgggctcgcggcggttcggctcccgtcgaccgccggttgggtgaggaggagggggcgcggcggggccgtcgcggccagccctcccacggaggaggccgtgcagatgacggagccgctcaccaaggaggacctcgtcgcctacctcgtctccgggtgcaagcccaaggagaattggagaattgggacggagcacgaaaagttcggtttcgaagtcgacactttacgccctataaaatatgatcagattcgtgacatactgaacggtcttgctgagagatttgattgggacaagataatggaagaaaacaatgttatcggtctcaagcagggaaagcaaagcatctcactagaacctggaggccaatttgaacttagtggcgctcctctcgaaacattacatcaaacttgtgctgaggtcaattcgcatctttatcaggttaaagcagttggagaggaaatgggaataggatttcttgggcttggctttcagccaaaatgggcactgagtgacataccaataatgccaaagggaagatacgaaataatgaggaattacatgcctaaagttggtactcttggccttgatatgatgttccggacatgtactgtgcaggttaatcttgacttcagttcagaacaggatatgataaggaaatttcgcgctggcctcgctttgcagcctattgcaactgcaatatttgccaattctccgttcaaagaaggaaaaccaaatggatttctcagcttaaggagccatatctggacagatactgataataatcgtgcagggatgctcccttttgtctttgacgactcatttgggtttgagcaatatgtggactatgcattagaagtccccatgtattttgtgtaccgaaataaaaagtatattgactgcaccggaatgtcgtttcgggattttatgcaaggaaagcttccacaggctcctggggagttgcccactcttaacgattgggagaaccatctaacaacaatttttcctgaggttaggctaaagaggtaccttgagatgagaggtgctgatggtggcccatggaggagattgtgtgcgttgcctgcattttgggttgggctgctgtacgacgaggaatcgttacaaagcattttagacatgacttttgattggacaaaggaggaaagagagatgctaagacggaaggtaccatcgactggtttgaagacgccgtttcgtgatggatatgtaagagatttagctgaggaagttctaaaactggccaagaatggactggaaagaagagggtacaaggaggttggtttccttagagaggtcgacgaagtagtgagaacaggagtgacgcctgcggagaggctgctgaacctgtacgagaccaagtggcaacgcaacgtcgaccatgttttcgagcatttgttatactgattactgaggatgacgccgccgaacgacgttggactgagcttgtagatgtaccccgtaccctaatacagagtctcgtcttgattcattcaatgcctgagccggaagggctcagtttcaggcacacaggagcagagctttcggttggttgttgacggggggcaaccgctgcacagcccggtgctgtgcctacaaataacttcgcctggaactggaacggatcactcatcactgtgctttgctttgacttgatctgcctgtctctccagggagatggaacaaactactgtttgtaccggcccgttttgttttgcagctatgaaaatcgccgtattgaaaataagtccgtcttctgcacgatggaactgtttgtttttcctttttttttggattgttgggacttgggatgtttgttcggggttaacatggcaaaagtgatctcatcgacgataaataaatgaactgatggtttgatccggaatctgcgatatctgcatgttcctttgtagccggtctttatggtctgctacctctgctacgataccttagggtacatgattttccgtacgcatcgtctcttagctgcatttgttgcatttgtgatttaggaaactcagagttgtatcatgctgttttttattgtttcttgtacttagaaaactgttctactgtcttagggttgtatatgcc

SEQ ID NO: 24209 - DNA, 3140 bp, Zea Mays
ccctgccccgcacgccgtcctccctcccgcctgcgtcgccaggtctcggcgacgcaattattgccgcagcgaagcgacaggtgtggcgtcaatggggtgggtctgaccctgactgcccccatccatccgtcgcctacttgtcgcgtactagctagctccgggtggagtggagctagctagtcatggcagccatcatcatagccgtagagccatagccacacttgtcgctcgtcatcaagagctgccgagatagttgcggcagcaggcagcacagtgccgctccgtccgtccacgggctgtggctgtggtgtgcacacatatgcgccgccgccgctgccgctgccgccgccttgtcgtttgccctgtcgcggctctgctcggctgcgtgggctagtttacagccggagttgtacttcgcgttcgcggcggggggaaggagggggggagtaaagaatcggaggcgcgcgcggattggatgctgtgcgtgcgcgcggaggacgcgctggccgccgctgcagccgcggccgcagcgtccgacaagatgcgctccgtgaccctgggcgggacgatccagagggcggtgcggaggatggctggcggcgccggccggaggagaccccacgccttggcggactcggggaccgccgactcgtcggcgtcagcatcggccagctgctccggggatgatatcagcagcactggtagtgccaagagggaagcggtacaaaggtgcaccatgcatcggtacagatcgcagctagagcaggaagtgtgttttccttggcttatgaactctacaattctgaatttcgtagcatgctgttttcagttgaaaggatcccgctttgtttcgagctgtgatgggctctgttcctcttaaatggaagctggctgatgttggccgtggtgggcatgtggttatacgaaagttgaaaattgaagtcctctgatgaaatccattctctaaaatttgttccctgattatacgaaagttcgtcaaaatcatgttcatttttaactcatgccttcccatgtgcctttagtttcatcattaacagcaccattgtagttcaagcagttttccttgggcgccttttctatgacaggagaatatttttttgcaagttcaaaagaacaaaaaagaagatatttcttgatgtggttgtgtactgactgtgtaatgctctactcttgacatacctgtacaggttaacaaattgcaaaggcaactccaagaagagattgatttgcacatggcgttgacagatgccattacatataatgcggcgctgatacttaaggcatctatgaagcttcctgacaaggcacacgagctattgattagcatatcctctctggaaaccgctatcacaaagcttgaagaggatctacatcacctgcactaccagttatgtgatgcgaggaatgaaaggctacttgcagaaaataagccagaatgcttgctacctacagcgtcagattgccaaccttctacagcttgcgattgtacaagggaagagcctgaacaaacattaagatattcgagattcaaagattatcaccaagtggaggacggtttgtcaactgaacctgaagatcaacaagatgacgaaaaagacgccgaagatggagaacatgtatctctaaatatgctgatgcaagaggcatgctctatggaaaatgaaggcaaagaagatcagaagatagatgcattaacatttagtcagcccaatttcaagaaaagcgacatgagtggaaatttgtggaataatccaaaccagctctctgaagagatgaacgtctatctggttcaacattgactactttgtcagattcatctataatcgcctcagtgctgcggagtccttcgattgactggaacaacggcgatggtattattgatgatgttagaaactttgacccgtacaacgttaaaggcaaggaagcacggagagacgttgggagctattgttcagtagctgaagtgtcttggatgtatattggcaatgaacaacttgaatatgcatccggagctcttaaaaagttcaggtttcttgtggagcaactatcaaaggttgacccttcttgtatgaactgtgatgaacagatagcattttgggttaacttgtacaatgcattaataatgcatgcttatttggcatacggtgtccctgaaaatgacattaagctgttcgcgctaatgcaaaaggcctgttacacgatcggcgggcagcctgtcagtgcagccgaaatagagtttgtgattctgaagatgaagacaccggtgcaccggccacagctctccttgatgctggcccttcacaagtttaaaacgtcagagaacctcaggagatattcaatcgatggcactgagcctcgcgtcctcttcgcgctctgctgtgggatgttctcttctcctgcggtaaggatcttctctgctgaaaacgttcgagctgagcttcaggagtccatgagagactacatccgagcgtcagttggcataaacgacaagggagagctcgtagtccccaagctactgcagagctacgccaagggcatcgtggaggactccctgctcgccgactggatctgccgccatctgacactagaccaagtcgccgcgatccaggacacgtcgtcgtcgtcgtcgcataagcagcggcttcttggagtgcgcagcttcagcgtcatcccgttcgactcgaggttccggtacctgttcttgtccaacaacaccaggtgccagaattgaaacaagagtacaagactgcattgctatgcgcagacagccacaggagtgggtgcttgacaagttgacacttttttcgagagctgaaaatattagcttttgctgtacattctgtaaatttttccgttgactaggattcttctttgtacgtaacattcagctaactttttgtacatcaagcgaacccagaatacaagtgtagattcggtgatggttcagtctcaggttagtggcttgattaccgccaaggaacccaaaattacactgcaaattcacagccagtaaaaaaaatctgcatgttgcacatccaacaaactgagctatcgctgctactgaactttacaaggcgatttttccgtgactaggattcttctttgtacgtaacatccgc

SEQ ID NO: 24210 - DNA, 3099 bp, Zea Mays
ctagcgtgctgcagctatgctacggctactcccctttttctttcccatctccgatttcaaaattcaaaagtccccttcctcactcgccttctctcttctccacgggagcgaggccgaggccgagacctcgaggcggtcgcgtggcgtctcggaacccgggaggaatccacagaaaaatccgcgcgtggggggccgaatctctgctcctggggcgagccggcgagtgttgaatggtgtttggagtgtggtaaactggtaatcctgggaaaagatgaaagaggaaatcatgtttgacaaccaaacaaagccatgcagatcgagggttgactccaaaagcaattcaagttctctgaaacctaagtttggatcatcatggggttcccaaattgtcaaagggtttacaacagacaagaaaaccaagaagacagcagcaaatgcaagcaaaaaaccacctcttccaagtgtcgaaaatgttaatcaggccaaccaacagattccgtatcactctagggtgaaaagatcccttattggggatttcccttgttcacctgctggtgctcaagtccacccccatgtctttgattgccacaatattaggtcccctgcatcccatgatctttttcttgagctggatcatctcagagagcagcttcgtgagtcgaaagaaagggaattgacattacagtcagagttgagacagtgcagagaaaacccaaaagtttcagaacttgagaaggagcttgattctatgagggatgaagttgacaggcttgcacgactgaaaatttcattagaagctgagaaaacaagcatatctgaacagttatcagctctatcttctatggaagaacatcatgaagaaaatgtaagattagatagccacggcaatcggatacttactgtagatggggacaatgcaccttcagaaaacttggagtttgaagttgttgaactacgccggttaaacaaagagctacagtttcagaaacgaaatcttgcaattaaactctcttcagctgaatccaaattggctggccttgagaagaatgaagagagtgatattgttgccaaagttcaagctgaggcatcgttgttgaggcatacaaatgcaaacctcagcaagcaagttgagggattgcaaatgagccgactaacagaggttgaggagcttgcttatctacggtggatcaattcttgtctacgccatgagctttgtaactcagatcaagcagctagagcaacgacggatatagattacaatggtggcatggcttttaatgaggatgataatagcgaaggtgatgcaaaaacttccgaggacagttctgatataaaattcagcattgcagaacgcatcaagcagtggtcccagaatgataagagctgccaagcatcgaaaaaggaatcccttcttgatagggcatggattgaagctgcagaagcacgaagcccgacacgtaggcactcactcggtggaccaaagggatgtgcacaagacttcaacatcattaaaagaaggcaatccgatacctttatcagcctcccggatgcgacagatgagtcatttgcctttaataaggatcctgcaatcagggagaagcgtgatcttcttgtagacaagtatgattttggtcgatctgaaagttcaagatttgttctcagcaagccagaagtatgcaaatcacagtgtctggatgttgaaaagcgtgcgttgcgcatccctaatcctccaccaagaccttctgtttctgtgtcaaattctggtccatcaaatggatcgactgtaaatccaccgcgaccaccgccgccgccgccgcctccaaagttttcctcaaaaagtactggggtcatgaagagggcacctcaggttgcagagctctaccattcacttatgagaagggactccaaaaaggatacttccggtggcggaatctgtgaagcagctaattctgcgaatgtgcggagtagcatgattggtgaaatcgagaaccggtcttcccatttgcaagctatcaaggcagatgttgagactcaaggtgaatttgtgaaatcattaatcaaggaggtgactagtgcagcctacaaagatatcgaagatgtggttgcatttgtgaagtggttagatgatgaacttggcttcctagtggatgagagagcagtgttgaagcattttgattggcctgagagaaaggcggacactctacgagaggcagcttttggctaccaggacctgaagaagctggagtcggaagtttcaaactacaaagatgatccacgcctgccctgtgaaatcgcactgaagaaaatggttgcattatctgaaaagaccgagagaggtgtctacagccttctaaggacaagagatgctatgatgaggcagtgcaaggagttcaatatccctacagactggatgcttgataacaatcttattagcaagataaagtttgcttctgtgaaattagcgaagatgtacatgaaaagggttgcaatggagcttcagtacatgggtcctctgaacaaggatccagctctggagtacatgctgcttcaggctgtgagatttgccttcaggatgcatcagtttgctggaggtttcgatccggagaccatggatgcattcgaggagctgaggaacctcgttcacgtcagaaacagcacccagtagctaggacgcggcaccgcaatgtagtgtttgaagaagaggattagttttcagactctcaggcttaccatctcagtaagcgtagcaggcacgatttttggtcgtgtgatgtttgcatgtgttcctgcgtggtgtgtttcagtgtttgcagtgtgtaagatatgtttgttctgtaccgcgtgtggtgggtgggatgaagtgacccgccggcgctggcttttaacctcactgttgccagaaaatagaaaacgcactgggacatgcacatgcttttgttttgtgcctattgagcacagaagtagcggtggggttttgatttgagggtttgtttaggacgtattcaattgctttggatattgtcggagaccataattaggggtacctccaagacttctaaattcggctggtaaccatcatcagcacaagctgcaaaggcc

SEQ ID NO: 24211 - DNA, 5932 bp, Zea Mays
cttttagcacatatgtgaaggactaaagactaaatcattttagtccatattttagtcctagtgtttggcaaaaaaagaactaaatgagactaaaaactagagattaatctttagtccatgtaaccaaccacccctaactcattcctcaaaccaaactctctattagcgagtccaataatgacaaacaaatgtgaaaaacacgatgttggcagtctcatttttgtaataacctttacctactggccataaccttggccttctccagcctctctcagttgcgaacaacctgatggcgaagaagaaaggctcggccgccgccgccgccgccatggcggatgagacggacgtctcgagtcctcagggctccgcccccggcagcgagggaggtggggagaaggagggcgcctttcttcttggggagccaacctgggaggacgctggcggcgggcggtggcggtgcgcggagacggggcacgagctgccggagcgggagaaggaggcctacgcgcggtcccgcgcttgccgcctcgcgctcattgaccacgccgtcgcgcagaagaagccgccgctcaacgccttcaagccccaccccgagcacaaatcgaagctggtatgcaagattacaggggatacaattaacaagttggaggatcacatatggaagcacatcaacgggaagagatttcttaacaagctagaaagggtagaagaccggatggcttctggtgagatgcctgatggagaacctgtgaagtcaaatgaagtggcaaagaagagcaagtcaagcaagaaggacaagaagaaagctaatgttgccagcacttctttgccaagagaacctaaaccagagatggctgattcagatgatccagatttctgggtgcctcctgttggaagtcgctgggatgacgatgacgggaaagacagatgggagtcattaccaggaaagcccaacttagcaaagaacgaaggtggttctgatgatgatggtggtgatgacaatgatacggctgacaaggatgatgctgaatcaatggaacttgcttcaaggacaaagcgaatgtcaatagaagcagctgggccaaggaagaaaaaacccaagaaggagcagtaagacattcgcaatttgtcaagactcaaatgaagaatttggtctcgttgggaagaagaagcgttatctatttgattattgggtcgtgtttcctcagatttgggtaatcaatgactggatttgtgttagcatgcttatggttaacgcctgtcaactgtgatacatctacatttgcacgtaccttgcatttttttttttggaaaactttgagggccaactatcagttgtcttttgctagggtttaggacgtgctatgattggacaacatagacggagctagagctccaaattccaagataactcattcgaaatattaataagactgtcctgatatattaggtaggaatattttagattgccgatttttatgtacttctgttccaaaacatcggttgcactcgctacagctggagcagtatctgcagacagaaaactgctttctactgtagctaaaacctgatgaagccgcagctgaattaaaaaaaaacagaaataaagagactggaccttagcaaaaaatacaggaaactggtatcaccagtaatcattgcaggagcaagtaccatccttaaaatgatgaaatatattccggtctcgaacaacaatctccctatcgtacaccttcgaaatcaactttgtggccgagtggcagtctgcgcagacccttagattcttcgacaagcgaattgttgcaccagggtccagcttcatgaggccaaacgcaatggccagcttctcgctgtgatgggaaacggatacttccttctcacgctcttcaacctctagcctcacatcagctgtgtttgggacatacccagccaccttgatcctgccaatcatctcctcgactttctggtatatctccctcaactcggggtggtcgctgtcttcggcaaagaactcgaagacaaccccgtccagctcaatgaggctgcagcctggagttttctcgatccctctatccttcatttcctttcgaaccatcgctgcgtccttccactgtcccgccgatgcatatatgtttgacaggagcacgtaatcaccactgtgactggggttcaaggagatgatctgcttcagtgcttcttccccgatcccaacatttctgtgaactgcgcaggaagacagtagcgccctccagataacagcgtttggctcgatgggcatggtcctgataaactggtacgcctcatctaccaaaccggcccgccccaacagatccaccatacatccatagtgctcaacccttggcttaatgccatagtcccgagccatgctatcaaaatgccggcggccctcttcaaccaggcagctgtggctgcaagccatgaggacaccaatgaatgtcacgtctgtgggctcgatcccggcctcgcgcattgacgagaagagttccaacgcttccctgcccctcccattggttgccatgccctttatcaaggctgtccacgtccacgagttcttcacaggcattgactcaaacgcttcaaccgcatcgtcaatgcatccacacttcgcgtagaagtccaccagtgcagtgccgagaatagttgtcagagataggcgcttccttcttacgtaggaatgcacccacttccctgtctcaagtgcacccaggacagcacaggcagagagcacgcttaccatggtcacatcgttcggctcaactcttgcaagctgcatctcactgaaaagaccgagcgcctctcggcattgatctgcctgcgtgtagcctgagatcattgcgctccaagcaaccacatccctggactgcatcccatcgaacagcctccgtgccttaccaatctctccgcacttggcatacatgtccatcagtgcggtcaccaatttcgggttcctcgccagcccctcctcgtccacatgtccagcaacccacttgccaagcttcgcgtcacctatccttccgcatgccgtgaccacactcaccaatgtgacctcatcaaaggccacaccaacctcaagcatgcccttaaacatctccaccacctccatccaatctccgttcttcaagtacgccgcgacgatcgcgttccacatcaccacgccactctcctccgccgcgtcgaacacaagccgtgccgccgcaacgtcgccacagctcgcgtacatatgaatcaagctgctcagaacgaaccgatcggccacgagcccacgcttgacggcgtacgcctggacgccgcgccctacgtccagggcgcacatcctggagcacgacttgagggcacaggcggcggtgtgctgatcagcggggcaggccgaagccgcgtggagcatttcgatgaacaggtgcagggcgtcctccgggtggcccgcgtgaaggaaagctcgcataaggacgttgtagcacggcgtcgaaaggggcgggagtggaaggatttggccgacccggtgagctctccggacttgattagtgccgcgtggagctgtggcaagtagctaggatctgcgcggagtggagcacgtggcggcgccggcccggcgcggcccggtgtggggagagccgccgtggggacggcggtggccattcgagatgccttgcttgggtttaactgcttatcgttggttattattatccaagtggtctctgcctctgcgtgagacactgatatctgggcccacacgatagagatacctgtcctccatttaaattccggatccgcctctagtctccggcgtctccgcacaacaactaatcaccatggcggcctccacctctccactcctcctcgcccttctcctcctacccgcgctcacggcagcggcctcgctcctggcgctgccgctctcgacggcgtcgcggtggattgtaggtgtggatgggcggcgcgtgaagctggcgtgcgcgaactgggcttcgcacctggagcccgcagccgcggagggcctggcgcggcgccccgtgtcggacatcgcagcgcgcgtggcagcgatggggttcaactgcgtcaggctcacctggccgacctacctcgtcaccaacgccacgctagcttcgctgccgctgcggtggtcgctggagcgcctaggcatgctggagtccgtcgccggcgtcagagtcaacaaccccgcgctcctcgacctgcccctcatcgacgtgttccgggaagtggtgtcatcattagccagaaagggtattatggtcatacttgacaaccaaatgaccactccaggatggtgctgcagcagaactgatggcaacggcttcttcggagatgtgtacttcgaccccaatgaatggttgaaaggcctcagtgcaatggcgactatgtttaacaacacgaaatatgttgttggcatgagcttgcggaatgagcttcgaggaccgaaacaaaatgttagtttgtggtacaggtacatgcagctgggtgctgaagctgtacatgctgcaaaccctaatgtcctggttattttgtcgggcctggattttgacaacactctcagcttcttgttcaaagaaaaagttaggctatcattttctggaaagttagtttatgagcaacattggtatggcttctcagatggtggcaattgggaaactcagaaccagaacgatgtttgtgggatggttgttgatttcatatgggctaaaggattattcctacttcaacatggctggccgttgtttttctctgagtttggatttgatatgtcaggcacacatattggtgacaatcgctatcttacctgcttcttaagtgtggcagccgaaatggatctggactgggcaatttgggctctgcaagggagttactatatcagagagggtattttagcttatgatgaatcatacggattgctgacatgggactggtgtacagctagaaatcctagcttcattaaaaggatcaattctctgcaatcagcattccaaggtcctggtcttccaaacactcaacagccatactacataatattccatccccaaagtgggctctgcgtcttggccaggtcttccaagttacttgagttgggtccatgcgacgaatcaaacgcctggaactacacctcagcgtacgagctggtagtgaaaagcacagggcaatgccttcaggcgcagtcggtaggcaagaatgcgaagctcggcaccgattgcagcaaaccaagttcgaagtggcacctgatatcggattcaaagatgcatgtctcggctgagctcgcgaaaaatggaaccagggtgtgcttggaagccagtcctgacggtgccatcagaacaaatcagtgcaagtgcctaagcgtcgatccgacctgtgaccctgagagtcagtggttcaaagtgatcttaagcagcagagacatacctggaggcgactccatcttgcagttgccgtcacttggcccctggcctccgacatcccttagttcttgagagtctgaaagctgctcatttccatgtggtgtgaccaaagaggaatacgagcgagaattacgtgaaaaatctgcagggttgctgtaggcagctgggtactgtagcgttgcatttggtttttaatgtacagtatgaataatctattgtgctttggaaggaagtaagctgcttcttacttggtgttggcgtctgtggccgtcaaggctgagtatgtagctctgtaatttggtttgtatatctagaagagaaattgttcgaaaagctgctgtttttggcagcaccaagattgtatatccaccattttcatgtatgttgcgtgtatgagatctttgagagttgaaggaaactgagatatccaccatttgcatgtacgcaagacgaatttggatgcctattctgttcttgttaataaagtgttacctagttcctcttag

SEQ ID NO: 24212 - DNA, 2253 bp, Zea Mays
gtttgtcagtgctaagagacttgttgctggagattctgtgctattcatatggaatgagaaaaaccagcttctgcttggaatcagacgcgccagccgtccacagactgtgatgccctcttctgttctttcgagtgacagcatgcacattgggctccttgcagcagcagctcatgctgctgcaacaaacagccgtttcacaattttctttaatcctagggcaagtccatcagaatttgttatacccctttcgaaatacatcaaggcagtttttcacacgcggatatcagttgggatgcgattcaggatgttgtttgagacagaggaatctagtgtccgcaggtacatggggacaataactgaagtgagtgatgctgacccagtgcgttggcctagttcctattggagatcagtgaaggttggctgggatgaatcaacagcaggagaaaggccacctagagtttctctgtgggaaattgagccactgacaacctttcctatgtatccatccctcttcccactgcgagttaagcatccatggtattcaggagttgctgctcttcatggttcctggggacaacagagactccatccatccttacttagcaatgaccatgatcagtatcaagcagtggttgctgccgcagctgcttcccagtcggatggttatctgaagcagcaattcctacaccttcaacaacctatgcagtccccacaggaacagtgcaatctcaatccgctgttgcagcagcaaatactacagcaagggagccaacagcagatggttagtcctgatgctcaaaatatccagtccgtgctcaacccaaatgctattcagcagcagctccaacaattccagcagatgcagcatgctcataatgaccagaagcagaagattcaaccagatcagccgtaccaagttcctagcagtgcggttctctcgagtccaacatcattaccaagccatttgcgggaaaaatttggcttttctgatcctaatgtcaactcttccagcttcatcagctctagcagcaacgagaatatgctggaatcaaacttccttcagggaagctcaaaatctgtggatttgtctagattcaaccaacctgtagttagcgagcagcagcagcaacaggcatggaagcaaaagtttatttgctcacaatcgatgtcttttgggggctcggtttcacttaactcacccactaccaaagatggtcctgttgacaacaaaattggtcgtgatgtgcagaaccagaccctttttagccctcaagttgactcttcctccctactgtacaatatggtacctaatttgacctcaaatgttgcggataataatatatcaacgattccctctggatcaacatatctgcaaagtccaatgtatggttgtctggatgactcttctggtttattgcaaaatacaggagagaatgatccgacaactagaacattcgttaaggtttacaagtcaggatcggtggggagatccttggacatcacccggttctctaattatgctgaacttcgagaggaactgggtcagatgttcggcattaagggtcagttggatgaccctgatagatcaggctggcagcttgtatttgtcgacagggagaacgatgtgcttctccttggagacgacccgtgggatgtatggtacatcaaaatactttcacctgaggatgtgcataagatgggaaagccaggaaacgatccacgctacctatcttaaattgatacccagagctctttcgggctcccgtgacgattctgtggcacactgtagcactgtccatggcggtccggtgtgctgtgctcccatgttcgctggtgtcacctctagcatgtacaccgtgcgcgtcttcagaactcccccgttacttgtatccggtgcaggccaccgctctggactgatatcttgtaggttccacttaggaatcagtatcagcgactctatcctagttggtttgtagctcgcacggcactcgttcttgtgtcgcatcgaaatcttcaggctaaatgcttagttgaaactgttcccgtgattcttaagctatctatgtatttgaggattccccggcatgctttcgacgatgaactgcaataatctgaatgcaggaggattgtttgaatgctatcttgtgtctgccgggtgctgggtgcaaggttgattttgacgcatctagctttagcttatgacgtttcaggtgttctctgtctgaaactatttttatgcatggtgagttgatg

SEQ ID NO: 24213 - DNA, 1059 bp, Zea Mays
gtcaaataccagagaaggtagggtttcaggcgcaaaatgaacctagacacaatctacacctcccctaggagaccgggttgattactggattctacagggctcttttacaaaatcaaacggcgaaggggtatcgacatatcagggccgttggatcaattctggatggctccgattagatctaaccctcgccagaaccggtatgcactaatagtcgctggattaagatcagacgacccagacattttgaaccccgatccaccactcgctacgagatcagtggttcacaccacccggatccaatcccctgatcatccccattgattaaccgatcaacggttcacggtgcatcctccccagagctaatcctagccaactggcgaaaatctaacggtcagtacgccgcctaaccaatactcaacggcaatggccggagctgcacatgactccggcacggtggcgccatgtccgaacacccaggcacacgcccacgctgccggcacttcgattcgacaggagctacacccaacgggtttggggcgagtccacgggcgtggttctactagagattaggttccaaacccggcggtcatacctaatctgcggtagccctatcaccagtgttcaggcgatccgaagaccgagcactatactcgcgatttcttcgtaaaattgtggagaggatggctaggcgaaccgattaggtaactacttacccggggtggtgtcgagacgagccacagccacggggcggtgtggcccgcggcggatgtgattctccggtgagcaattggtgaagttccagggctcccccaggcttgccgatgcctcgactaggttgcccaccatcaagagcaacccctcgatctaccgcggccaccagaatattagcgcagacgcggaacaacagcggtgtcgtcgagtttccctacctacgcacctcacgccaatggcgtttcgaccctggcagctttatcggagggctcggaacaagagcacggcgaggcttggtctttatacccccaagaccgattcctaacagccacgactagattcgcgtgg

SEQ ID NO: 24214 - DNA, 1171 bp, Zea Mays
tgcaatattgtcgccacagccccaacacgccaacagccagctgctcaggctgctcagcaccacactcccgcggtgccgccgtccggcgttatcccgaatccaaacccctccctcacaggctccctctcagcgatagcggcatccgagccctcctgcgcgcccactagggtttatctcaagcgaggccgcgccaaccgccaatggcgctcgcgcgcccgtcctccgctctcctctcatgctcctcgtccgcctgcctccgccggctcaacccgctcctcctctctgccgccgcctgccgccgcccggcgtgggccccgcgccgcgtcgcccgcaggttctccgcagcgattgcctccgagacggatgtgttcaactccccggaggtcgctaagtcgttcgacttcaccaacgaggagaaaatttacaaatggtgggaatctcaaggattctttaagcctaactttgaccgtggaggagatccatttgtcatcccgatgccaccaccaaatgttaccggatcactgcatatgggccatgctatgtttgtcacacttgagtgactcaggatataatggttagatatttccgaatgaaagggagacctgcgctgtggatacctggcactgaccatgctgggattgcgactcagttggttgtggaaaagatgctggccgctgaaggtgtcaagaggacagatatgacgcgagaggagttcaccaaaaaagtttgggagtggaaagagaaatatgggggtactatcactaatcagattaagcgattgggtgcatcttgtgattggagtcgtgagcgtttcactcttgatgaacaattgagccgtgcagttgctgaagcattcgttaggcttcatgataaagggcttatatatcaaggatcttatttggtcaactggtctcctaacctgcaaactgcagtatctgatttagaagtagaatactctgaagaacctggaaatttgtacttcatcaagtaccgtgttgctggcggaaccagggatgattttatgactatcgcaaccacaagacctgaaacaatatttggtgatgttgcaattgctgttaatccggaggataagcgttatgcacaatatgttggcaaattggctattgtaccgttgacatgtgggagacatgtccctattattgctgatcgg

SEQ ID NO: 24215 - DNA, 471 bp, Zea Mays
gcgtcaagtagcaactacaaattaatagaactaatttatagcttggccgccctttgttgctgctgcctattggaagcctgcttctgagatctaagctgcgcacaacttgttctacaaacaccacttcaatttgcacggttgatataactggggattggcttgttagcgaagaaccgaagataccatgggttcttatgcaaatcacagttctcctagttctttctatcgttctgattgtccgttgcgatgtttggtgtacctagtagtatcttaattatataccttacactgtttacctttccaatggaattcttggtctagctaacattgtgagattatgtcacttttctcgttctctgtagtcattgcattttgctcctggtgttgtcttctttgtgggatgtccaatcttttgtggcctatacaagagcttgtttggttgatgccaaagctacctacacctaatcttag

SEQ ID NO: 24216 - DNA, 853 bp, Zea Mays
gctgcgccgtcgaccttcaaaaaagaaagaagagttaatatatgctgctaaacataaaattgagtcagcaggcggccctttgaacatgcaactcaaccaagtccctaagatgcttttcatcctccggaaaaactgggctcctgctgcattttgtgtatccttcaagctcgaaacagatcctaacattctcctacagaaggcagagatggctttgaagaagtacggtatgaacgtcgtggtggcaaatgaactcgcaaactacaaagatgtagtggtgatggtcacaagcaacggggggaggacgaccgtgagcaggacgagcaaggcggaagaccttgaagtgcagctaaccgacctcctggtgaagatgcactcggagcacattgcacagcccaattcgtaggaccatcgagcgagcgagatggttaaatcaggggagtatgggcgattctacttctactcgcctagcaaattgtgatatacagagttcaccgggtttgtcataaagatgctcatcaatgtgctgcagcagattaattcaaaaaaaaaatatagctgaatagctcacaccagtacatgcaagtttttgaaaataacctaggtaaagcaggtgatgtgatgccactgttcatgtggaatgtattgagtctatttgagttgcttcttagcgatgaatctggtaaaacgagtcaatgtatcttacgagattcggtttaggcgtagtctgggttgcaatcagtgttacttctgactacacaaactagatagatagtctattgaagtgagatgctacatataaaatgtaatctttattaaaaaataaatagattttagctaattgacagtaaaataa

SEQ ID NO: 24217 - DNA, 1653 bp, Zea Mays
ccggcagccactttcccgcgcagcaggagaagagagacgacacagcagcttttttggtttccccttccctttccccgcgcggtgatcgctgggttctccgcgagcgaggcagagcactgcgcgtcctccgtgaccgcctggtgatcgctgggggttctggacgttggcgtttcatttggttggttggtggttggcagcagccgtggcgagatggacctgatgctgccggtgacggtgaaggaggagtggccgccggaagaggaggaggaggaggacgtggacgcggacgcggacgctccgcggccgatggaggggctgcacgaggtcgggccaccgccgttcctgaccaagacgttcgacctggtggccgacccggccaccgacgaggtcatctcctggggccgcgccggcaacagtttcgtggtctgggatccccacgtgttcgccgccgtgctgctccccaggttctttaagcacaacaacttctccagctttgtccgccagctgaacacctatctagatggaccaggacaagggatgaacgaagctactacagcctacgagaaagaaacaaactgcttgtttgtcctaaagataaagaagactcactcctttgatcaccactcaccaccaagcaatatactgctagtgtataccactgcccgtgcctgtaaattcggtcgcaaaacttatgtgaaacctaaagttttacataaatttgccatcttgtcttgttaattggctcagcgtcggcatttgtcgattcttagtgtgtgatggcttctggaaatgcagcttactgaacgctgcgcgagcggctgcggcacgcggagcacaagcaggtgcagatgatggggttcctggcgcgggcggtgcagagcccagacttgttccagctgctggcacagcagcaagcccggcggagggagctggagggcgcggcgctgctctccgccgcctcccggaagcggaggcggcccatcggcgccgcgccggccaacggcggcttgcagcagcaggaggaggagcagcagcagggcgacgacgacgaccccaccgccacgcgggcgctgttcgcggagctggacgagcgagggaccacgtcggagctggagaacctggcgctcaacatccaggggctcggcaagcgcaggcaggacgggagcgagaagcagggtggccgcgcgcggagccagcagcagggcgggttcgagacggcggagctcaccgacgacttttgggaggagctgctgaacgaagggatgaagggcggtgcggaggctgagacgctgccgccggagaggagacgaccggcttggtacgtcgacgcgctggcgcagaagttgagctccatgagcaataacaccacggcgaagtagagatgatcgcgttaattaatcctatacgactagtaacagtagcttaattatccctccgacaggggtcagtgaatactcttagcgatagctccattgttgtagattatagtatataggagtgggatcgtggtggttacactatgtcattttgtgcagagtgcagacgtgtagtgtatatagtattcttggtacctaccctgtgttgtacccagcgcaagtatattccacagtcgccgggccgtgtcattattgatgttctttctactttaccatc

SEQ ID NO: 24218 - DNA, 521 bp, Zea Mays
tgatgtttcatataaggaagaaactttcggagctggtcaatgatgcatacaaggatgcgcatcaacggagcgtccaggccatgaaagagaggatgtctgacttggcacagagcttaggaatgcctgcgggccttggtgatggtctcaagtgatgctgcctgccattcgggaagcctttctaataatttttttccctcaattttgaatacgagccgtgtgggcacctctcgtagtcacgtagtaagaagtgtactcgtgaccagctgtttcgttcagcgttagctgtgattttgttttgtacaagcagatatatttgcactaaatcgtggtaacgtcgtcctatggaactcggatatcacatgtggtatgctaatctgcaagatataggggatatgcaccgaaaccaatttaaatcgtgtgataaatgatgtacattgtgtgtgtaacaaattaatgaattatgtttttttatacacccttttttttaacgtgaacgtaagggaccagattgtaaaatataa

SEQ ID NO: 24219 - DNA, 1994 bp, Zea Mays
gctatcccccaccgcccaccggccgccccctctgctgctgccagcaagacgagccttcgaaccttccagttccatccatcgccgccctcctcctgaggagcatccgaaacaagagcagcggcagccgccaacgcccgcgcccgccatcccgacgatgcgccgacccacactctcgctcgcgctcgggctcgggctcgggctctccctcgtcgccctcttcgcggcccggggcgcccacgcctcaatccacgagtacggcggcggcgacttcgcgccgcgggccaactccttcttcttccacggtgggagcgaggggctctacgcgtctgaccactcgtccaactcctccgcatccttcatcagatttgacaccgttgtatttcgtcgcaccctggagtcagcatctaggcatgaggagatgcaacaaaagacaggattggtggaggctataattgttgagatacaggatagaggcaaaattggaggttcatatctgcactctgatgcaatatgttgcacacctgagcttgataaggagaaatcttgtagagtaggtgaggtgatcatacgtccaaatcctgagaaccccgactggcctaagaggatccagacattctttgatggtaaaaatgaagaaaccactatggtaactcaaattgtgtcgataaacaaaactgggatgtattacctctattttatgttctgtgatcctcaacttaagggattgaagattacaggaagaactgtttggagaaatccacagggttaccttcctggtaaaatggctccaatgatgacattttatggtttcatgtcacttgcatatcttgtacttggacttctatggttcattcagtttgtgcgatgctggaaggacattttgcagctgcattaccatataacagctgttattgctcttggcatgtgtgaaatggctttttggtattttgagtatgctaactttaattcaactggaacaagacctatgggcattaccttgtgggcagttacatttacagctgtgaagaagactgtttctcggcttcttctattagtagtttcaatgggctatggtgttgttctacccacattgggtggcataacatcaagagttgctgctcttggtttcatctattttgttgcttcagaagctcttgaacttgttgaaaatctgggaaatatcaatgacttctctggaaagacaaggctattcctagtgttgcctgtcgctgtacttgatgctacctttatcatctggatattttcatccctctctagaactttggagaagctgcagctgcggagaagcatggcaaaacttgaattatatagaaagtttacaaattctctggctgtgtcagtgcttatctcaatcgcttggattggctacgagctatatttcaatgcaactgacccgttgagtgaactttggcaacgggcttggatcatcccctccttttggaatgtcctttcctatgccctcctcggcatcatatgcatcctttggtctccatctcgcaatccaacagggtttgcatattcagaggatgcaggtgagggagctgatgaggaagggctctctctagtaggcagtgcggtgaaaggaaccggagatatggtaaacatgcatatctttccggaggataagcgtgcatgataagttttggcctgaatgcagctgtactcctggcagaatgctatgtacctttttcctctggattcacgacttagctgacatcttctaaagattgcgtaagattccagatgtacaggtggtgacttgtgttgaacgatttgaccaagagatgtttacttcagttgtggctacccaatacaaaaaggtcggcaaaataaactatcactgagagcataagagggtttgtctttgtaatccttgtgatggtgacgtagctcgtaggtgattgaaatgtatcattcccagagctgagatgtactcactccgttccaaattaaaattcgtttttctttttatt

SEQ ID NO: 24220 - DNA, 1850 bp, Zea Mays
gggctgtgctcggcggttcaacatttggtcctgcactcctgcaggtgcagccagttccaaagatggctcgtcgtggattgatggaacaggacttaagcaaactggatgtgacgaagcttcaccccctgtcacctgaagttatctcacgccaagcaacaatcaatatgggtaccattggccatgtggctcatggaaagtccactgttgttaaagctatatctggtgttcagactgttcggttcaagaatgagctggaacgtaacattactataaagctgggttacgctaatgcaaaaatctacaaatgtgaggatgacagatgtccgcgaccaatgtgctacaaggcctatggaagcggaaaagaagatagccctctatgtgatgtgcctggatttgaaaacactagaatgaaactcctgagacatgtttcttttgttgattgcccgggacacgacattctcatggctacaatgcttaatggagctgctatcatggatggagctcttcttttgatcgcagcaaatgaaagttgtccacagccccagacatcagagcatcttgctgctgttgaaatcatgcgtcttcaacatatcatcattctgcagaacaagatcgatcttatccaggaaagcgcagcgatgaatcagcatgaagcaatccaaaaattcatccagggaacaatagctgaaggtgcacctgtggtgcctatatccgcccagctgaaatacaacattgatgttatctgtgaataccttgtgaagaaaatccccatccctgaaaggaactttacctcacctcccaacatgattgttattcgctcctttgatgttaacaagcctggttcagaggtcgatgaaatcaggggtggtgtagctggtggtagtattctcaggggagtcctgagggtgaaccagaagattgaagttcgccctggcattgtcatgaaagatgagactggaaacatcaagtgcaccccaatctactcaaggattgtctcactgtacgctgagcagaatgaactccaatttgctgtcccaggagggcttattggtgtgggaacaaccatggacccaactctaacacgtgctgacagactggttggccaggttcttggtgaagtaggttcactacctgatgtttacgtagagcttgagatcaatttcttcctactccggaggctgttgggtgtgaggacgaaaggtacagagaaggcagggaaggtgtcgaagctcaccaagggtgagatcctcatgcttaacatagggtccatgtccacaggcgcccgtgtgctcgctgttaagaacgatcttgccaagctacagctcaccgcgcctgtctgcacgagccgaggagagaaggttgctctgagccgtcgcgttgagaagcattggcgcctcatcggatggggccagatccaggcaggtacaacacttgaagtaccagcgtgcccggtgtaaagcgtcatactcagacgtgagctgaagttgtgtgcaaaagagaaaaaaaaatgagtttgttgttagtcctgtccctgcgttactgcagatccaaagtcctgggtcactctaattttattttgtttcgttcaattttggaggccgtttgcattatgattcctgtgaacattaccaggtcggaaaccagtattgtgaacattatgagtacggcatatggatcagcatttgccaatttcttctttcgcaccaaaatttagacttgccttcatatggtttgtgcctcaagaagtggctgtatgcctgtatatataagactgtctgcaactctctaaatttccctcctatagcgcactatacagccaccttattcaggttctattctctatttttttc

SEQ ID NO: 24221 - DNA, 1657 bp, Zea Mays
aaaagggtaccgccctcctctccacctataaaaatgcggccaccgcccaccgccctccgcctcccacctccacctgacctcccgtcccgcattcgggacgaagccaccaacgacgagctcagcagcgccgacgccgcaacgacaaccagagcaccccgcactgtggagaattcatgtaaattatattaaaaggtagcaatgtggcgccgctgttgctgcaattgccaagtggatgaatccgaccagcatgaaaatgggcatgtcaaggccacaatcaacaacattgatggggcaataatggggttgaaagattctactactggaaaagtcgagccgcaggatgctgctccccaaattgatatccctgttctatccttggatgaactgatagaaaaaactgatgactttggttcaacggctttgataggtgaaggttcttatgggagagtgtactatgcgattcttgataatggaacaaaaatggcagtaaagaaacttgattctactgaaaatgaacccactgctgaattcttgacccaggtttcattggtttcaagattgaaacatgaaaactttgttgacatgttggggtactgtatggagcgtaatcttcgcatagtagcctatgaattcgccaccatgggttctctgcatgatgtactacatggaagaaaaggagttcaaggtgctcaacctggcctggcgcttgattggatgcagcgagtgcaaattgctgttgatgcggcaaaaggacttgaatatcttcatgagaaagttcagccttccattgtccatagggatattagatcaagtaatatcctcttgtttgaagatttcaaggcaaagatagcagactttaatctctcaaatcaggctccagatatggctgcccggttgcattcaactcgtgtcttgggaacctttggatatcatgctccagagtatgcaatgaccggtcaactaacccagaaaagtgatgtatatagcttcggagtagttcttttggagcttttgacaggtagaaagccagtagaccatacaatgcctagagggcagcagagcctagtaacttgggctaccccaaggttaactgaagacaaggtgaagcagtgtgtagatccacggttgatgggggaatatccggcgaaaggactcgctaagcttgctgctgtagcagctttgtgtgtgcaatatgaagctgaattcgcccaaatatgagcattgtggttaaggctctgtctccactactcgtaacaaagcagactccatcacctgttgttgacagttgacgtacaaaattaacctaagttgcaaatatgagcggcaacagttgggacactacggacatttgatcggttcacctcagtcacagatttcaaacactaactgcatggagatggagggcatctttagtactgcattaacaactttgcatctgcggttctacagcatgtgcaaggcaacaatattccttttcatctctcagtaaatgccagtatcaaggagactactgaaatattcagtgatcaacattgagacttttttttttttgcaaagatgcggaatggtaaaagacccttcttttggtgtcacaaacagcaatgggatctcccagtatacatgttcgactcagaaaccgtaacggtaaaaaaattcc

SEQ ID NO: 24222 - DNA, 3340 bp, Zea Mays
ctgctaggtttggcctcagatgatgaccaggatgaattgtcgacagatcctgatgaactgtgatcgaagaaagtgaagatatgagtggcgatgaggaggatatgttccggaacctcctcttgagagctggtttttgtcttacatacaaagataactatactcaaccacaagttatctaagagagaaaattataacagatgctactgcgatagctggattccttactgatctgcgtgtttatctggataacccagcaaaggttaagcgtatgcttcttccaaccaaagtatccaccaagagtggtggaaccaaagatacttcaaagtgtgattcaagctcaagctccacaagcctcattactttgttgatggggattagtgccttgaagcaggctattatagatttgcttctagatataatggttgaatgttgccaaccttcagaagaaagtggttcctcagcaagcactaaagcttttcccgattcaaatggggctagctctccaccagagcttagtgttgaaggtgatctaacagaatatgcatgcagtgatgtgtatgcgagagttgaatctaatagtgatgatattcgggatagtcctgtaatttgtaatgcaggtttggctgcaactgagattgctgtaaataatatagaacattcctgttttcctccagaaacatctgctgctgatttgccagcagatgaaggctccgagcaggcttcctggtcaaaatgtccagagcaatcagaggaattgttagggttgattgttaattcattgagggcattggacagcactgtcccgcatgggtgctgtgaaccaagaaggcggccgcaggctgtccggaagattgcacttgtcctagagaaagctccaaaacagctccagcaagatttgatttcccttgtaccgaagttggtggatggttcggaacactctcttgcagcttgtgccctgttggatcatcttcaaaggccagatgcagagccttcattgagattgccagttagagctgttagatggagattgaaagatttgggaactgaagttccacattgtgtgcttgactttttatctaaaacaattcaaacccagctagatgtagctgaagctatattgaaggatattgattctgattgtgagcctgaaaacaattgcctagcatcaacatcaccttctagtacttgttctacagatgggctttcagctgaagggatgtattcttggcaagagcaagctgtgcatggaagaagtcatctatcagatgtttttgcactgatagaaatgttatcaatgcctggattatttgttgaagtcgcacaggttattgagagggctttattgcgagggtcctttggtctacaattagtagccatggtgctggaaagaagacattcttacaggtcaagttcaaagtctgggtctgttgtgaatgattcacagaacaaagaagttctgttagatgggcagtttgaacctttatctgtccaagaaaatgatttcacttcagtccttgcacttggtgaggtattatctctatctacagaaacgaaggttcaagattttgtgcggatgctttatgctatcatatttaagatctatgctgaggatcatcataggtatagaatccttaagggccttgttgaacgagcaacaaatacatcagataactgccgagcagttgacatcgatatggatgtcttggtatttcttgttaaggaggagtatgggatcgcgagacctgttttgaacatgatgtgtgaggttgctgaagttgctcaggctgaccgtgcaaatctttggcaccaaatatgtgctactgaagatgaaaatattcgtcttcgagaggacatggaaatggagcaaacaaatttcaccaatgaaaagattgcactaaaccaacggctaactgagttggaggcaactattggcagtctaaggtctgagctaaaagctgagagggatcgttttactcgtgagaagaaggcattatctgatcagatgcgagagattgagaatcagttggaatgggtgcgatcagagaaagatgatcagattgcaaagctctcctctgaaaagaggaatcttcatgatcggcttaatgacgcagagtcacaactcgccttggtgaaagcacggaaacgtgaagaattaaagaaagtgacaaaggagaaaaatacattagcagaacagctgaagaatgctgaagcttcaaggaaaaggtttgatgatgaattaaaacgttatgcagctgaaacacagactcgtgaagaaattcgaaaatcacttgagaatgaagtgagaaggctgacacagacagtggggcaaacagagggagaaaaaagggaaaaagaagagcaaattactcgttgtgaagcatacattgatgggatggaatccaaactgcaagtttgccagcaatacatccggacacttgaaacgtccctccaagaagaggtggcccggcatgctccactatacggtgtcggcgtcgaatcattgtcgtttaatgagctggaggcactcgcaaacatccacgagcagagtttaaggcagatcaaagctatccagcaaaggaaaggtagcagccatctcttgggtggcaccgccctttctcacatccctgccctattctccccgccgcctccttcagcggcagttggctctccggcctcacggatccccgcatccccaatggcaccaaacggtgcagggatgcacgggaacgggcaccacatgaacagcacgactggcggccgctggttcaacccgagctgagtgataaggtgcaaagattttgtgattcaacgggccacatttgcataggcgtattttgcagccgctgagcaagcccaacgtcaaccccattttgttcctggccttccgtcaggctttcttcttgtacttaggctctcctcaccataagatctaagtggatgtgcagaacacttctggcaatataggcatagtggagttcggaatatagatggcgggggtaggtcttctggtgaggtcggccttacttggtagtgccgtcgtcgtcttgatatcgcatgggcgtggagagcttggtatgaaataatgcatgtaataatcaagtgaaccgatggaaataccaggtacaagtggagggctatgggaatggttgtgcttgttcactttctaaaggcattcaggttcatttgttttagaggagtgttgcggatggtaaagacgaccgagttcgaagcttttattttctttagagttgcatacatagtagtccttgcacatgtcaggggtgtcacttcggtataaacttcgaaagcagaacgtgtttgcatcgcatgcctctaagct

SEQ ID NO: 24223 - DNA, 432 bp, Zea Mays
gagaagaacaggtggttcaagaggagccacacaacgaggagtttgattcgatctaggtggcgtctccgagttgactttctggcgccaaggatggattttagttcaacctgtatttatattttattttgtaagacttccgctatgtaataagtactctaactattgtggtgtgacatctggcagtcttggcttgcttcctaatgctacaccctaatctccaaaagtccaaataacacacaagagatgtggaaaagtttttgggacattgatagttccctttgctcagaataggatccgaatgtcgcctagaggggggtgaataaacgaataaaaattaacacaaaaaattagtgcagagccaccattgccctattggccgcgatagggtaagaacacaacataacggtaaagggcctccaatgagtaccagcg

SEQ ID NO: 24224 - DNA, 1964 bp, Zea Mays
ctcaccatgaggcccttctgtgatcaagaggaggaaaccatggagcacttattagtgggctgtgtttttacaaggttatgcaaaggaggtgaactgctggacaggattttggctagaggtggaaaatattccgaggaagatgctaaggttgttattcaccaaattctaagtgttgcttcattttgccatcttcagggtgttgttcaccgggatctgaaaccagagaattttcttttcatgtcaaaggatgagaattctgccttgaaagtcatagactttggtttatctgactttgttaaaccagacggcagacttaatgacattgttggaagtgcatattatgttgctcctgaagttctccatcgatcttatggcactgaggcagatatgtggagcattggagtaattgcatatattttgctttgtggaagccgccctttctgggcaagaaccgagtcaggaatttttagagctgtcctaaaagcagatcctagttttgatgaaatcccatggcctaccctttctgctgaagcgaaagacttcgtaaggaggctgctcaataaggattaccgcaagcggatgactgctgcacaagccctctgtcatccatggatccgtggtacacaggaagttaagatttatctagacatgataatctacaggcttatgagggcttacataagttcatcttctctacggaagtctgctttgagggctcttgcaaaggcactgacgacagatcaactcttctacctaagagagcagtttacattgttagatccaaacaagagtggccatatatccttgcaaaatatgaaggcggccttgatgaaaaattcctcgggtgcaatgaacgattctagggttcttgactttgttaactcaatatgcaatatccaatatggaaatattgattttgaagagttttctgctgcggccattagtgtatatcaaatggaaggcctggagacctggcaacaacatgctcaacaagcatatgaattgtttgacagggagggcaaccgaccgattgtgatcgaagaacttgcatcggagctcggacttggcccttcggttccacttcatgttgttctccaagactggatcagacattcagacggaaacctcagtttcctcggcttcataaaactattgcatggagtttcttcacgcacaatccctaaagtccaagataaccgtttgcattgaccaatccctaatctcagggccagtgcatgccatgtctggctgtagaagttgcatgagaccatcagaccagtacaaagattaacagatcaggttagggtaagaggtaaaattctctcagtagttgtatatttgctccgcccttgtcctcaagatgttaagaggaatgtacagatttggtttgggaagaatggaaaggctaaaggatttggggctgttttttttttgcttgtttgttccagtaacacaggtattgcatttcttcttcttaatataatgatgtgtagctctcctgcatattcgataaaaaatgcaggcattgccttcgtttgtgctgtgcacctgtgtcgcttgatgacatgctattgttgtttttatttataatttcataacgggagttgatgtacagctttgtaactttggaatccttaccacaagaaggattatgcgacctctaccgtataatgacgaggctatgggaggtgatttgaggaaaaggccagaagctgggacatcttaggaaacagattccatgagaagaaatccaaatatatggtgaaatgcagatttgctaaagtcgccgagcttttgtatgcgttcgagatttccagtgagcgtggatcctttgttagcctgtttggcaactcacttttcaataccatagcattacagtaccatggtttactaattgcaatgtacaatctaacatctgtttggcgacaaagtattttgacatgtatagttttgatcaaattccg

SEQ ID NO: 24225 - DNA, 3252 bp, Zea Mays
gctagcgtcagcctcgtctcgctcgttttgctccgtctctcttcctcctcacttcccacccaccctcgttttgctccgtctctcttcctcctcacttcccacccaccctcgctcgttttgttctgtctctctttctcctcactccctccgtcgatcctctgcagcttgcatcggtcgaccagtagtcttccactgatttgaggctgtcatagtatgctctctgaccgtgctggcgggaggaaggagatgatttaagttctctgcgtttataaccagaaagaggaggataatccaatcatgtgaaatttatatttgcctgttcccaccatactgtaatatgaatacaaggatggcttgatctggcaagtgctcgccattctatgggcccatcatgcttttcgagtacactgtttgatcacaaggagcggtctgctgccactaaacttcaagttgttgatcatgatggcctgaaaaattatcggggatatgctcatatgccttggccttaatttaaactacttgtatgagatggagaaatgtcacaaaacacaggatgaagacgactccaggaatccacccatgcctctcagtgactcagtggcacaaacgacagcctagtcaggtaacacaataacatatcagccatatgctatacatgcatatactatgttatggaaataactccgaagagtatatcacattctaactagttatgtatgcaaacactaatgcaagacaaccatcttgctcgtcatgttggtgtggtgggggtcaaaagcgtcttgctgctgaaattgatggtataccgtacaagcatttacctttgatttttgctgacgttaatatgttgcttcactaaaggactaggagacgtcttcacatcacggagtagaccactcagcaacaacagtgcaacggtgttcggacttttgttcacatatgggagtgtttaagctcctgcacctagatttagaaacaccaccatgtaaaatagacaagacagtgcttttgcaaacatgatgctaccacgagacccgaactcatgtatggccaaacatgttaacatattttgtatgtcaccaaaacgcttatttacatcaatgagcgattatctgaactgttgaatgctcaccaaaatgcttatttctatttcctactgctacttgctcctttgaagccttcagcgatggaggcctccacagaagctactaggatggcctccagcttatgacctctcactgccgaccgcaccttcctcagaatatgttgcttcatcaccgccctctcagcagactggagtttcttgcacatgttcaatccctggatgtacctcgacaccgcgccgccgaaaggatcaccggctttctcaagggccacgagcttctcgacgatctgagaagcgagcattctctcgatacagggtttggttccaacctccgtgatgtccaccagaaattgcatggctagatccttggtcttcaaagacttgcggtccagcaagttcaccagtttctctatggttcttagttgcagaaatctttgcaagacaagggatccacccttcgcaaagacgatctgatggagagcgtagtacgctgaatcctggagctcatcgatgttgcactgcagcatgtcaatgagctcgtgaacaatattaagctccaggaacctatgcacgtatggctctcctccagtgcaggccaatttcatcaccaaaaaggcggtctgggacctcacctggttcttttcaacctctctgcgttgtagcagccaagccaacctatcaaacagatggcttcccagaaggaggatattatgaagaatcacctcaaatgattgttgaggctttggtgattgcggcacatttctgtcagataaaacaaatctttccaaactgatccgagcatgccagggcaaatgaagcagcactgcaggccctatgcacccttgaagtggagcaccaagttcacagaatgtttttagcgtgataatcgcgtggtgctgtgagatctcagaaccattgcccagaagcacaagaagtttattgtcaattcctgattcaatcattgtctcaacagccttcagctttccaacctttgtcagagatgcaagtgttgtaaacacaatttcatgccactgctcattttctgcagtcaagagatctgcaattcgaaccatgggaattcttgacaaaatttcatccgcaattgtggcatcaacatgctcagatatcttggtcagaacagaagagaggttggctagagttgaagtatcttcacaggcaccaagaagatcaattaatttatctatggaacctgctatttcaagagagtgagcaagatttatgtagtctgatggggaaaatataactgtaattgcggcagtgactgcaaaaataagatctagtgaccctatagaaattatctctgctattcgagggccaagtattttgctgaacccaattctatttgtctcaagttcagacagggatctgcatgccatgagagcttgagttgtgtttaccaataaaatctcgatgtccatgaattctagcagagaaaagaatgatcccatcttctgttcggctggccgtttcatacactctttgccaaaaacaaaaagccaaggagctactaatgccacattatatgaaatggaatcagataaaagagcacgagtggcatcatttgttttgttctccaggtaaagtgagaccatgtcatgcatatgatacaacggctggtcctccagtttgataataagtgatccttcgactagttttgaaaccacgagagagaacagtccgcactgctcaagcgctgaccaaatggattccagacaagcctcaggaacaggttcttcccaagagatagctgcaagagccatgaaaaaaattcttgaattttctggcattgcttctaagctgaactcaaaagatccaaatatggtcaacgtagtctccacatctttctcattgacgtatgaaactggaccaggtgcacatgtggcatatgttgagaggttggatatagctttctcccatttttccactctagtttccttcctcagagccttgcccatgacagcaactgtaaggggatggtgaccacatcgatccaacaagacttctgcgacaggctgtgaagtatagagaagttaaacattcaaaaaccatggtgtttggaatttttagttattctattttttcatgatgtatcttcttctaaaatatcttactttgcaagtttggca

SEQ ID NO: 24226 - DNA, 3383 bp, Zea Mays
gtctgcctctcaaatctcaccgcctgctcttcttcggtcccggctcgggctcctccatatgagcgcgcgctaggttctctctcgtcgtctctcgtggcggctggcgacgactggggaccgccggtaggcgcccaggccttcgtcgcgctggtctttctagggcccttcgccggcgacgatcaccctccgcgaccagagcttgtagaggttatggaaggtatgggtgtgccttcaccaccgacagttgggactccgtcggcctcgccctgccgcattacgtcccccgttgatgataccaatgcgtcgcttggccaagaaccagagtgcgcattgacatatatcagacaggacgatcctgacacattcattatctcgggaaattttcatccaaggcatcaaatcgattgggattcaattgaagtagaagaaaggtggaatgaggaaggaagacaggatgttactagtgaacgaggattgtatattcaactcggtttgcataatgaagatgagagggtatttaagcaaagggaagatgattcaagtgctcattgtgctggaaataatagggaagaatttcacgatgaagcttcaactgccatgccttgttctgattttgtattagatgggacaaggactatctatgatatgaacaatcctgtaatggagcctggtagcttgtacgcatcaatggagcagtttagacttgcaattagacagtacgccataaataaagaatttgagttgggcattgaggctaccaacaagactagattcagagggtactgtaaagggcctgattgtccttggagcattcatgcgaggtctgagatgaaaggatcacccactattcaagttattgtcttaaacgatgagcacacatgtacatcgagcgggagacgcaagacaacgacaccaacaggtgcttgggttgcggcaagggctcttccactacttatgaaaaaaccacatatgggtgctaaggagttacaaagtatgttgcaagatacatttggatgcactattacatatgatacaatttggcatgggaaagagaaagctctgaagcaattgtttgggagttgggaagagagtttccaacttctatggtcttggagagaagcagttatacagaagtcaccggatagtattatcgagttggatgttaaaatggatgagggccggccattttttagcagatttttttgtgcacttggtccttgcattactggtttcaaagagggatgtagaccttatcttagtgttgactcaactgctcttaatggaagatggaatggtcacctgtgttgtgccataggggttgatggacagaattggatgtaccctgttgcttatggattctttgaggcagaaacaacagaaaactggacatggttctttcagcagttgcgcaaggctgtgggagatcttcctctactagcattgtgttcagatgcttgcaaaggtctaaaaaatgccatgaacactgttttccctcaagctgaaaaaagggagtgtttcagacacctaatgcagaactacgtgaagcaatttgttggatccgagtacatgtatcctgcagctagagcatataggagggaggtgttcgaccattacttttccaatgtccaagaaattcccaaggtgtctagttggttatatgagcatcatgatagtttgtggtatcgtagtgggtttaatccagccatcaagtgcgactatgttaccaacaacatagcagaagtgttcaacaattggattaaggattggaaagatctgcctgtctgtgacttggctgacaagataaggaaggaaatcatggagttgtttcataggaggagggaaataggacagaggttgcaaggtcgaatactaccctccgtggtccatatcctccatgtaaggactagaggtttaggtcacttaacagttaagaaagctgacaattacattgcggaggtgagggataataataatgtgcactctaagcacattgtgaatgctcaattgagacaatgttcatgcaacgagtggcagcatacggggaagccatgtcaccatgcccttcgcttaataacaacacaacaatttagagatgttcggatggaagattttgtggatgactactactcagttgataagttcatgaaggcttactcgagggtagtggagccaattggtgacaaatctttctggcctacagtgccatttgcaaaagaggtgtgtgcttctattgggaagcgtggagttggccgtcaaaggaaaaacatgattaaagggtgcctagagggaggaagtggtaagaagccaaacgaaaatgaaaatgtcaaaactaagaagatgattcgtgggaagttcaagtgtccaaactgtggtgaattgggacacaggaaagccagctacaaatgtcctttgaatggaacaaaaaaacggaaaaggagagcaaggaaaaatgttactaaaggttggttcccaaaagatgttgaggcatgatgatggtgcatgcactagccacacaaccacccccatgtgatgattgtgatgccagtattgcgaaaatctctccactttcatctcccagacctatctagaggctagtgctggaccagtgtaccctaggagctgggtgccaggtgcggtggcgggcggggcctagcaaagcatgacgctgtaggagggatccagtcatccgatacgtcagcactccggcacagcagtaggcatctcggaagctggcagggccacagggcaccacgcccaaggcttagccgcgcaggcactgagcagccaagtagtcaggcagtcagtgagcagcagcagacggcagcaaggctggaagcgcgaagtacctatataggcatataagtttagttcgaccgggagtttacttctctgttatctgtgacttgcccgaccccgacttgatgtgcattgtagattatcagaaattgattaatgatttaatcacagattttaatcaactcaacacgtcgagaagaatatttttgtgctcatagttttttagttcaagcaatgttaatactagtggtacttccctgagttcatatcaatgcttagtcttgggctcctcagaaatgcaaattctttctttggcttgcaattagaaacaagtgttggactgctgataatctggagaagaggggttgcagcacccaagcagctgccctttgtgtgaccaagaaagggaaacgatacaacacatcatcactacctgtgtttttgcccggcaattctggtttcttatctttgacactcgggatgagtcacctcgctcttagggctgatgagcggtcgtttgaggactggtggaggaaggccagcaacagtacaaggataagagaaaagggatcaactgtgacgcgcca

SEQ ID NO: 24227 - DNA, 3126 bp, Zea Mays
tttttttttgagagaaacttaaggaccttcaaaataaataaataaaagattcttgacctttttaatccgtcaaacttaaatttaccgatccttgaagagcataagcgccgcatccgcccgcagtccaatgtgacgacatcacgagttcacgacatactgacattcggcaattccttccctccaaactaccgaagtctacttccattccttcctttctcctttcatatacccgcgtcgcccacgagcccgccgtgccgacagaggtgtggacctcgccggagcagaggctatggggccaccgcagccagccaggcccggcgtcatcaacatcgaggcctgcgcgcggccgatcgccgtcgaccaccgcatcagccttccctactacttccgcatcgcgggcagcctcctccgacaggctaatatatatcggaacgagagtaacttcctcgacctatatgtcatccttctgagatactcgagcttgctgtgtgaaacaattccgaggcatcgtgattaccatgccttcaagttaagagaaaaggcattttttgataaacttgttgatgttatcaaagaacttgagacattgaagccagttgtgcagcggcagattgccgatcataacagaggaggtactgtggaatctaatatgaatagtctaaatggagacaatggtacaactcataggatagagcagcatactccaagctcttatactccacagccatttgtaggtagcactaatggagcatcgcaaaaatccttccatgctgggagacaagtggcatcattactgagtgtccagaaacaatatatgaatctaccatatccaaaagaagaaacactagctagacactccatattaggacctaacggtcttaatggtcgatggaatgggcctgttactggaattaaggttcagtatccaagcaattttgaattaacacaaaacgatataacaaggtgatagctcattatctctgatagttttgtagaagggcaggcctggtataatagtggtaagagctgtctcaatgagtcattgggtcacagcacaggttcaaagcagcctctccgtgttgcgggggatggcttgcctcattttatcacttccccagttcccactcgtgggggccttgaacattgggtctgcccttttttatataccttttccattctcatttctattgcaaacagtctgggataccttaagatattaactgtatcatgtgaaattcttccattctaaattctgttgtagaggataaaaaaatttatattgtcccagcatgtataagattactggaaaaccaaaataatccaacagttgtaaaaaatagcaaaagagagtattatttaaaattcgttgatttggagacacactactgttatttttaaaatgcagatcttgcaatatctttgtttccttaatgatgaaatattaacattttttaaagatctatgtcatttgtacttcatatttgtttctataatattcaatgtttgggtttatgttggacttgggcaatataaacaaacacatctacatcctatgcattcgttgatattttgagtaccccctctgtttgttttgacaaggtacctgtacatttggagattccagttttgttttagcaataattataacacaatacatgacaataattttgtgtggttacaataatttactaatggtaaacatgagatattggcaagtttaataaagccttactgtttctttgttatggagtaatgttgtaatggtttttctgttttacaaattttagctattttgtacaaattttcacaaatactttaattattttgtaccaatgtaaaggcacctgaacatgtattggtcaagtcgactctattgaatagaattttgaaagaaagattcttgatcacccaagttaaaagagaaacttagccttgcctttcagattaaactagaggagacatgtatgaaaatggctggaaggactacaagatgcaattaatcatttacatatttggaaagtagtccatcctcatagctatgccattttgtttcctattgcttgacattatcagatgatttgcttctgcagtttagtgccatccatcttgaaccaagatgatccgcaaggtcccagtactgcacctccacctccagatagcccctccaatgacaatgacgatatgaaatctgttctctctcttgatgatggtcgatgttctggcagaggtacaaagaccaatttctccatcaagagttgctgatccaacaccaggacttccgacctcgggaactgcccgttttcagaacttgcatgttccgatcaagttgatggattgttttctaagggttgccgagtcaaacaccaaaagaagcttagaaacctgtggggttcttgctggtaccctgaaaaatagaactttttatgtgacaaccttaattatcccaaagcagaaatcgacatctgttacgtgtgaagctacaaatgaagaagaactatttgaagttcaggacatgggctcactgttcactcttggttggattcatacacatccaacacagtcctgcttcctttcttccgttgacctccacaaccattattcttatcaggtcatgctgcctgaagcaattgcaatagttatggcacctactgacacaacaaggtggtatgggcgtgatccatgattgtcaagagagaggtttccatcctcataaggcacctcttgatggttcgccaatctacaagcaatgctcccatgtgtacatggacaccgacataaagtttgatatgattgatctccgagaacgatgagagcctaacttttttgggtttattttggagcccatactgtagttaaatcaagttgctgcctttttcttagtcgtgctgaagatttgtggattcttatgtatgctgttgtacatagctattgtattgtatagagaaaacaattgagtgaatgatatcagtcattgctgctttgttgcgattcatcccatatcctcgcgaggcacgtttgtgtggcaagatgaagtgatgtctagattttataccatgccaattctccatacttgaatatttgacttgaagagcactaaatatcactgattgttaaagctctattatc

SEQ ID NO: 24228 - DNA, 1874 bp, Zea Mays
attatccttaggtcgaccaaatccttagaatgctcctgttcttatccagttgaggtctagaagcttactcatcacgccggagcagcagtagcagtcgagctcggcatcagctcccttgctgctcactttgcagcacctcgccagctccctggtaacactctgcacctgccgtcgaactctctcagaatgagcagtttggtcgtccccatctcgccgtggttcgtcctcaccatgttttcagatgtgtttgggctgagatgccattcaaaatcgatgatctgttcgtcgccaccggccgcaagcaccagttttgttgaacatacgtgattgaagatcctttgtggtgatgaaggtgaaatcagcatagcactcgccaagcattctacagaaggtctggactagagaaccatgttgtttcacgtttgttgagttcggttggattagggtgacctgattcattgctctggctattaggtctaattaataggcttggattttagaaataaaagtgcagtgccaaaaaaaagtatggcaatgtttgaataaccttgttttggtcatttaagcacttggtaaaatttgggggctatttggaaatcctttgcttagaaagcattgtaaagttacaaataggatggattaatccctttagaaaagatgaagtaagtttatggatgaaatctaatgtgttcagtcccttggtagtcatagtttgtaggtgtagtctggtaatgcttttaaatatttttgttgcaaactgcataaacataagcatccatgatcatgtcatttcatgtagagctcccaaaataaagagtgaagatttaagatgaagtggttgttgaagaggagtttactccagtgcctgttcatcaagtggatggagccatctaactgatcatcgtgttagaagtatctagaacctcttctctgcaacaaagctgttcacgatactgtggatccagtaaagattgtacagtcatcctccattataatagtgtccaaggcaaaatgaagttggtatgtgcaccagatgtcataatgaaatagctactgtggggaaaaaggactacctggtgaaattcgacaagaagatcattggcaactaagtatctttcaactgacaaagcagctatgcatccagatccagctgcagtaatagcttgtctccattcatgatcctgcagtttccttcttaagacatcaagaaatgatatgtgataacaaaaacatgacatgatggtgccaatggagcttcggaatataagatatattgcaaaccatgaacaagttccatacagaaggtgaatgatggagttacctgaacatcaccagcagcgaatacaccatcaactgaagttttggctgagccctctttaactaaaatatagccagcactatcaagttcgatttggccctgcaacagctgactgtttggagtatgtcctatgccataaaataaacctttcacagtaagaactgattcttctcctgtatctcttctcttcagatgaacgccagacatctgccctttgtcattgctaacaacatccatggcttctgtattgaaatgtactgttatgttggggttgttgagtactctgaaacattcgccataatcaacctgttaaccaaacatccagcgaattggaagtttacctcattaatatttcaagtgactgaagaggagctcacgtccttcaaagaacataataatttaatctacagataagttcccaaaattgatgatctgcaggatctatgaaaactcaactaatactatgatttttagtatttaaattggcaaacagctaacactaactaacatagttaccataattactagctcacatccaacaaactgtagcttattg

SEQ ID NO: 24229 - DNA, 871 bp, Zea Mays
ccccattagccctccaaaaccaaagccgcgcacggagccatggtcgccctaccattatcgcaaacacagagaaagaaaagagcaccgtcgccgttgtagccaatcccgctcatccaccgtcgcttcaacctcggcatggtgcatcgcccgtgggtacagcacccatccatggtctcgccgtgcttggatggcatgaagcgtgaccggaatttctcgtcagggcaaggaaatcaccgccgatgccgtggacagaggctttgtgccatggatagtcattgagaggacctcccagatgttcgtcgggccgagtagaagctttgggtaacaccaatttggcgggtattgcttcggggctaagctgattgctcatcgaaagcacaccgctgcctccgatcgacaccctagcgtggccagtaccttccctatcgtcaccattggtgagtttcccctccacatggtcaccaactcaccatcatccccactctgtgtagcttctattggataggcaaatgactctcatgtgcgcaaacgggtgtggctccggcgagcccgccaccaccttcgcttggaccttcgcttggatcatgaacatcgatccggaatcgtggggctttcattgtataccgatttgatgagggctgcgactaatccgggccgccggatcatgatcaggtggctgggcaacaaacagatccttttcggctagcctatttcacatacgagcccctgtgctttggtgaattaaacccgtggtctagccttagtccaaaattaattgcgcagaggtccttttcttcgcaaattcaaccctgagcttttatctaatagtggtcgcggtccaaacacctttggttatggataaaattaattc

SEQ ID NO: 24230 - DNA, 2434 bp, Zea Mays
gggtcggtccttctttcctctacgaaaaaaccattttttcagtataaaatttcgtttttctcctctcagtctccgacgccgccgcactcatccccccagacgaccaccctcctcctcctcccccacccacctcgccggaaccctagcgccgaccgcctgccgtgcccatcgacggcgatcgcattgctgcgccccgatggcgacccgcgcctccaagaattgcctctgcgcgggcagctcttcgttcgatgaccccgacgtggtcgaggtgtctccggcaaccgccgcggctgcagggtgggcctccggccaccacaagaggaagcggagccaggttgtaccgcaagaagtgattgaaatcgatgatgatgatcctgatggagtcatacttattggtgataaagcacaggtggaaaagaataagcaaactgctgtatgtcccatggattgctcaaagcatgccaagagtggttgggttcaggacatccctggtccaagcacatatgcttcaaaatataccagttcctgggttgacctgaaagtgtttcaagacgaggcagtttacaactattctgatggctacccctttgatggatttgaagaagactatgcttatgatgaagatgagtttgaggatgatggttatgacactccactcattgaaagtgagtttcaatttagtttgtctgccaagtttgataacttcaatgttctacatggtctggaggcttctttaccgtggaagcataagactgctattgagattgcaaataagaccaaacctagtaaggctgtagatgataaaatcgaagaaaaatacaaggccttcaaacgatttgatactgttgatgatcatagtgatcattattattcaaagccagaatcaagaaaggttcaggcggtaaaaaagccatcaaaagactgggtcaaacgtattcagcatgagtggaaagtcttagagaaagatttgccaggtaggtagctgttgcttactattaccgtaattttatgaattggtcgcatgggtttctttgaatagtaccacacttggtgcaatcatgcctttgttagttaaatgcgtcttttgtcttgagaacttagaagagcctgttcatgagggtcaagaatggttatagtttcacctgtctactttaaacaaaatattataatctgtatttttcttcaaattgaatagaaactatatttgtgagggcatatgaggatagaatggacctgcttagagctgtcattatgggaccagctggtactccttaccatgacgggctcttcttctttgacatttacttccctcctcagtatccaaatataccaccgatggtgaattaccgtgctggtggtttgcggcttaatccaaacttgtatgcttgcgggaaggtgtgccttagcctcctaaacacgtggactggcagtggatgtgagaagtggaacccggccaattcaactatgctgcaggtcctggtctctattcaagctttggttttgaatgcaaagccttatttcaatgagcctggctacgctatgcatgctaacacagcccacggggagaagaaatccctgacatataatgaagacacgttcctgcactcctgcaggacgatgctgtattctcttcgaaatccaccaaagaatttcgaggattttgttgctggccatttccgcaagtatgggcgcaacatcctcgtggcttgcagagcctacctggagggtgcccaggttggatgcctttctggtgacggagtgcaagacgtcgacgaaggcgacaagagctgctcggtgaggttcaagcagtcactgaagaggcttcacgaggaacttctggcggagttcaccgcgaagggcgcggactgtggcaagttcctcagcgagaaggcaaggtccggagcttccacatcggcagcggacaccacgttgaggctgtaaggcggagtcgggcttgctgttggaaataaacctgccattcaagctatcctcggtcgatggggagttgggccacaccgatgcaacacaacacagcaagtttgatgcctgagctgccgatcgtctaactgctttctgtaggtagtctatgtatatatccctgtctagatcttctggtaaagacataagcgagacatattgggcgtttagggacaccattataccgtaggtatttacgtgtttataactgctggccgcagccccggcagctgtgtcgggctgtgacctcgtcctcagcttcagcttgtgctgatatgattgggaccacccaccatttggatatcaaaatgatgttggtctaggttaggcgattcctgactgattcgttcgtgggatattcggtgtgtgccgcctcctgttcttttacgactgagctccagtgggtccgtttggttgctcacactatggtggttctggttcagccaatgatttgaag

SEQ ID NO: 24231 - DNA, 1264 bp, Zea Mays
cgaatccccgaggcgagcacgagcacgggcgggcgccaccattacttcccggtccatccatccaactgcactgcactgcacccaccttttcaatccaatcctgccgcattgcataattcgcatcgaagatcgatgtgaatccgtggaagggagggcggaggagaaggaagaagaggggtcgaggccgaatccgccggtgagaaggggagcgatggcgaggctggcggtggccgcgagggcgttctccgctgcggcctccggcggcggcgtgtccttggtgcagggggcgtcccgggggatcggcctcgagttcgtgcggcagctgctgcgcagaagcgatggaggccgcgtcgtcgctacgtgccgcacgccgggttccgcggccgagctccagaagctcagggaggagcacgcgcccgggcgcctcaccgtgctgccgctcgacgtcaccgacgagagcaccatagaggcagctgcggcctcaatcacggagacccacggttctcttgaccttctgatcaactccgccggcatcctctcgatcccgaacgtgatacagccagagactacgctaagcaaggttcagaagtcgtccctgatgctggcatacgaggtgaacgcagtcggccctatcctagtgatcaagcacatgtggcctctgctgaagatcggaggccgctccgagactaggagagggttcgcgcttgttgcaaacatgagcgctcgagtcagctccataggagacaacgctctgggtggctggcatgcgtacagagcttctaaaacagcgctgaatcagtgaaggacaacatcgcctgcgtcctgctgcatcctggaaccgtggacaccgacctctcgaggccgtttcagaggaatgtccccgagggtaaactcttcacgagggagttctctgtgcagaggcttctctccgtcatcgacagcgtcaagaaaggcgacaacggcaagttcttcgcgtgggatggccaagaaatcccttggtgaacggtcatcgtaactcgcttgagtctatagcacagcacacagcagtcaacaacgcccctggttttaatccaacgttgtttttttttcaacaagccaagcgaacagatgcattatttctagctaaagggtcctctttttgtgttatcaccgacctaaagttcaagatgttttttttcttcttctaagtgttgaaatattagacatttttaaatcaaattctgaatataaatcatgactaaatcaaaagaactgaagtataaag

SEQ ID NO: 24232 - DNA, 839 bp, Zea Mays
gtatgccgttggaaaatttatatttattcatgaaatagtataatagagggcaagcctggtgcagtggtgagagttgtctcactgagtcactactcgctaggtcacggatttgaagcgtcaccgagtcaccaggtcacatattcgaagtagcctctctgcatttccagaggaaggcttacctctgtttatcccttccccatccccactcatgtggagtctccggcactgggtctgcccataaaatagtataatatattttttgtaaattttttaacatatcccttatttgacagggtcaaaagtctctctcactggagactgctattggaatgtggcagttgctatttgctgaaaggaactggcctcttctggatcattggtgtcagtttttacaggtcagacacaataaagccatatctagagacacatggtcccagctgctggaatttgtgaagacgaccgatccacagttatccaactacgacgacgaaggtgcctggccctacctcatagacgaatttgtggaatatctgactgagaacggactcgtccagcgtaaaagatgaacaacggggagatgcatctccaaacaatggttgggctgtacaaacatgatttatctcggtcagctcgacgcccagggcctgatattggcactcctgctcaattcattcaccaaactgttggcatatcattgaatttgcttataaacgtggggaaacataacttgcctgggaagtggtggctgtcagcctgcgatcgtgaactgtaacttatcgaaaatgcaacggagtttgggactctactatatgatttgtttcagtttttcttagggcttg

SEQ ID NO: 24233 - DNA, 2701 bp, Zea Mays
cgggccggaccggcccaatcgaagttttacgagccaaaacgtgaaagtgtcgtccagccagccacgtggctccggcagggcagagcgtttatccaactcggctctcagcgactgcccaccaccaccactgaggattcctcttccggcggcggcggcggcggcagcgatgctcctcctgcgcgccaacgcgctcgccgccgtaccggtgtccttctccataacgccggcggcctcctatagctgcttcccctggccgtcttcatccaccactgccgcgagctgctccgtcggctcctctgccaggctcgacgccgccgtgcagtacgacccgctccgccccggctccgatgcgtgggcccatcccgacggcatggtcaccgcggagggtgacgaggagaaacagcgctatgacacggagggggagtccaacgactgggaaggggaagggccccaaggatcatcagaccccgagggcatcaacgtgccgcgccagcgctacatcgccgtccccaaggaggccctcctcgatgctgtcctctcgcagttcgcgtccgacgacgacgacgccgcggacttcaagcgctgcgccagatgcttggacgccatccttcacgccgagcacaagaggatgctcgaggagatgcgcacctcctacatgctcacgcaacgccaccgggacgaggaagaggagcaggatgacactgacaccgcctcgggctcggactacgtcaacggcaaagccggctccggatttttcggcatcacccaactggatggcacgttgttccttactagaagcgtggacttgagaactctgctcggattgaccccagaccccgattcccagaccagagttgcttttgcaactcaatttcagcgctcattcatgaccctactacgcaatgctcagtttgaagaactctccgcacaagatctgctcttgacatatgccctaaataacgattacctgctcacgctgcccatttatgtcgactggaagaaggctgctcaatctaatgcaataatattcaggcgtggatacgcgactgagaggcagaaaggcctcctgttggttgagaaacttgattacttgcaatcaaaactcttgcagaatgtctttttcagcctctccaaacccttgaaaaagccagggaaatggcttaatgaggctttgaaaagatcaacagataaccagggatttcagatctggatagacaaactgagactatggcttaaagagcaaacttatgcagataattcactgctgttgatagaaagctcttcatgggacaagcttagttctgatcagttacctgatgcagatgttcctatttggatcgctgcacaaagggcagtctctcgttatgaaggaattttgtcacctgttggtcctcgtggaagactgttaagaagattgcttaaatggactggactaataccttctctgccagaagcaacgataaaatccaacaatgaaactaaacatcttgaaggacatgtgaggccaaactttctaccaagaattacccttgctaatatatgggaacctgcaagcagagaatcttgcaataacaatatctgggagatggtgaaagcttcttttcgtattctgtttgggaggtctactcttcaggaaccagcattccaggagttaatactactttacactgatgaagttgttccaagtgaaacgaaggacgagatggttccgctgcaactgaaaatttatgagaggattccgatcccagatttgccagtagttttcccccacaagaaattgtccttccgcatcctagatacagtaaggctagatattgctactgtaataggtcagctttttcttcttgatatagttgctggtactgcactcgtcatacttgttttccgtgtagcactgggctacaaacagacccgggataggtaccagcttctggtgaataaaaccctctatgagaagacattggcaagtgggttcggctcggtttacttccttctcgatgcttctgagcaacagcagtacaaagaagcacttttggcatatgccatgttgctctgcagaaagaagtatgaggtctcatctcgtgcaagcataagagatgcatgcgagcagtttatgcacgagaaattcgaggcaaagattgagatgccgatcgacaaggcaatggagacactgctgcggttggggctggtgattgagcttcccactgatggtgggtcgagcgtgattggtctcccatgctcggaggcatacaggatcctgaaaagccgttgggacggcttgctggaacaagatacagaacaaggctgattagaacgagacatgtacgttggtggcttggagtggagtgggatgggatgccgtgctggtacatactcgacgcgtcggcaaagctcactcttgtttgtatgtatacgtaccagttgttgcagcaagtgtatatgtgctagctacgtgcatgtataatcgtgatctagtttgttgtacacaaacgattgcagtgtatgtatatgggagcacatgtttttttcggaagactagccatgtgtctgtaagtttttctatttgtaagttggtttccatttataaatatagagcataaacactgttctgttagctaggtgagtatcctcataattatagcataattttagttttttatcatttaaatatatgaaattttagttttttatcatttaaata

SEQ ID NO: 24234 - DNA, 1834 bp, Zea Mays
attatttcgtccagacctattaacagacctattaacaacgaggcaagtgggcaaaatcacaaaaaaatcgtgtttcctgtctcggagatagcctctaatttgaaatcagcaaaggagtttcgtggtggcacgacgcacatgcgacggtctcctgtcctgctctgtcccctctggcctccctagcagcttatactttcttattgtactttcttatagtcttccacggccgcagttagccacatctcgccgtcggcgacgagggacagggaggcaggatactcctgtcaggccgcgacgtagccctcctcctcttgctctccccgccatcctctgcttctcgtccacctgggattagatctatttcttggtacctgagcgatcgagtgaaatcgatctagccaaggtgcggcgggcgcggcttattcacgaattttctgtgttctttggaaagccgccatggacgagtggattcgccaagccgaggtgtgggtgcgccaatccgagagctggatccgccagcagcccccggagcagatctatgtcgcggccacggtggtcgccgtcacaatcctgctgcttatcgtagcatcttatctgaaatcctctaaaccaagcaccatagtgctatccgggctcagtggcagtggcaaaaccactattttctaccagcttcgggacggatcatcacatcaaggaactgtgacttcaatggaagaaaacagtgatacttttgtgctgcattcggagcaagaaaggaaaggcaaagtaaaacctgtgcatattgttgatgttcctggtcatgctaggctcaagcccaagcttgatgaagtcctgcctaaagctgctggggttgtctttattgttgatgctcaggatttcttgtctagcatgcaagctgctgcagagtacctttatgacattctgacaaaagcatctgtagttaagaaaaggatccctgtgcttatattctgcaacaagacggataaagttaccgcccactcgaaggaattcatcaagaaacagttggagaaagaattgaacaagcttcgggaatcaaggaacgccatatcttcagctgacatctctgatgaagtccagctcggggtccctggagaggcattcaacttcagccagtgccagaacaaggtggctgttgcggagggtgccggttcaactggtaatgttttggccgtggagcaattcatccgtgaacatgtgagggcgtaggtcgttcttattgttctcagggctccaaatggctctcttgatctaatgaggcaagatgtacattgcgtcaatggggttgcctttcaatgtgactcttcatccggtcctctgaagttgcttaagaagcagtgaggcgcaatcatattctgcactggttcagctgacccatgtttacatgttgcaatgtgtatgcctgacagtcatcggatatgaatagagcatggtataactgtctggctatggttgttttgcacttttgctccgtatgacacgttgaaatgtcgaaggacacctttgtatgaagtagcgtgtagttgttgcggacacgaagacgaagctacgagcttcggcttggtggcttgcatgtatggtaaaagtgacagtaggagcgaggtgagatcttcaagacttgttcaacaagaccacaaaaggaaaagacaacgatgccctaagtcaactttgtagctcatatgtataggttaaggtcacgattgtaattttatcgaagctacaccctacgactataaataggagcacattgccatgcatacacaacttttttttgccggagaaaattgacattctccacctacaaagctattgaaag

SEQ ID NO: 24235 - DNA, 4076 bp, Zea Mays
cccccccccccccccttcacagcatcttctctctctcctcttcctctctcctgactccgccgcgtcgcgatctccccacctctcctgccgctcccacctccccgcactgccaaacccctcgccccccccccctcctccgctgcgctccgatccagtctgccgcgtccccggcggcgcgccctgagctcgtcgccccgcgcgcacgcgagttgccctgcccaccctgacccgcgcaggcgagcgagcccccattgaagcgcgccgcctcccctgcgcgcggcggcagggctcggtgaacgaggccagcggtccgcgcgcgcctggccgtgatggggcggtgccggcgccggggctgatgcggaggccgctgccatgtcggacgtctcgtcggatctcggcggcatccgggcggggcccgtggagcgtgacatcgagcaggctatcactgctctcaagaaaggagcatacttactgaagtatgggcgtagaggaaagccaaagttttgtccctttaggttatccaatgatgaatctgtactgatatggttctcagggaaagaagagaaacatctaaggttgagccatgtatccaggataattcctgggcaaaggactgcaatttttcagaggtatccacggcctgagaaggaatgccagtctttttctctaatttcacatgataggtcattggatataatatgcaaagataaagatgaagctgaagtatggttcgctgggctgaaaacactgatttcacgttgtcaccaaagaaaatggagaactgaatctagaagtgatatcctttcctctggtgcaactagtccgaggacttacacacgacggagttctcctttgagttcacctttcagcagcaatgacagcatccacaaggatggcagtgacaactaccgactccgtactccatatgggagccctccaaagaatggattggagaaggcattttctgatgtcatgttgtatgcagttcctcccaggggtttctttccatcagattctaatgctggatcagtccattctatgtcttctggacaatcggataacacaaacgggcactcaagaggcgtcccaatggatgctttccgagttagttattcaagtgccgttagttcatctagtcatggttctggtcatgatgatggtgatgctttaggcgatgttttcatatggggagaaggaactggggaaggaattcttggcggtggtggttcaagagtcggaagctcctcaggtgcaaaaatggactgccttgtaccaaaaccattagaatttgccgtgcgacttgatgtgcagaacatatcttgtggaggaaggcatgctgcacttgttactaaacaagccaaacttattgatgctctttctcatatgaacattgagcttgtagcatgtggagaataccacacttgtgctgttacactatctggagatctttacacatggggggatggcacatttaaatttgggcttttgggtcatggaaatgatgtcagtcactgggtacccaagcatgtgaatggaccattagagggtatacatgtttcgtcaatttcatgtggaccttggcatacagccctagtaacttccgctggacagcttttcacatttggtgatggatcttttggggtcctgggccatggagatcgtgagagtatctcggtccccagggaagttgaatctctcaaagggttacgtacggtgcgggcagcttgtggtgtttggcacactgctgcagttgtagaagtaatgtctgtgaattcaaattctagcaattgttcttctggtaagatatttacatggggtgatggtgataaaggtcgcttaggtcatggtgacaaggaaccaaaacttgtcccaacttgtgtggctgctttggtggagcccaatttttgtcaggttgcttgtgggcattgcttgacagtagccctaacaacttctgggcatgtgtatacaatgggcagtgctgtctatggtcaacttgggaatgcacaagctgatggcatgcttcctgtgcgtgttgaaggcaagctatacaaaaactttgtggaggagatttcatgtggtgcttatcatgtggctgtattgacttctaggactgaggtgtacacatggggaaaaggtgcaaatggccggttaggtcatggcgatactgaggataagaatactcctacattggttgaagcactgaaagataaacaagtcagaaatgttgtttgtggaattaatttcactgcagcaatatgcattcacaaatgggtatctggagttgatcaatcaatgtgctcaggttgccgtcagccattcaacttgaggagaaaacgccataattgctacaactgtgctctagtattttgtcattcctgcagcagtaaaaaatctctgaaggcttcattagcgcctaatggaaacaagccttaccgtgtctgcgatacctgctacagcaaactgacaaagggacttgagacagatatgcatttttcagcgaaacgggctgctaccgtaccaggattcagtgatacaattgaggaggatctggaaacaaggtcaaatgctcaactatcaaggttgtcgtcaatggaatcttttaagcatttggatagcagatattccaagaaaaacaagaagtttgaatttaatagcacccgtgtttcccctgtgcccaatgggagttcacattggagtggactaaacatttcaagatctttcaatcctgtatttggatcttcaaagaagtttttctcagcatcagttcctggatcaagaattgtttctagggcaacatcacctatttcaagaagaacaagccctccacgatctacaacaccaacacctactctgggtggcctaacgtctcccagagttcccactgacggcaagccaacaaatgatgcattaagccaagaggttctgaatttgagatctcaggtggagagtcttaccaggaagtctcaactcctggagttggagctggaaagaactaccaaacaattgaaggaagctatttccattgccggcgaggaaactgcaaagtgcaaggcggcaaaggaagtaatcaagtcactcactgcacagttgaaggggatggcagagagattacctggaggagcagccaagaacactaagttgccacctcttcctggaatttccattccaagtgacatctcgtctttggctatggagagtgtgggcagcccaagcagctccggagaacaaatcataaatggtcataatggattgcttgcgtctaatggaccaagttctgttaggaataagacaagccatccagaagtgggtaagaatggaagtaggccgcctgatgctgaatcttgccatgatgctgaatgggtagagcaagatgaaccaggtgtttacattactctcaccgcgttgcctggaggcgccagagatctcaagcgggttcggttcagccggaagagattcagcgagacacaagcagaacagtggtggcaggagaaccgggcgagggtataccagcagtacaatgtccgcgtggttgacaaatcaacggccagtgccgacaatgacattgcagctaactgacactagactgacctggagaaacatacctgattacaagtggagctgaggccatgtaccctacctacgtgaaggctctctagtcagtcaagctgggttgctaacgtggctaccattttacctaggtggttttcgctcccaggaaaacaggaggtttttttaatccggttttacataattctttctcttactcccttctcttttctccttgtgtggaaagtagagtgcttgagcagaggtaatgtaaatgcttagtagaagcaggctaatctaccttgtaaatgcataagcaagcatcgattttagaatgtcttggaaattttctgatatggttgcaaatggcaaatctgggctaagtggtgatggtccctggcggttgtagtagaacctgtatgcatgaatctgaagcaatcacgagggctcaacacttgagtccgatcccatctgattggcttagactgtatccagcaacttacttatcccataaccatatttaaacttca

SEQ ID NO: 24236 - DNA, 3836 bp, Zea Mays
tggttagccaccataagtgctgatcagggatgtcctgttggagctccaggttatcaacgaggttccagagctgtaaatattccacaagcacttgcactgacaaggcaccccttaaatcagagacccaactatggttttgcaacccttgtgccactgttctttgcctcttagcccttttgggcatcaacaggaacaaattgggggcccagtccgaaacagattttccttgcagccatcggtccaagatttagttgattctccattgcccacaacagtaacaacaacaatgtcaaacaaagcttgcgcatgaggaggtagtttgaaggggaggccagcccaagggcgagatgcatccgtcttctgcaaccacaaccaacgaatacgcaaggccccactgaacagctccatgttaagtatacctaggcggctaggcctccaaacagcaaaggtcgttgaacacactcccaggaaacaagacagctacccccatttgctttttcctgccctttccacatgaacccacttcttttatcgatttatttgagcacccatttagggaggtgctagcatagagtacatagggatgaaagataaaaccactctcatcatcacagggcggcctgcttgactcatgagcgatgttttctagcccgacaatcggacaatttattggataccttatcgacaaggggctgcaactcggcatttgttggttttcgaattgacaggggaagtcccaggtaattacatggaaactcctttaactcacaaggcaacaactcagagataatgaccagctcttcatccccacactggataggtgtgactgaacttttggaaatgtttgtcttgaggcctgtagaatgccccgaaatatcaaggagccgagtgaccataaggagatcagattttagtggccggaggaacaatactacgccatccgcataaaaagaaatgcgatgtttggcctgctgatgagcaatgggctgcaagagatgctcttgagttgcaaaagtaaaaatggaattcaggacttccatgaccagaataaatagcatgggtgatagggggttcccttgatgaaggcctcgatggtgggagatgcaattcctaggttcaccattgattaaaattctggtagaggatgtgaacaacaacaaactgatcagattacaccatctgcgaccaaaaccaaggatgctggagatttttctcagcgccactgtcaccacggcgtactctggtgcgctgcgggccttcccgcgtgccgcaccagcgcctgcgacttgtgcggcttgtcttctatgatgtcctcgacagcttcctcgaccacagcaaccctacgcatggcacctcgacgacggctcgacgcccttgcacttagctacctcaacattatcggcacaaagggctatcatctgcatgggctactccagtagcagcattcgcaccggcattctgactatggggggatatctccattattctccagtctgtccgttcgttttgctaacgctacgagtgcggggggatgttagagtatattaggtatgttagagtatattaggcaactcctgatatggttggtttaggattgattgtaatctcgagataaccttccttatatctaggataacctttcttatctctagaatacgcttcttgccctccaagtcatgtactcctatatattctccctagaggctcaatgcaatacatcccacacattataccaattctctcattccttcaacaaggacagttgtactgatccaatatatcaacaaaataaaagatcacaagtatagcaataaatttggctcgaactaccctggacttgctccaatttttttgttaacaaaataaagaatcacaaacaaattgaccacctcctacactgcacatgaagctacaacacagaaaactacagcagcacatcagactgccatgaacccatgtccgaccactgaaacagaatgcaacgaatccgtagcaggcagagaactaacctgtagctccacagcgttgtgttaccccgaacgggacaatgggagcagaagcggtgtcttgactcacgtaccgatagctccaagatcttcaagaaacaatggaaatctgggtgaaaccctagcgtatcgagaaattactgttggggaagggaatgcaggcggaggaggattgacctccagagacggatggtgaagcgatgacagtggaggagcaaggtggcagtggtcggggtgagttgcctatgtgatttctagagatcgacatggagcagtggatttcgggagcaacgtgatcgccgagcgctgggagatgtgtcaccgaccgtcgggaaaggcgcgccgctagtcaccagccactgggtatgcgctgaccacaggatactagggtgacagcggcagcagccttgcgattcacaagctgcatgagcatgaacaagccgagcgctaggactaggagatgtgtcacctaccataggaaaaggtgcgccgctagtcaccagccactgggtatgcgctgaccacgggatactagggtgacagtggcagcagccttgcgactcacatgccgtgtgagcatgaacaagtcgacgggggttagggaagccctcccgcctcttgactcgcagttttcttccgcgtggaaaaggaatggaagcgagtttcgatccctgagtttgtgggcttccgtccaaatggcacaaaaaattggcccatgggagattggcaccgggtttcttggcccagggaatttgcgggccccccagggatctgggctcccaaagtagccctaaggcacatgcgtatctactaacgctgtaccggtcgtcttgtttcttcttctctacaaaattaagtcacagcttctacagctaaggatctgcgatcagcatgctcgtgctttatgtggccattctgccgaaatcctgtttcaggagcatgaggtctcaaatgcaattgatgaactcttgtcaaagattcccgctggtctaactgaggatgggcttcaacttgtgaaaactagggtgctggagagtgccgggggcttcttcgatacaacatttacttccagcaaagtcaaagtatataaatgccctgagctggttgcggagcttcatatgccaatgggttgtcgagttcgccaatggatctttagaaataccacatctgtggcaatcttttgtatcctgcactgctttggatactgtggatcatttacaagaggcggacattatctaatagagctgagcaaatatacgagcaggtatgtgaaatccttgaagataatgctgtaaacgccgagattgacaactccaattctgaggtttgggtggttacctcctggctcagggatcacctgttggttcctcaagagagaaagaatgctttcctgtggaagaaggtcgaagaactcatacgagaagattctcgaatagatcaatatccaaaggtgattaaaggggagtcgaaagttgtttacgagtggcaagcaagtggctcgcttagtgcaaagattaaaaaggtgcaaggtgcaagggccaagtcaaggactggtgtaggtgtcataaaatttggggaagaaatgagtgcttcctccttgggtgaggtgagggagcagggctcgtgtgatttaacacgcgaagaaagaagagccgagccgtcacagtgtgttgttgctgttacagttgagtttgttggcatgtcatgagattgtctggtacagtttcaacaactgatgaatgaacatggtcactggaagatgctgctgacggagcagtcgtcgtgcacacgccagatggtctcaccgaggaggttagcgacggagagcac

SEQ ID NO: 24237 - DNA, 2858 bp, Zea Mays
gcccgtcactctcgtcctctcccctcttgctgtgtcgccgcgcgtggaagacgttatcgccttcgccttcctcttcctttccctctccctgaatcctgatttctattcaccttcttcccctcctccgggcggaaggcaaagacctacacgcctatccctctccctcccgggtcccggcttccccttccctgctccccagatcgattcacccagcgggaaaagcggcgcgcagtggggtgcagcaggcgcagcgggctcggcgggcggcgagcggctagcggctagccgcgacgggcggccaatctacagcggaaggcggtgggcggctaccggtggcacatcgacctacggaaagtagaaaggtggggaggactgccctgttcgcatttggagcatcaaaacagggttgcaatctagcacatattacacatcagtggctgataagaaactgcatccagtggatgtaaatttcattggatttgagttttggttgagatggcagttggattgacatctcagctgttccaaagagtaactgctactgacatcttttgccaaaggaacaaatttaggagttctgagatgaggagttctcttcccttgccatccacctcgtttccttcagttgctgataggcgagactgttggggtcgcaatgtgttagagagtagctgcatgcccatgctttatacacctcgcagatatagatctttgggctttagatcttttgccttgccaattcctttgaaggaaattcctcttgtcaagaacacatcattagcactaactagcatggaggcaactggaagaagagtcctacatatttgatttcttcgtcgtaccttcaacctctacttctctggacaggagcaacactaatctgcaggggtttggatccagttgtcttgccttcagcagcaagtcaagctgtgaaaacacgtctgataacttttgtgagatcattatcaactgtcctggctgttgcatatattctcacaagcttgattcagcaggtacaaaagtttcttatggacatgcgcaatcccaatgatacaagaaatatggggtttgattttaccatgaaagctctttatactggtgtttggattgcttctgtttctctctttatggagttgctgggtttcaatacccagaagtggataactgctggagggtttgggacagtgttgcttacacttgctggtcgagagatttttactaacttcctctcaagtgtcatgatcaatgcaacacgcccatttgtagtcaatgaatggatcgatgcaaagatagatggtgttgatgtctctggcattgttgagcatgttggtttgtggtctccaacactcattagaggtgttgatcgagaagcgatatacattcctaaccataagtttacagtttctatattaaggaataacactcagaggacccattggcgtattaagacctatcttgctattagccacatggatgctggaaaaattgggactatagttgctgacatgaggaaagttttggcaaaaaatccgcatatagaacaacaaaagctgcacaggagagtattctttgagaaaattgatccaaaaaatcaagcacttatgattttcatatcctgctttgtaaagacatcacattttgaggagtatctcaatgtccaggaagctgttatgttggaccttcttagaatagttgggcatcacaaagcaaggcttgctacccaaattcgaacagttcagaaatcatatggcaatgcagacttcgataacattccttttggagaggacatgtatagtcgagtccgtggccggccacttctgattgatacatctgcaaggatcagtgatgacaaacccaggcctcgacctgtatcatcacgtgaggagcagaaagtcaagacaaatggctcggtagatattaagtccagttcccctgaaaatgctagttcaagcaactctgaaaagcaggaaccgaaaaaaatggtgcctgaagatactcgggtgaagaacattaagggtgataatgtgatgccagtaacaccatctttagatcctgctacgtcaacttccaaggctggtaaagggaagacacgggaaccagagcccactgagcggcaaggagatgggtcagtctcggtggctaatccaaagaaagaatctagaccagtttttgaagataacattgttctgggcgtagcccttgagggttccaggaggacactgcctattgaagaaggaaatcctcatctatcactatctgagactgaggtggacaccgaagaggcggcttcatcaccgaaggataagataggccaaagcccaaaactttgaggtccagaaaaaaagccgttcagaggaatctcgataggtcatccgagttcaaactgtatccttgtgaagatttgtcaccaagcctaccttttttgtgcgcttgtgcaaatacaatgccaccacacatcagtgttgtatgcttaaggggtaaattcacactgacgattattcagggaacattacctgtcagtcgtattgctacaggcttgtaaagaagcaagtgcttcaataggcattttgtaaagattatattattgctcatttaagtggcttcttgcatatgcatcggcaattcagcatgcgccgttgcaactgtcatctcggtttccaggtttggcttacgttagttttgtttccaatgccatctgctgcgagctgaaatatcatcgtctcttttcctttttttttttttacaaaagacacgctaagtcgtggagacggtgaattcttccggatggcgtctcatcttgcagacgactaaaacggaataccgcgattatcgaaaaggaaacggaataccgcgcggcg

SEQ ID NO: 24238 - DNA, 969 bp, Zea Mays
cagactcacagggcccagacgccaattgttgccaggctataggacggaccagacggcagactagtagagtaggctctcctgcgtccgttatcccctactgctaccaccgaattacaaactccgctggcgctatataaaacccaacagccccatcttgtgacccagtcgcctcgcctctcctctccgtttgctttgcattcaccccttgccgcacacatcaggaaggcgggcaggcgacgacaatgacgatgatggcgccgcatccgcagccactgccgctgccacagccgccggcgccgttcggggacaccacgctcaccaaggtgttcgtgggcgggctggcgtgggagacccacaaggacgccctccgcgagcacttcgagcgctacggcgacatcctcgaggccgtcatcatctccgacaagctcaccggccgctccaagggctacggcttctggagcaggtgacaggctgcagctgaaggcacgaggcgatcgatgatggcgacgacgagcggcggaacgaaaggagcaggccaaacaggctgagctgcacatgaagggtgtcgtccgtctgtcgggagggcccgaagcgacgcaaggcccgggcccccattaggccattgctacatcccccctctgacttcgtgcgtggctgcacggccaccgtgccgggcaagaacagtctgtaacaaatgattcgattcgtctctctctcgtttaccaaccgtatttttttccaatggtaaacccgttaccagtgtctgtagggggcagcggaccccaataataatcgtcataatatttcgccgttcatctctgtgctgctttgcgtgcatgtatgtgcgtcagcagaacactaatggttcgccggcccatcccgtcggttctgtgggctcgcagtcccacgcccgcactccgaccttcttctccacgggctgagaaagtcgagcgttgctctttcaattcc

SEQ ID NO: 24239 - DNA, 1953 bp, Zea Mays
gaatatataaaaaatagtctcaaattgattgtttgttgaatcggttgtctgaaaaatcttacattctataacatacaatatggtaaacaacgaagagtgcatctgtaaacatgatttctgcatttcatttgttaagttatgtattaatgacatgatttctcccattacttattggattttgatgtcgcttctgggagtgtctgattgaatgacataattaagaaatagaagattacttccccaatatctcttcttcctaatctcacctttcacagcttctgagtaacaatcacttgctattactaactgacatgtccactcctcatatgtgagatattggggttgatatatatatatatatattgttcgtttccatgtaattgttgtgcactaacatttattgaataatttgtacaccgtcgcaatgcacgagcactcacgtagtgcatccatgatagatcgatccggccagctgtcgtacttgccacattgccatcgaccggttgctgtgtcagcgtcaggtcaggtgcctcaaaatagaacagtgttaatgaataaaaccaacacgcaagtccaccggatacactattcactatccgaaacaggcttttgtcgagtgcctagtgatttgccgaggataatttatcggacgctcgataaaatattatttgccaaatgccactctcaacaaacaaatacactcgacacagatctcatttgccgagagccaaacactcggcataaacagacgttcggcaaaggaacgtttgccgagtgtccatctctagacgaaaggcgactcttgagaaaagaccgtcagcagtcgtatatagttgacgaccgttaacaataccgaatatcaggagttgacactcgacaaactaacttctttggcgaatgttttctaggcttaccaagtgactgaagaacccggcaaaacagttgtgttatctgtcaacttcccactatcaaccccaaaaaaatccaactctgctttacgtgaaatcactgcttatatacctggtattggccataatttacaagaaacgttctgtagtattagtaagaggaggagtgtgagatatggcattattcgaggaaccctagacgctgtaagaatcgtcaacaagagtgattagaaattgccctgaccctgaaatggggagcctgtctgcctgtcgcgcgcctcagctagcttgccgcaagcccgcaacaggctcggcagcacacgcgcacttgctctggtggagtggtggcatcgtcatctccagccagcctccagatggtctcgtatcccgggcaccagcagacagacgaaacatgcctgccatgcatgtctcctcactcgtggaatgctgcatgctcctctcgtcttcttgtgatgcgtggggttttggcgaaagttttcttgcgagtgtataatatttaatatggcccaccacactgggattatatatggtgtgatctccacctttcttgtgccgacggatcacaaagccggttcttgtattattaactgccgaccacactgcatgctcctctcgtcttcttgtgacagcatttctcgtcgacggtgggggctgctgctcggcaagagaagatgggaagaggaggaggaagaacggctggagtttgaaggagaagatggagtgtagggcacacacgcacatcagcgagtggactactagtggagagagagaagtagcagaggtacgagaacacaatggcggtcttccttcagtcacttgtgcgtcagtccagtattgtcgaactagtagaaaatggcacgattggaactgaagtgccaagtttccaaacaggcttgtatagcaatgttgcactgtactccctccctcctattagttttcgtttcagacaacgatacagtctccaaaatataaatttgactattttttaaaaaaatatatatatcaataaacttttaatacatct

SEQ ID NO: 24240 - DNA, 214 bp, Zea Mays
tttggttgcactcgagaaaggatcagtttcctattttgtgccgttctaaattaatgcctcgtgctgctggtccttttaaggtgctaacaaagattaatgataatgcttatatccttgacctgcctacggaatttggtgtttccactagttttaatgttgcagatttgaaaccatatatggccgagggtgaggagttgccgtcgaggacgacttc

SEQ ID NO: 24241 - DNA, 2883 bp, Zea Mays
caagtgagcatactacctgaggacgcaaacctacctatttcagtagattggttagagttttctcacttgaggatggcccatgtggtaacatctggggagccattggagtaccagtgagcatactacctgaggacgcaaacctacctatttcagtagattggttagactatgatggcatacttgtcaattctattgaggcaagaccagtattctcaaggccccccatcagaagcatttcaggttgacagctttattgctaaaagttaccacgaagacgtgaagatcagcttgggcttgaatcctaaagattttttaattgctattgttggtaattcattttcatacggtgataatttgatggaagaggcacttgtcttgcaagcattgagtcctctgttacagagatatcgctctgagaatagcgcacaatctgaactgaaagtaaagatcttcactgggaacataactgagaagcataggatggcccttgagtctgttgctctaagtgttggcttcccaagaggtgcagtggagcatgttgctgctgaagataaggacaacctccttggtacagctgaccttgttatatattattcttgtctcgaggagcaattattccccagtgtgctagtccaagccatgagtcttgagaagctggttatagccccagaccttgcaattattagaaaacatatcaatgatggagtaaacggacttctgtttccaagaaagaatattggcatgttagctcaagttcttcttcgagcagtgtcaaatagtaaagtgtctctttcagggcaaaaaattgcttcagctgggaaggctcatgccaagaatcttatggcttctgagaccattgaaggctatgctatgctattgaaaaatgttgtcaagctccccactgatgcactaagccctttaactgctgatgagatacctttagctctgaaacaagagtggaaatggcacctatttgacgacgtgaagcatttacaccgtgtgaatacgagtttgtctggctacaagatactccagaaactagagcaggagtggcatagcaaccaaatggaaaactcttctttgagtacaaaaaatatcaatgacgcattctctgcaattgcctgggaggaacagagagtaaatgaggttatggacatcaaaagaaaaatggaggaagacgagttgaaggacaggaatgaccaacctcatggaacatgggaggaggtgtacagaaatgtgaaaagggtagagaggttaaaaaatgaattgcatgaaagagatgacaaggagcttgagcggacaggtcagccactttgtatatacgaacctttctttggggaggggacctggccctttctgcaccagagctctctttatcgtggagttggtctgtcttcaaaaggtcgaagaccaggagcggacgatattgatgcttcttctcgtcttccacttctcaataatgtttactacagagatattcttggtgaatttggagctttctttgctcttgccaacagaattgacagaatacataaaaattcttggatagggtttcagtcctggagagctacagcaagaaaggcaaacttgtcaaccaatgccgaatctgcaatcttagaagccattcaatctcaaaagcatagagattccttttatttttgggttcggatggatcaagatccaagaaaccacgctaataaagatttttggtccttctgtgacgtgatcaatgctgggaactgcaggttagctgttctggaggcctttcaaaggatgtatggtgtacatcttgatcgtgacctggatactctgttacatatgcctaatgatggagacacgtggtctgtgatgcaaagttgggttttgcctacacggtcattcctagaatttgttatgttctcaagaatgtttgttgatgcactggatgcacaaatgtatgacaagcaccatcaaactgggcattgcatcttgagtctccacaaggaccagcactgctactcccgtcttctggagttgattgtgaatgtttgggcattccacagtgcacgacggatggtctatgttaatcctgcaactggtcaaatgcaggagcagcaccatctcagcggcaggagaggtcaaatgtctgtgcagtttttctcctacgccactctgaagagcatggacgaggagcttgcagaagagtttgacttggatcacccagacaggaggtggctctggccacaaactggagaggtcttctggcagggtctctatgagagggagcgtagcatgcggcagcatgagaaggagcggcggaagcagcagagcagagagaagatccagagaatcaagagtagagctcggcaaaagacgttggggaagtatataaagccaccacctgatgatacagttgtctcgaacgatacaacgactgtagatttatagcattttgaccatactttagggtgataattcttaccgtggaaaattttggttcattctttcattgttacggctaatgtcctcggtcctcactgagtacccccggcaggtgtgaatatttttggtcagttttatcgtgccctctggtgttcagggtgctttacaggcgattttgtaacatatctaggccattaagtttaaatttgggttcccgtagcgtagatgcttttgttcttttcgcttacgagcttctcaataacaggcaacagctgctccgcgtttgcagtctccttggtacaaattgagttgacttgattgtgtcagtctgtcagatatttggttgaacctgcgctattatctacgtttcggtgttgagaattttgttcaacatcctgtaacatgaaaaaccacattatatcttcgattgttttggtgtcttacacaaaatctgtcattatg

SEQ ID NO: 24242 - DNA, 1289 bp, Zea Mays
aagaaatcggttcctccaagagaatccagagtatgttgcacagggtgtaactttagctcagttttcgttccagatacctatacctctgcggcaggactatgtcaaaaagaaaccgaagttgataaatgcaagtgatgaagcaagtacaattacctctaagtcttctgaaccagacgaagtgaaccctatagcctgggcagttcctacaaaacatgagggcgatgccagtgaagaagcttctctcgccgatgagacacttgcatcagaagtagtgctaacccggaagaggaaaataggaagctctttgtcagtagagccaaaccatctctctgatgaacttgaaccaaagttggaggatgcttagaacggggagacgtctaactgaaaagtaaaagtgggcagcgtcgtgatgccaacttacccccctgccatggttttattggtcctctgcttgtttctcgttttccttgggagttagcttctctgttttatgtggtcgcacacggccttatttgtagtattacaccacaaaagctggctgacccccactgagggagggtgattgatgcaagcattgtgtatgatccttggacaagggaatcacggatgtttggttttgtcaccatggctgctactaaggaggcagatcactgcatcaaatatctggactgttctgtgttgcaaggtcaggtcataattgtttagaagaacattttattgttttgtcttcaccaccgagaatccaagagcgcctcccatagcctccacatccacaaggtcctgcttgactgcgacgacgtccaggctgatgccctcatcgtggatcgactcgcctcgctctagaaggagtggcccctctggagttgaatatgcagttataaccaatttttaccccttttatcctagaagagttgccaagacacggtataagaccatgataatagactaagagaggatttgtctctaattattatatgttttatttatgcagtcccatgagaactttgagtatttgcagattgatttattaatatattaaagttaaagattgtatgtgttgagtatgtatccattcttgttggaagtgtcttgcaattccaatccaaggatgtataaaagactgcatgggctaagtatgtgttttttcatgtatttggagtatatatactttttgttgcttgagaacatgtatgtacatacatagaagcttgtcaattgtgtgaacttgagttgatccctgtctaacctgagtatatatatatattttgttgcttgagaacgagtatgta

SEQ ID NO: 24243 - DNA, 1978 bp, Zea Mays
gtccagagcacacgaaggcctagcccagaaccactggattggccactgccagcggcacagccgacgccttatccagcaaccgtcttcctcatccatggcataagccgcgcccgcctccgcacgccccgctccgatggcagccgcggctgtgaccctgccctcctcgggcacgcccttcgccgtcgccacaaccgcctcttcctcatccgcccgccgctgcctgctcctgccctccgcggctccccgccgagctctccgcgtcgtggcctccgccgctaccgaggcgccgcccaagcccacgcagccgccgacatcgccctccggcatcgtgctcgtcgacccatccgaagcccagaaggtgcaccggctcaaggccgtctacgaccagaaggtcgtcccgctcatcaccgaggagttcggctacaccaatgtccaccaggttcccaagctcgagaagattgtggtgaactgcggtctgggcgcggaggcagggaactcgaaggggctggatgccgccatgaaggacctggccatgatcaccgggcagtggcccgtcaagaccaaggccaggaagtccgtggccagcttcaagatccgtgagggaaacaccatcggtatcgcagtcaccctccgcggcagggaccatggacttcctgggtgtcaaccccaacagcttcgacgggcacggcaactacagccttggcctccgtgaccagggcgtgttcccggagatcccgtacgaggtgggcgggaagaagaacggcatggacgtgtccatcgtcaccagcgccaagacggacaacgaggcgttcaggctgctggtcctcctcggcatgccattctcggagaacatcaagaccgacgtggtgatccggaagaagaggttgaagcgccaccacttcctgagcaagggcaaggggaagggaggacgacggtgaggagaggaaccagccagccagccagcccatggttgcacacgctctgttcagcttgttttaattccgatctttttgcagaatttggcttacaaattcgatgctgttgttgtctgtcaattatgtaacttgtgcacctatgaaaaaggtttgcaatgatcatgtccgttttgctgatttcttcttgatgcataatttgtagtcacaagttataccactgccagacattgtaatcggaggaagcagtaatgtgagacggacactgtaatgcaaacgtatttcagctgcatttctcatactgcttgtctagactatcaccgaagagcctatatgatcaatgatctcttttggcaatcggcctcaatagctacacttcggcagctcgggtgggccgatgacgagctcttcctccgggaaggcgcacggcttgccctccgcggcgagctccgggcacggcttgggcgagacgtgggaggtgacccccttgacgttggtgcagttccactgcagctccttggcgtccggcgcgaggcgggcggtcacgttggatatgcagatcccggtgtaggggtccttagggatgccctccatcctgccggccatggtcacgttctcggcgaacacgtcgctgtagttgatgccggtgacctcgggcatggcgttggggtcggacgtgttgtcggggtgctgcccgtagttgccggtcatccagaacacccacttcatggtgtggaggctgaggccgcgcacgaagatgtccctgacgaagccgcccctcccggcgccggacttgaccctgacggccgactccgtgttgatggccacgctgtcctcggcgcgcacgtcgcggatgccgccggacatctcgctgcccagcgcgatcatggcgctcgtgggggagacgcaggtcagcctccggatgacgatgtgctggctcggcatgttgaacctgatgccgtactcgtcccacccgctcttcacggccacgcagtcgtcgccggagacgatgtagcagtcctcgatcttgacacgcgaggaagaat

SEQ ID NO: 24244 - DNA, 1890 bp, Zea Mays
agaatagaaccgctgtgtgcaagctccggaccgtcaggataagaaaacagcgcggcggcaggcagctcctcctgcgactgcgagcgcccgtccatggcgtccatctccccttccctccatcacccttgcaattctagaactggcttccttggaaagacacacgggactcgtcctcgtcttttctctgctggaagagttggatttgtcagaacactagtggagtgcaaggaatctagaattggaaagcagcccattgaagtcccaccgaatgttactctcacattagaagagcagtttgtcaaagctaagggcccactaggggaattatctctcagcttcccaggtgatgtgaagattgtgaaagaagaatccggtaacctgagagtttataagactgcagagaccaagcgggcgaaccagatgcacggtcttttcaggtagacaattggaaactgtaatatgattttgcccatattagtttttactgatttacttctcataatgtgattcactgtttcactgcctttattccttgttgtgtatgccttctcctgatattcctaaaagcaactcgctaacttctgaactgtctgcttcttgccaaaactcttatatttgtgtcactttgtacaatcaagagcagtattgattcccatgggtatttcactgcgatagtaccagtgccttgaataagccgtatcacacatgttattttcatatgtgagtagataaactgtcctgtgatcctgctacctcttacaacgactaggattgagattttagatagcattgctctgcttcatgtgtctattttttcctctggcctcttgtctcaccaatgaccagtaaatatgatggacttatttttgtttgagacctgcgaaacaacactttctgccattttgtgttcaatccaccaatcaatctgcattgatataaaataaccacagttctagtagggctgacaaagatttgcaaaatgaatgccaatcttattgcattttccatcctttgtccagtattggtaccaaggaaataggctatgctatatcttgtttctggagtccaggaacaggaactgtaaaatctgtgttatctataacaaacataatcaagtgtcttgatcacttcctcacttcctctgttatttattgtggaactattgggaataatactgttgagggacttcttctccgccgaaggtcctctaagcaaaaacaccttcggcaaggccatatgcaagcaggcacaacacgaagaacattgacagacaacatcatcgttggtgtgtcgaaaggattcgataagaagcttcagctagtgggcgtcgggtatcgtgcggcggtggagggcaacgatctcgtgatgaacctgggattctcccaccctgttcggatggccattcctgaaggcctggcggtcaaggtggaggagaacacaaggatcaccgtgagcggctatgacaagagcgcgatcggtcagtttgctgctaccataaagaagtggaggccacctgagccatacaagggaaagggtatcagatatatggatgaagttgtccgaaggaaggaaggaaaagccggaaagaagaaatagaaagtgtttttttgccctctccttacttcatttcatttttcccactgtaatgatcttcgtttgctaaggctgaacctaagaaatatattgttctgtgctgatcatggcatatagatgtatactttgagcaccccattgtttcataatttcattgtttttcaaggtatttattctgctccattgaaaaagcgaaatgaatatcagaagcactggcaccctgatgaatgtgcaagtgacaagtgcaggcaaagcaggatatggtcttattgtagcacgatacttgtaaaatgtcat

SEQ ID NO: 24245 - DNA, 3946 bp, Zea Mays
tacaccacgccacttgcgcggcttaagtatccagcctcacgcacacacacgtaacaccttacatactccattctgggcctgaaacacggacattgggcttcctgacgcgttttgacaaccggtgctccttgttgctgcttggctggactgacttcggtccctgaataccgccttcttcagacgctgatctgctttccaccacacgaacctaggtagtgtctgtaacaatcccccggcgatgaaaggctgcttgcccccaagcaggagcatatggaaatttctggcgcaataacagttcatcttcccaggtggccaacaaagtaggcatgcctgaccactggatgagcaattgagacaaccctgcagagttcagacgacgttgtaaaattttgtcaggtacctgcaaaccttctagggactgaggtagctgagcgactgtaacagtcggagagatagccttctttagttgagaaacatggaaaatgggatgtattttagacgaagcaggtaaatccaatttgtaagcaaccgaacccactttgttgagaacagtgaagggcccaaaataccgaaaagcaagtttttggttcgatctgggagcaagggaagactggatatatggctgtaaacgcaggtgttgctgaaccaaggttgttatgacagccttgtcttgcagccactcatccagggaaggattttgagagttatcaacagcattcaaaccgaatggtttcggcgaataaccatataacacttcaaagggggaaagacccagtgcttcgtgcttgcaggagttgtaccagaactctgccaggtaaagccaatcgatccacttgctgggacacgcgttgacaaagcaacggaggaaggtctccatacattggttaacgcgctctgtttgcccgtctgtttgtgggtggtaggaggagctcatgtgaagcttcacatcagctagcttgaataaagcttgccacaattggctagtgaatatgcggtcacggtcagagacaattgctgttggcatgccatggagcttatatatatgctgcataaagtgtttagccaccaccagtgctgaaaaagggtgtttgagggcaataaagtgactgaacttcgaaaacttgttgaccactaccattacacagtttttgttgcctgaatttggaagtccctccacaaaatccagtgtaactgtctgccaagcgccagcgggtacagacagaggctgcaagagtccagggtacttgaccctctccggcttggactgctgacacacggagcacgaagccacaaaatgtttagcaaacttcctcataccggaccaggcaaacagctgcttcagcttgtgatacgtgacagggaaaccagagtgcccacctacagcagaactgtgcatggcctccaagatggcttgatgcattggccggttgttgcccacccaaatcttgttgttgaatttgataataccatcctgtaacgaaaagtgaggaactgatgaaccatctactatcagtttggctagaagctgtttagcttcttcatcctgcagatagccatcgataatgttttggcaccattgtggagaacagacagaaatggccagaaccgtagggatatcatgcgctcttctagatagggcatcagcaaccctattgtcggaaccttgtttgtatactatcttgtactgcatgccgagtaactttgtaaataccttctgctgccatggagtgttcaacctctggtcacttaagtggatcaagcttttttgatctgtgaagataatgaattcggcatgtaacagataatggcgccactggtcgacagccatcagaatggctagatattctttctcatatgttgagagaccttgtgttttggtgcccaaaggtttactgtgaaacgctagtggatgaccctcctgcatcaagacagcacccacaccatttttacaggcatcggtttccaagcaaaacggtttagcaaaatttggtaatgccaagacaggtgctgaaacgagagcttgtttcaaagtagagaacacaagctgatgatcttgagtccacacaaagagagctccttttttcaatagattgtgcaggggtcttgcaataatggcaaaatgtttcacaaacttgcgataatatcctgcaagaccgagaaagcttctcaagtctttggcattgtttggtatgggccaggacaacacagcctcaacttttgcttcatcggtggccaccccttcctcacttattacatgtccgaggtaagaaattttgcgttgggcaaatttgcacttagacattttgacaaaccaagtgtcttgctggaggagagttaacacctgttgcaagtggtctaagtggtcatccaaagtggcactataaattaatatgtcatcaaagaacactataacacattttctgagtaatggtgccagtgtagtgttcatagcactctggaaggtgcctggagctccacataaaccgaaagccatgaccaaaaattcgtactgcccatgatgagtttggaaagccgttttgaattcttctccaggcttcaaccttacttggtggtaccctgacaagagatccagtgtggaaaaccatgatgccccagcgagttcatccattaactagtcaaagacaggaatgggaaacttccatttgatagtcaaggcattgaggtaacgataatctacacaaaacctgaaactgccatctttctttcttactaacaacaccggggaagaaaactcagaggagctaggtcttataataccattttgaagcatcttcacaatatgttgctcaatctcatccttcaacgatggggaatatcgatagggccggatattgactggagtcgcaccaggtaccaagggaattgcatggtcacatgccctgacaggaggaagagaacttggttgtgcaaaaacttggtggaactgagataatatagcagacactgcagggtgcacagcttcaggtggggtatcaagcacgaaagacataactggtgtaatatgcaaaagaatgtcagttgcttgtgcagcacaaccataaagcaccacttgtctgtcgtggtagggaatacacaaccatctgtgttgccaatgtacctccatgggactgtaaaattctaaccaatccattcccaaaatgagatcaaactttggcagaggcaacaccctcaaatcttgagagaattcacacccttggatgctccaaactgcatgaggtatcatcttgtcacaggatagcagtccaccatttgccacttggactctgaaaggagttgcagctactggaacaatagtgtgatgctgaacagttgactgattaatgaaggaatgtgtactgccagaatcaaccaaaatcaggatgtcctttccaagcatgcttcccagaaatctcatggatctttttgcagaagaccctgtcacagcttcagcagaaatagccataataataggttcctcgagtgtctgttcatgaattgatgagtcctcccctgaattttctgacagcaattcccacacctcctgtaatgcatgcagctgcacagttgcgttacaagtatgtccacgatgccacttctcagcacacctatcacatagaccacgagcacgtcgataagctttgagtgcagccaatttgccatccacagacgaaggaacaccatctcttttcttctgataagattctggtttatgaagagaagatgtgggtggagggggtagttgcattggtcgggcacttgctgtagccgacttcagccagggctgataagcttccttgcgatgttcatgtcgtcccgacggcagcgccacctcttcctgcaacaaagccaaggaacatgcggagtccaagtccagaggacgttgaagcataaccactgctctaatgtcggtacgtagaccatctacaaagcgagtagcaaaaaacaa

SEQ ID NO: 24246 - DNA, 517 bp, Zea Mays
catctgatgaatcagcttgattcgtttagtgataagcttgtaaagagaattcttaaagctcatgaaccttataaccataatgacaatactaaatgttctgttgtttctgagagggtatcatatgaatttgttcctgaaaggaaagcttgctcctcattaaacaaatcagtggtacagaatgcaagtggttgtgatagcaataggaacaaatgtttggcatctgggaaagctgtgtccaagaaaaaagatcagagtaccaataatagcttggataaagaaaatatgtcatcttgtggttctggtggcacaaaggtgtcatctccaggctccttgggtttagctagggaggttgattctggaaattgtctctccctcttggataaccggaattgtcctatgactaggacctcaaaggcaaatcacaacaattgtaggcaaactgcggacatcttggattttaatctcagagaatgaatatgctggcattgcaagaataacaaaggggctgaatatgaac

SEQ ID NO: 24247 - DNA, 1152 bp, Zea Mays
aagaagagaccaaaacatggtcccggccgagaaaatccccgaactctggccccccatcactagcgggccgtcaccgcccactctgcaacggcccagccggagggtggcgcgcaggacgtaacccgggagcgggtggggcacaacgaggggatttttttaaccaagccagaaattcgcccccgagggggatcgaacccaggacctggaggtgctactcggaagccttaaccattacgctagaggccctttcgcaacgctatgacagcatcaccctaatccatctcccctcgatttggcccgatcccttagagctagtgcacagaatagtcatcaacaccgcaagccttaaaaaaacgcatgggccattgcaacgggatcccctttcctctttatgggctcaccagtcattggctcgagatcgatggattaggtgcaaaagtggatcgcgggccgacgccagtacagctgtcagctcggcccaccttctcggcccgacgccctgatttccgctcgtcttgctctcgcacccttcccactgccggcggcggctgaaggcggcgcggtatcagcttggtgatttgtgagcgatggcgccgccggggtcgcggcggtgggcttacgtgcgcgtgatggccggcaccatcctcggtggcgtacttggattctacgtcatgcaccgcgtcgagacctcgtacaaggcgagaatggaggagaggctgcggagatacgaggcgcatctgcttgccaaagccaaggagtcgcagcagttgcaggacgaggcacagcgggaggataaagcccagttcctgcccgactcgtgacaccgacattcttcccctcttgcgcctgctcttttccaagctgttaggtacgagctgccactactagcttccatttccgagggatcatatgtgagatacatattgaatttatgggttaattccggccatttttatccccttttagctcgcattgttcagttttgagtgcattgtattgtgacagctgtaatctatacattttgttgaagcatacatagtcatctggtacagccgaaaatccaactctgccagggcacagtgctttggttctctctgattgaactgtaaacaactaaagcatatgttatggagcgacctatcctgttccaga

SEQ ID NO: 24248 - DNA, 3160 bp, Zea Mays
aagcccctctgcctctctctctctcacctcctgtcccctctcctctccgtgtccggtggagcttctccacctccggccaagatctggaaccagcgagggtgcccggcggttctcatcccggaccccgactctttcctcatctctgcaacctctggatcctccatctgcccccctgcaggatctggaagctgcacccgtcggggggagaagcaagcagcacatccagcccgctcgagctcgctcatctgacctcaccactgagcttccgcaggatcttcacatccccattccattgacaacgtgaaagagaacatgtgacggggctgccaagctacatgacaacgacgccgattgccgaatgccgagacaccgcgcacgctcttgcagataaagatgatcggttgatcgacgtggtatttgtaccactttgctgtccgtgaaagcccgctatataggtggtgacatcaagtgatcaagattttatggtgcgcaagaggttgggttatagttcccgtggccatcgaattccaactatgccacgtgttccaaactcagctcgggggaaacgttctaccagaagaaagaaagatgagaatgatgatatgtgtgcaatggatttgctcgcaactgtggcaggaaagttactagcagatcaggacaattcatctagcgttcctaataccagtgcagcgaaagctaaaaaaaggaaatcagttaaggaagaacactttgatgaaattccgcctctaaaaaatgtggctatggagaaagatgtgggttctggtagcgttagtgccttccctaggcaagctaaaaactgcctggcagaaaactcatcgacaagaaatggagctgatacagtattagagtcactaacagtgaaatcaaatatgctagcaaaaattcctgagtgtggatcttatggaatacaccatgcaggctcctcaagttcagcagagcctgaacaagtgcatcaagctgaacctaaagtgagcagaagacaagcagatggacatcctgtggcttatggtatatttaactccgtggatgtggatggcaaacctccggctttggttagttctgacagtagctcgtgtgttcctctgagcagccatgacaaggaacatcaaacctcttccttgtatcggggtgtagtgcagtatactgcagatagagaagatgatgaaaattcttctgggtgcacgcatccaagcaccatagaaagtaagggttgcaaaccacaatatctaggtaaccataggataaggaaattgcttgcctcgaaggtaaggaaggcagcacgtaataagatttgtggagggattccatcaaaaaagatctgtggagggttgtcaaaaaaaggtagcaagctaaacttatgtgggaaaaagatgtccaccacacaccaaaaggtgcaaagaatgattttcaaaaagaaaaagctaacgcaccgtacatcttttgctaaggagatgctaactgaagctagtgggacatcatttgctatggaaggtcaaaataaatcatgtgaagctgagaattaccatgttaagctaagaatcaagtcattcaacatcccagaattgttcattaaggtcccagaaaatgcaaccattggatcactgaagagagctgttatggatgttgtcaatagtataatggaaggtggcctacgcgttggtgttcttcttcaaggaaaagatatccaagacgacaacaagacactttgtcaggctgggatatgccacgataaaaagctaaataacatagacttcacgctggagtgcgagcgtgagcgcgagcctccctctggagtcattatacaagaacagatggatttcctcaccacagatatggtggagccattagctaggatgaagtgtgaggaaccttttcctgaagccgacgtcggagatgacagccagcagcctagagcgccttatcgaagccgctctctctctgacctgtactctgtccattgtcctgttcagatggcttcacaggacacgacggcgagctcccaggccatcgtccctgtttcgcctgcgccttcagacgtgggcgctctagccattgtgcccctttgtaagtccaaggggtctgaagtcgggcagaggcgcatgaggaggcccttcactgtcggcgaggttgaggcgctggtgggagcggtcgagcagcttgggactggaaggtggagagctgttaaaacgcttgcattcgacagtatagatcaccggacctacgtcgacctcaagctgatccacccaaggccgaggaagctattagatggttttatccatcagcatctgcaggcaatgctcgtgctcaatacaacctaggcctttgcttgcagaacgggaagggtgtcaagcggaatcagaaggaagctgcaaaatggtatttgcgagctgcagagggagggaatgtacgggccatgtataacatttccctgtgttacagctacggtgaagggcttgcacaggatccagtgcgtgctaagaggtggcttcaactagctgctgattgtggtcacaagaaagctctttatgagtgtggtattaagctttgtgcggcaggagacaaggtcaagtgtctcatgtatctagagctggcgacacggcgtggagaagctgctgctgctcacatgagggatgtaatacttgaatcgctctcggttgtgaatgcgcagcgtgccatgtcggatgctgataaatggaagcctaggacactccatcctagacctagaaggtgaggaaatgacgacgccaaagtgcagaagaaccatatcatcaagatgtccacaccctagtcatctgtggccagaattgaagcacagaaggtcgaagcaaacatgtatgcttcctcggcacccacagccacaggaatgtcagtagccatcctgtggctctctgtataaagccatccattggcagatgtaataccaggagaacttgtagtacagaaagttctgtagcaaatactacttcctcccttccaaattgctaccttaattctcgaatatttgtcaccactagttcatttttgaactaaaatgtgacaaatagaaataacggagcgagtataaaatactttggcttttctagatatgtattttttatacacttaaatacaaagtaaaaggaatgtatctataaatgca

SEQ ID NO: 24249 - DNA, 5786 bp, Zea Mays
gatagccttaaacggccggctaagcggattagccaatcggtttggtgacctttccatcccgttccgttccactggtccctcgctgtccccagcttccccgcccctcctctagccgtcgattcgaactctctcaaaaccaaaacagcagtgcatgagaaaaaaggggaaaaatctcgacacatcgcaacgcgccgctcccaaatctaggttgcttggccatggccgacccgccggcccccgacacacagctggaacaggcgtcacccgccgctgcccccgctgaccctgccgaggacgccccggtcgagaagagccccgcggcgcccctcacgctggagccggacgccgctgcggtgtcggatggggcagcgggtgaggtggaggatgaggagtacgtgagcgaccccgacgatgaggcgcttcctacgatgcggcgccgagaggccagtgacgacgaggggtccgaggacgggaggcccacggcgcggatgggccctgaccaggacgacgacggacaaggggcccccgaggcgtacgacgacgaggtggacgaggaggataaggagtactacgacgaggaagacatgggagaggggttcgaggaggagtacgaagggcgcgtggcacttcccatggacgacggcggcggcagccaggtctcgcgcggagaggatggcgtggctatggaggaggggttgacggagggggaggccaagggcgaggggggagagaaggagcaggagccgtttgcggtgcccacttccggcgccttctacatgcacgatgaccggtttcaggaggagaaccgtggcagacgcaggtaaagggaccaaaggctattgaatgaggacaggactctaatgtataattatggataatattaggctgatattgcctggagttccgaactcgaaaactttgcataaaagttatagcttttcttgacataggtgagtaggaaaaacagaatttgagaaagcgagggcatttgataccgtctgctataatatcaggtttgcctatacaatctctgtcttttgtttcaaaaggcagaatagcaccactttgctgattgcataagcattttgtctaggttctttgctgcctagaatggtttaggccattatctctatgtgagagtgggagtgtgggacagatgggagacagaggaagatgaattgcggttgtggaacttgtatacctgataatgtcaatttaattgttttaactaataggcagatttgctgtgggacactcggaaaacatggaattggctatggcacaccaccaactccagtattggccaagtaccattatgaaaccgggtttgtttgctgtaagacaccacccccataaaatatgatttccattgggttttggagagagaggcaagggaaataacacttttgctctcatcctcttcctcttgctcatcggaggacaccggttgtaacaccccatgccccccctggcggggcgcctcagccaccttggacgccagcttctgttgttggcatggcgaggcggagcgcattggagactaccgccgaggtggagcgccttggaattctgcttgctgctactggcctcagcagggcttcttccctacgctgtgggaggagatggcgtgtgagctgtcgccgggccaggtggcggtcggtgtccaacactggtgttggcgggtgagttgggccaccttggcagacccagcatggtggaggtgctcgtgccgctcatggagggtccagatctggaggcaggccatggcttagcctgtggcggtggcacgtggagggaggtgtgaggacagtcggtggctcggtgcatggtggcactgttgtccgacgagacgggcttgagttggcgagtagggaacatgggtggccgacaccagtagtccaaggcagggcgatgtggagctcctgtctagtgtcaccgagtgggtgagggccggggcgaggaggtgagccacgagtctgcaacggcgcaagcacatgcctgagatgggggcacactgtgtgatctgtttgtcgcgttcctggagaaacagtgattctagctatgagggatgctcgacggagaagagaccggatgatcggtgaacaaccagaggttgaagaaaagggtagaaaagacattcccccaccttgaactctaataatcggtgcgatgtgttatggcaaatatacactcattcataagggtactaggcatatttcaacattggcggtgtggattggccaattccattgaagtcggatgtcctgcagcaaaatttgcctaacagtatgacatatttctagctatcatgtcattacttgagctgtctggagaaaagtacaattacctagggctgtctgactaggtgctactgtggtaggcatagcctgaacacctccctagcaccaattgctttatgaaacatttacttaactactgtttttctgagaatgaggtcaaaatggaaagtacaactaatagttaataatttgtaaatgagtagtactgctatacagcggaatcacacctatgcggcgccatggtttttctctagcctaactcctgtttgaacactgttgaggacatgggaccagaaaaaaaatcagaacagaactacagaagcactggagccggaagtcatataggagcgatgttaggcagctctccctttgtttgtaaatgtacgatgatactgtagaaagtgtgcagtgaagcctcctaacttcgaccactcatttcaggaaatcatttgaatcgatcacatgaagacatcaccattcaatttattgtggaaaagtatttttcatattgatctcatatatgaagttgtggtcaaaattttcatgttgagaatcgtctcaaagtaaaaaatgccatacacttaccaatagagaataattgcaattcggatcaacatagccttttattgcaattcggatactgtatctattagtttgatggaataaaataaagtcatttgccttttattgtggtgagttgcaacactcttctactgtttctcactttcacgcattttatggttacatggcatagctctcagttttaggctgtagttgtttaagttgctgggatggcagtggatgctaggtagtgagcattgggattgcttactgggaaagggaaatgtttgttggcacttagttttgaccttttttttggggacaacagttctacacgttcgatgttaagtacgtttcatatgaacattcgatgactatgtctgtgtgatagactgtgctggcagttgtgacatcatttgtgccttttaattgttttcatggctggaagcctggcaataggtagactttagtaataattgtccttttaattccaggaaagtataattgggccgttaatcattattccttatattgggtttactgatgaaattgtagttgtgaacagtatcacacatttctcagagggattaaggaaaaaaatgcctgcttatggcttatcatgcaatgggcaactgagcatgccccagtgtgttctaccactgcatgcggttttagtgctgtagtttctattcagtcagtttcctagtgcaataggctgtcataatgccacctgccagtggatggtaatatttaatgcttcatatttatctgcccgttcttgcctcctctaaacaggcgaatgtttggtgtgaggaagttatgggatgttaaagacaatcaagcttgggtgcatgacagatttgaggagatgaacttgcatgatgatttctatgaagaccagcggatgtcaagaggtcgtggtggtcgaggtaaagcaagaggtggtggccgtggtttttccagaggtggaaagcagcgtaattaccatgaagatagcaacaacacccaaaatcgcaccccaaaggtagtgagagggcgaggacctcgacgttatgaagctgctgcaaggaacaacagagaggttgttggatcccaacgaaaacaagcagctagatttcgagaatctgctccaaatgctgtagcagccagagattccgggcaagtttcacatgcacagccagaggctgcccctcccaaaaggaatgtcatgagttcaagcctaaattctgcgtccccacctttttatccctccagtgcatctactcaagattttccggtagcagctcaaacgagggacatacaagcaggaggttctaataagatccctccatcttccatgaagatggatgataactcaaagctacaatctggttcaatggttagagggagaatagccatggattatggtgggcgtgataagttacttgctgatggtcctattaggtcatcccaaggaagggcaccaacggcgtcactgaattcaggattcacatcatcatctgttaatcctggccaatcccctattgcgagggcttcagggggcaattcaaacatcggaatatcttcaaataatcagccacaaagtcatggatcagtgatgcaccaaaagttagggcaagtgcagaatcagtctgcaacaagaatcccaactcagcaattgagtcatcggactagtaatttgtcaccagtggctcagcatctacctggtaaatcaggagaaagtggcgagaatggttcataccctactctgaatgattcaaagacagcttctgcggtggtaaaagtcaatagccaggaaactgggatgagttcatttatgtatggtggcacccaggttattggggctgcgggcctttcccagggcgatcaaaattttcctggcactccagctctgctgccagtgatgcaatttgggagtcagcatcctggtggtcttggagttcctactgttggtatggccctccctggctatgtagctcaacagcagatgggaatgggaaacaacgaaatgacatggttgccattattggctggtgcagcaggtgcttttggaggatcatatccaccctatatagcccttgatccgagcttttactctagatcttcaggacagacatcatcatcagttccatccagggaacctagtactaatagagggtcaaaatatcctcaaaatgatattgggaatgaggagcttgatgagcgccagaacaagcctagaagatactcagagatgaacttcagccagtgaagcatcttgtaaggtgaactgcatctgaataagctggttatggccctatttaggccctttgtgatctccagttctgatctggagcactttgggtggctttgatacccttaattatgttaggtcttatgcctgttcgtggagtgttatctgatgggtcacttcacagcagagcagggggtggaattcgttacttgaattatagtattgctcggttgtgctgcgtctggaaatgtcaaatttgttgctgcgtctgaagacgtggacggttgctgaagagagcttgaaaataatggtttgcgttggttgataaagtttaagagttttttttttaaagtacatcctgttagtgactccagttggtggcagtgtactctgatgtatcgggtccgcatatagtggctgctaagaccaagcggcttcattgccgaagcttgtatattttggaatccgttgagtgcggtttgtgacaattttcagcttgcatgagcgtgtccaacatggattttttttttgaaaagccaacaagaggaatccgcccgtctttttatccccgggtgatagaaatttctatttcatggtgaaaagctacgattgtcatattctgtaattgtggaatgaaccgcatgccatcttactgaagctagaaatgagtagttttaactataaaaccttcg

SEQ ID NO: 24250 - DNA, 910 bp, Zea Mays
ccccccttcggcctccgcccaaaaccccacgcgagctcccagtctcccactccatccatggcgatcgccaccactacctcttcctcctcgctgaccattcgtctcctccacccgaaccccaacactaaccccgctcccagatctctccagctcctcagcaggaggtgcgctcgtgccgccgtagccggaggcgcggtgccttacggggctgctccccggcgtgggatttggtcgatcagggatgacttggtggtgccgaggtctccctactttccagtggattccgcggcggggcaagagcgtgggccgtcgcccatggtgatggagcggttccagagcgtcgtcagtcagcttttccagcacaggattatccggtgcggtggtcctgttgaggatgatatggccaacatcattgtagcacagctgctctacctggacgctattgatcccactaagcccctggataagatcaatgtagatactgaccgcgactactttatgagcgcaaaagaagcaaaggagtatggccttattgatggagtaatcatgaatcccctcaaggcccttcaaccacttccagcttccagttagtcatgaagtgggctagaactgtcaaacatttttgtttgttgtatcaatgtgtctgttggagctgagtttgcgccgcggtgtttctagtagcctggccacataatattctacatccagaggcgtcaaagattgtaaaaaaacaagaactacggttaggatatatccttgttgatggacattcgaattgaattaacagtattaaagagcctggctacataacattctgcatccagaggcttcaaagattgtaaaaaaaaattaccgttgagtagatccaccgagattgtagagtttttgaactatttggcttgcatagtac

SEQ ID NO: 24251 - DNA, 1660 bp, Zea Mays
aatagtcatgtgcgctcgacgcgtcgcgtgcctctctctccgctccctctgacttgttcgcttgccgtcctcgctcgcggcaaagctgcagcgtgtctcggctccggcgcgccaccgctcgggacgcccgacggatccgctcccgcgtgcgctcgatatcccttgcttcaacggtccaagtcaacccccccaccaaatcgccgtccgtccggccgctgccgcaccctagcaggatcgcagcgtgcacagctcttcttcaatctgcaggattgcagccacgcacaagtcgtagctggtgcgaatgcgaggaaagggggataacaagacatatgcttttattaatttcagaactaaagagatggctttaaaggccatccaaaagttgagcaataaagacctaaagggaaaaaagataaaagtttcatcctctcaggctaagaataggctttttattgggaatgtaccccatgattggacacctgatgatttcaaaaccgcagtggaagaagttggtcctggagttttaaaagttgatctcatgaaggcaccaggctcaggtcgcaataagggttatggctttattgaatactacaaccaggcatgtgcagagtatgctaagcagaagatgtctactccagaattcaaactagatacaaatgctcctactgtcagctgggcagatcataagaatgctagtgaagctacatctacttcacaggttaaatctctatatgtcaaaaacctccccaagactgttactcaagagcagctgaaaaagctgtttgagcatgttggagaaatcacaaaagttgttattccacctgcaaaatctgggcatgaaaatcggtacggttttgttcattttaaggaacggtccatggttatgaaggctctgaagaacactgagagatatgaacttgatggtcagctgctggattgttcacctgcgaaacctcctgctgataagaaggatgatactggatcatctcctactgcaaaaggacgtccattacccccaagttatgccccacttggatatggactagcgggagcttataatccacttggaaaaggactggcaggtgcttacaattcccctggaaacggactggcaggtgcttatggcgtgctttctgctcatgccgcacagccaatgttgtatgctccaggtgcttctccaggttcaacaatgatcccaatggtcctaccagacggccgtcttgtatacgtaccacagactgcagggcagcagcctctgcatgtgacttcgcctctgcctcagcaaggcggtcgtcgattcggcggcggtggcggatccagctccggcggaaagcgacagaggggagatgaccgtggcagtaacagcaacagtagccgcaggggctggcaccgtccgtattgatgtttgcaatgccgctgatttgcaattagaagttagaacccagcaattagcatatttatcgcagtaccatgctggaaactgtactttgaattatttgtttttcctgtgtgcttcgtagcaggcctgccctaaaaagaacgatagtaccggaaggggcaaatgtagtggtaatatactctatacatttgtaaccatctccatcctgccgttgaccgtcttaggttattaaaataaatatatttcttccgttctttttta

SEQ ID NO: 24252 - DNA, 1676 bp, Zea Mays
ctccactccacccccacaggccctccttgctgtgctctcagcccctcacacacacacactgacacacggtcacaccaccagacccagacgcgcggtcacctctccggctctcccctcgttaagaaccaacaaaaacctgtgcctgcctgcctgccactctgcgcatgtgaccgagcaacccactgccgcccgggatcgagccgccgcattgccgcgtcccttctggagccgccgccgcccacgggggtaccggatctgaggagcaaaggccattacttatcgtaagcaagatttctaattggcggaagcttttatgtgtagctgactgttgaatttactggtctcaagtatagagtaggcaggcaatctgcagtttagtggaacccaatgggttcttctccttccaaagccactggagaggatgccctggttctgtgcaaggatcggatgcgccacatcagacaagctattgactcgagagatgcactgtcagcagcgcacttatcttacacacaatctctccgtagtgtgggtactgcactgcggcagtatgctgagtctgagatctcaccggaatcatcgctctccatttcagaagtggataagtcaccatcacattcctctatggcatctccttcgccttcgcgtgcagtagagagtgttgcctctctggggcatcgagcaagtccatctattactccaccctcaacacgaatccattgcatgaaagcagcagcaaccactcctttgacctttgtgatagatcaatctactgctgaatttgtggggcgcgaatccccagtatcagcttttgtcccacccccaccaccattgcctccagaattatgtaccacgtgggacttctttgatcccattgatgctgctggtacctcttcctccaacaatgagaatgaggtaaccctgaacttcagtagattgagggatctaagagagtcaagggtagctgaagtagttccattgaaagaagttgaagaggaaatcatgtccagaaggcatacagaaatttctgatgataatacaccacctgagcaggaaagagagccaaagcaaggtgggaccggaaaaccaagtcagttggtggatacttcaaccaaagctacatctgagcaggttgctgcaaagttggaggaaagtgaaatggaaaaagaattatgtgcagaggcagaggacccttcagagttcatcactcatcgagccaaagattttgtgtcgagcatgaaggacattgaaacccggtttatgcgtgcagctgaagcaggaaatgaggtttccagaatgcttgaaaccaagaagatccgacttgacatatgtgctaaaataccaggttctccagtcaagctaccttctgcccgatttgtgtcagcacttcgagtgtgctgcaatcgtgatgttattctcaaccaggaaactgcgcagcatgtttcaaaggttgtcacatggaagcgttctgtctcatctctttcatcatcatctaagagtgcacttatgacatcgataatgaaagatgatgtggatgacagtaatagtgattttgttgaggaattcgccatggtatccggaagccattcttctacgttggacaggctacacgcatgggagagaaaactatatgatgaaatcaaggggcggatctgcacccggggctgcccgggatg

SEQ ID NO: 24253 - DNA, 507 bp, Zea Mays
caaatcagaaatgaactcgcgctggtatcatccctgagcactgatttaagatgtatctccagtactacatcaacgagaagggggacaaggtctacaccaccaagaaggagtcacctcttggggtgccaacgcagtctgctcacccagctcggttctcaccagatgacaagtactctcgccagcgatacctgttgaagaagagatttggacttctgccaacgcagaatccaggaccgaagtactgaagcttcaagtcaactgtccaacctgcgatgttctttttgtgtcaatgcttgttggttggaatgtactatcttcgttctcgaatatttgtggtccacttgttcaattttgaactaaaccgcgacaaataaaaaagaccactcatttgtccatttggcgtttacttagtgtaaataagttcggctgcacggtcaagctgcgcccggctgcaactgcagcaagtattttactgcttccaagtactgtagcttggtctgggaatgc

SEQ ID NO: 24254 - DNA, 3636 bp, Zea Mays
aagaaacggtggaaaaataattgggaaaacaaaatttcaaatcgaagtcttcctacacccagcgacgaaaaggctgcgacaattcgaatcaaaaatccatccgagtcgaatcgagccagcggaaactccgcggccgatctcctgtgctctcaccgcccgcctcccccgattctgcagcccctcgctgcgaatctggacgcgatttcgaggctagggtttgggaggctccggatcgcgagcccgtgcggaggcaagggtttggattcgggggttgctgctgcatgtcgggggtgctggattgagctactccgcgccggcttgtgatggtggtgaccggcggtggaagacgagtagacggcggcggtgagtagggtttgttgactgagttggggtcgagggtgcgccggccatggtgcggcttctcgggctgcggagcctgagcttcggcccggaggactcgccgcgggagatcccctccactgccgacgtggccccgcccgttggcagcagcggctggctcgtgcgcttcttcgactccgccttcttctgcgagtggattgccgtcagctatctctacaagcacgaccatgctggagtgcgcgactacctctgcaaccgcatgtacacgctcccgctgccggggctcgaggcctacctcttccaggtctgctacatgctcgtccacaagcccagcccttccctcgaccgcttcgtcatcgacacctgcgccaagtcgctccgcatcgcgctcaaggtgcactggctcctcgctgcagagcttgagctggaggatgctgacgatctcgacgggatcgataaggtgcaggagcagtgccaggttgcagcgaccgtgcagggcgagtggccaccgcttgtccggccttcacctccatcccctgctgccagtccgcgagaaacaccctggtactacaggaatcaatgagaagcaaagtggaaaaccaccattaccaattaatgcagtagcagagcttcgaaaaggttcttactatgcttcgttggaacttgttcaggctttatgtgatacatcgtatggcctggtagacatatttcctattgaggatcgtaagattgccctccgggagtctcttacagagatcaatagccagattgcttctgctgaaaaaaacggaggagtatgctttccgatgggaaagggcatatatcgagtggttcatatacctgaagacgagtctgttcttctgaattctagggagaaagctccttaccttatatgtgttgaagttttaaaagcagaagctcctagccactctaaaggatcatcagatgggcacaaattatcaaaaggtgggataccattggctaatggagatgtgcaactaccaaaaccacctccatgggcctatcctttgtggagcagacacgaaacacaaaactatgaaacagacagaatgctgaagtctacttctcaggttattgaccaagcaatggctcaactctgggagactaaagtaaaatttgtaaatgttagtttctctattgagaaacttggtcgctcaaggagcattgtactttctgaaacgggtcgtaggctgcgacatgatgctacggattctcatgatccacctggagattcgcaaacagttgctgatcagcctattgaatgggtgaaggttacgttgtctgcagttccaggagttaacatggaagatgtagatgataatgaaccaacacgaaagaaggaccatcgccgtgttcctagtacaattgccattgaggaagtaaaggctgcagcattaaaaggagaagctccacctggtcttcctctgaaaggagttgcgcagagcacccaaaatttagatcctaaggctactgatggtggggatccaaaaccaaccgatgctttggctggtgagctttgggctgtcaaacgcgaaagaattcgacggtcttcggttcatggaaaatcacctggttgggacttgcgttctattattgtcaagagtggtgatgattgccgacaggaacacttggccgtacagcttgttgcacacttctatgatatatatcaagaagctggtttaccactatggctgcggccttatgaagtaattgttacttcagcttatacagcactaattgagaccatccctgatacggcatcaatccattccgtcaaaagtaggtttcccaatatttcaagtctccgagactactatgtagccaagtatgaagagaattctccaaattttaaactcgcacagagaaactttgttgaaagtatggctggatattcaattctgtgctacctacttcaggtgaaagatcgccacaatgggaatcttctaattgatgaggaaggacatattattcatattgattttggtttcatactgtcgaactctcctggaggtgtaaacttcgagagtgcaccatttaagctaacgagggaactccttgaagtgatggattctgatgcagagggaactcccagtgagttctttgattactttaaggtgctatgcattcaaggtttccttacttgccggaagcatgcagaacgtattatacttcttgtggaaatgttgcaggattctggctttccatgtttcaaaggtggccctcgcacaatacaaaacttgaggaagaggttccacttgagtctaactgaagagcaatgtgtatccctggtgctctcactgatcagtagcagcatggatgcttggcgcactcggcaatatgattactaccagagagtattgaatggaattttatgattttccccacaggagcaacggattcattcagaaaccaattttcttgtatccttggagcaaaccatgggattgcataggtcagttttgggctgatctatgctggcaccccatatcagatttccaggagaggactaggttattgatcactgtgttttcatgtggcattgcacatttgtggtcaactagggaaacagattggtgccgcattgtactttcatgggaccccccctctgaaagagttgagaagtgtacagtcatcggcagtcatctagttagcgctttgtgctaggaggttgtgaccagtggagctctatttggcatattggaatttggaatccggctacattgttgtacagacctttgattgacgtagcttggagaggatgtaggagtgaacagggccatgctttgaagcgaacaagttataggcatatgggagctggggatcatccgagacagatgccgctcgaagtgtcactgtacttgttgtgtggtatccctatagcaccaaagtagatggagatgtgctttgctaaaaaaagataaagacccagtgttggccgctctcatatgtcactaggtctgaaaggaaattggccgctaatttgcgcgaggcctgtccttcagagaggtgctttgctgcatttgtaaattatcattactgtacagggaccatactgtcttagcattctgtttttaagttgttaagattttaattccttctttgtgggtgtcttggtcttcgaagatctaggtgatagcttgtttgactagcactatgatcagtgttcgaaagtacagttccatgtgtcatgaagaaaaacactgcaagatttttaatacatttttgatgtactatgagagcaaatttctatttcga

SEQ ID NO: 24255 - DNA, 194 bp, Zea Mays
tcaccagtggtttagacggcagtggaggtgacgatgagctggatcacgttcaccacgacgagcgcggcggaagcgagacccgatggcgcacgcgcgcgtatgggcacagctggtcaaccgagacgacgaaacccggggctgggcgcgacgtcgaggtctggaggtcccctggcggtaatggcagaccggcgttg

SEQ ID NO: 24256 - DNA, 2763 bp, Zea Mays
cgggccggaccggcccaatcgaagttttacgagccaaaacgtgaaagtgtcgtccagccagccacgtggctccggcagggcagagcgtttatccaactcggctctcagcgactgcccaccaccaccactgaggattcctcttccggcggcggcggcggcggcagcgatgctcctcctgcgcgccaacgcgctcgccgccgtaccggtgtccttctccataacgccggcggcctcctatagctgcttcccctggccgtcttcatccaccactgccgcgagctgctccgtcggctcctctgccaggctcgacgccgccgtgcagtacgacccgctccgccccggctccgatgcgtgggcccatcccgacggcatggtcaccgcggagggtgacgaggagaaacagcgctatgacacggagggggagtccaacgactgggaaggggaagggccccaaggatcatcagaccccgagggcatcaacgtgccgcgccagcgctacatcgccgtccccaaggaggccctcctcgatgctgtcctctcgcagttcgcgtccgacgacgacgacgccgcggacttcaagcgctgcgccagatgcttggacgccatccttcacgccgagcacaagaggatgctcgaggagatgcgcacctcctacatgctcacgcaacgccaccgggacgaggaagaggagcaggatgacactgacaccgcctcgggctcggactacgtcaacggcaaagccggctccggatttttcggcatcacccaactggatggcacgttgttccttactagaagcgtggacttgagaactctgctcggattgaccccagaccccgattcccagaccagagttgcttttgcaactcaatttcagcgctcattcatgaccctactacgcaatgctcagtttgaagaactctccgcacaagatctgctcttgacatatgccctaaataacgattacctgctcacgctgcccatttatgtcgactggaagaaggctgctcaatctaatgcaataatattcaggcgtggatacgcgactgagaggcagaaaggcctcctgttggttgagaaacttgattacttgcaatcaaaactcttgcagaatgtctttttcagcctctccaaacccttgaaaaagccagggaaatggcttaatgagttcctggcaggctttgaaaagatcaacagataaccagggatttcagatctggatagacaaactgagactatggcttaaagagcaaacttatgcagataattcactgctgttgatagaaagctcttcatgggacaagcttagttctgatcagttacctgatgcagatgttcctatttggatcgctgcacaaagggcagtctctcgttatgaaggaattttgtcacctgttggtcctcgtggaagactgttaagaagattgcttaaatggactggactaataccttctctgccagaagcaacgataaaatccaacaatgaaactaaacatcttgaaggacatgtgaggccaaactttctaccaagaattacccttgctaatatatgggaacctgcaagcagagaatcttgcaataacaatatctgggagatggtgaaagcttcttttcgtattctgtttgggaggtctactcttcaggaaccagcattccaggagttaatactactttacactgatgaagttgttccaagtgaaacgaaggacgagatggttccgctgcaactgaaaatttatgagaggattccgatcccagatttgccagtagttttcccccacaagaaattgtccttccgcatcctagatacagtaaggctagatattgctactgtaataggtctattggcatatgtggtgaactacaaatttgagagtttagcctcatctccgtcagctttttcttcttgatatagttgctggtactgcactcgtcatacttgttttccgtgtagcactgggctacaaacagacccgggataggtaccagcttctggtgaataaaaccctctatgagaagacattggcaagtgggttcggctcggtttacttccttctcgatgcttctgagcaacagcagtacaaagaagcacttttggcatatgccatgttgctctgcagaaagaagtatgaggtctcatctcgtgcaagcataagagatgcatgcgagcagtttatgcacgagaaattcgaggcaaagattgagatgccgatcgacaaggcaatggagacactgctgcggttggggctggtgattgagcttcccactgatggtgggtcgagcgtgattggtctcccatgctcggaggcatacaggatcctgaaaagccgttgggacggcttgctggaacaagatacagaacaaggctgattagaacgagacatgtacgttggtggcttggagtggagtgggatgggatgccgtgctggtacatactcgacgcgtcggcaaagctcactcttgtttgtatgtatacgtaccagttgttgcagcaagtgtatatgtgctagctacgtgcatgtataatcgtgatctagtttgttgtacacaaacgattgcagtgtatgtatatgggagcacatgtttttttcggaagactagccatgtgtctgtaagtttttctatttgtaagttggtttccatttataaatatagagcataaacactgttctgttagctaggtgagtatcctcataattatagcataattttagttttttatcatttaaatatatgaaattttagttttttatcatttaaata

SEQ ID NO: 24257 - DNA, 2593 bp, Zea Mays
gaaagatattttttttagtccgttttcaaccctactacgcctcggaatcagaggaaccgaacggtggaagagtacgcctcggaatcagaggagcagcgaggaagctgaaggaggggcgaatctaagcccaattgaagcatgagggcgtcgattaatcgtcccccgacgccgagcgcggaggaggatcgggacaagcagccttctctcggagagatcattaacatcaagttggtagagactggggagaaggagaagctaatggagctactccgcgagcgactcgctgagtgcggctggagggatgagatgaaggcactctgcagtaataaacacatgcatccaatgatgctgagcaagtgcttcacattcctaaggttctgatatttgcattagcatatgaattgtttgcacttcttgagaatgcatgatgttttttccccaacttctcagtggtcctctcaatttaaatgcctttgacgattacaactgaatgcatgtgaaaggcacacattaatatgtcacaaccccaaacattgttctatctttctcaaatatgtgcagctaaattctgaagcaaaagtgtgatatcctggcccaaaccttaatagggttgatagaatactcaacaagttgcatcttcttttttgaaagtctatctcgaaagaacctctctttaagagtgcttggcccagagtaatcttgagatgggtgatcgactgagaagttttctctgatgcgcatgaatgaggacaaagtgcacataaaagactcatgttggtctgtgtggatgatctatggtcttagagagctgtcaggagtaagtatcgttggttcgagagtgaacggggcattacaaatggtattagagccgactctcgcggtttcatggtcgtgtggcgctaggggttcggccatatgatgcatggcgcttgtgggcttagaatggtcacatggcatgacatatgatgacactagacatacatacatgaccaagaggggaggttactggcttggggttgaccgacgaagacgtcggttttctaagaggtggtggattgtgatatcctggtcaaagcttaataggattgatagaatactcataacaaaaaggtgcatcttttttttcaggagcctatctcgaaagaacctctggattaagtgtgcttggcccactaactggaaagtcttctcgggtgtgcgtgagtgaggacaaagtgcgcacaaagtactctttttgtctgtgcggatggtctatgatcgtagagggctgccaggagtaagtatcgccggttcgggagtagatggggtgttacaataagtagtttcttcatttcctcgtgaagaaatgacctgaaggggttcatttgcttcctaataaattgggaatttttgtaaatcttatgcaactcaagttggtttatcatggaaactacttatggttagttctctcaaattttctggtaaataaataattgcaatgattttactagatggctattgcagctgcaattattgcaacccatgcaagtgtgcaatatttgcaatttgtttaaatttcgtgctttccttttcctgaaattatattattttcaaatgaacttgtgttgcaaaaacaggttgtgacttgtgagtaacccactaaacacttgcacgctaaaatcttcttactgacaggattcatctggttcatttgctttgttcaaattctatgctaaatgctcattgcagccaatcaaatttatctaattctgatgtcttcaaaaccctaggcattggagaccgttttgcagtttgacacttaactgtagctacctcaaactgcctcattagagcattctgaaatgtgtgttacattacacactccataggttgacaataaagatggcgtggttttaactggataatatgtatccttcccaatgcttatcattctctttcgacgcgtctctgttttgtccttttgtgtactgtgtagggcctatgcaaggaagaaaggaagaaataatgtgacagtagatgacctcattcatgttattactccgaaaggaagagcatccgtgcctgattcagtgaaggcagaactcctgcaacgcatccggtccttccttatgtctaccacacttcggtagtcatttgtcgcgacggttggagcctatatgtaccattgtaggatcattgggaagtcgatcttgttggggaccaaaggtgcaggaaagcagtgcgtaggggaatattgtgagcatgaaaagaaacagtgtgatcttcatgacactgtcgacatgttcctcgtcaggcgcaggcggttggcgtaatttcaggtgtaccaatagagttgtaagttgtaacccctgaatactgtattgttaaagcaaccttccaccttgtaatgctacattgtactataactgctcagcgctgatgcttaatttcacaattagaaaacagaaacgcaatcttgatatagatgataacacgcatgtgaaacctgaaaccctgactgggtcatcttcaattgttttctttttggcatccgttcgttggttcggttgtgtgcgttgccatgtttgatccaatgggttcatggccactgcta

SEQ ID NO: 24258 - DNA, 1828 bp, Zea Mays
agtcaaggagaccgtgcctacgcttttcttctccctccattcattcacacaccacacctcccgaactccgaactacaagtttcgcttctcgtcgcgacgactgggcgagaccgccgccgccgccgccgcctgagttctttagaaatggctgatggtgaggacatccagcctcttgtctgcgacaatggcactggaatggtcaaggctggttttgctggcgacgatgcaccaagggctgttttccctagtattgttggccgtcctcgccacactggtgttatggtagggatgggacagaaggatgcgtatgttggcgacgaggcacagtccaagagaggtattctcacgctcaagtatccgatcgagcatggtattgtgagcaactgggatgacatggagaaaatctggcatcacactttctacaacgagcttcgtgttgccccagaggagcaccctgtgttgctcactgaggctcctttgaacccaaaggccaacagggagaagatgacccagattatgttcgagactttcaatgttcctgccatgtacgttgcaattcaagcagtgctgtcactctatgccagtggacgtactactggtattgttctcgactctggtgatggtgtgagtcacactgtgcccatttatgaaggatatgcccttccccatgccattcttcgtctggatcttgctggtcgggacctcacagactccctcatgaaaattctcactgagaggggttattccttcacaacctctgccgagcgagaaattgtgagggacatcaaggagaagcttgcatatatagctcttgactatgagcaagagttggagactgccaagaacagctcctcagttgaaaagagctatgagctgcctgatggccaagtaatcaccatcggcgcagagagattcaggtgccccgaggtcctcttccagccatccatgattggtatggaggctgctggaatccatgagacaacatacaattcaatcatgaagtgtgatgtggatatcaggaaggacctctacggcaacattgtgctcagtggaggtcctcttccagccatccatgattggtatggaggctgctggaatccatgagacaacatacaattcaatcatgaagtgtgatgtggatatcaggaaggacctctacggcaacattgtgctcagtggaggttcgactatgttccccggtatcgctgatcgtatgagcaaggagatcacttcccttgcaccaagcagcatgaagatcaaggtcgtcgcaccacctgagaggaagtacagtgtctggataggagggtcgatcctagcctcgctcagcactttccaacagatgtggatatccaaggaggagtatgatgagtctggcccggcaatcgtccacaggaagtgcttctaggttccgcaagttcctcattgttatctagtctcaagttatgcccccgtcatttctcgagatatgtgtggcagatttgcctgcgacgtttattttcatcggacctgagtcttctcggggttagcagctacctttgaatgttgtggctccctgtgcgagcgtgctgtgtcgtatcacctggtttgtgagattagttgttgtcaaacttgcttggtttgattggttgtgcgtttaagagctgatagttatatacatatattgctttgctataccgccgctatatctatgtagcctttatgtatgtatctggattctgaaatgcaagaatgaacttcgagcagcctttgtgttgccgatattttgtggtgccgttattgaacagtgtgccaactgaagattatacgaccgtggaagcctggtttggat

SEQ ID NO: 24259 - DNA, 3583 bp, Zea Mays
gtaaacccatccggtccaggagatttatccgagggcagataatttatagcattttttttctcgaacatctaagtttgtagcccctcctaacacccacaggtccctttcctcctcggttctcttgatggcttcattaaggcagggagaaaggccgtcaaaaacacaggcgtttcgtctcttctatttgcaggctgccgaggtggcattggaagaggaaaaatgttaagcagtgggtttagtggtgggggtgggcatggtggtaaaggcggtgatggcatttataatggtggtcatgtagagggtggatctgcgtatggtcatgctgatttaccatgtgaacttggcagtggcagcggtaatgtcagtggatcttcaactgctggtggtggtataatagtgatgggttctttggaacaatctctgccgaacctctccctttctggctcgattgaggcaaatggtggtaattttactggtttgatgtctcatgccacaattggaggacctggtggcggttctggtggtacaattcttctttttgtgcggacattactcttgaagaaggactctgtactttctagtgttgggggagttggtggcaatggcagtggtggaggtggagggggtcggattcacttccactggtttgatattcccactggagatgattatattccttttgcaaccattaaaggaacaatacttgcaagaggaggagtcagtgaagggcaaggtttctctggtgagaatggaaccatcacaggaaaggattgcccaaaaggtctttatggaacattttgcaaggaatgtccctcaggaacatacaagaatattactggatcatctaagtccatgtgctcaccatgccctccaaatgagctacctcgccgtgctgtatacataagcgtccgaggaggtgttgctgaacccccatgcccatacaaatgcgtgtctgatagatatagcatgcctcactgttttactgcccttgaagagctgatatacacgtttggtggaccttggttgtttggtctgcttctgtctggccttcttgttttattagctcttgttttgagtattgctcggatgaagtttgttggtactgatgagttgcctggaccagcaccaactcaacagagctcccaaattgatcactcttttcccttccttgaatcactgaatgaggtattggaaacaaacagggcagaagaatctcactgtcatgtgcacaggatgtatttcatgggcccaaacaccttcagtgaaccttggcatctcccacacaccccgccagagcagatttcagagattgtgtacgaagatgcatttaacaaatttgttgatgagatcaatgctcttgcagcctatcagtggtgggaaggttcagtttttagcatcctatgtatactttcatttcccctggcatggtcgtggcaacagtggcgcaggagaaagaaattacaaaaactacgtgaatttgttcgttctgaatatgatcattcatgtttacggtcctgccgttcgcgtgcactttacgaggggctaaaggtagctgctactccagatttaatgctgggttatttagatttcttccttggtggggatgagaaaaggactgatcttcctcctcggcttcatcaaaggtttccaatgtccctgatctttggaggtgatggaagctatatggctccattttcacttcatagcgacagagtggtcacaactcttataagtcaggctgtgccatcatctatatggcatcgtcttgtagctggattgaatgcccagttgcgtttggttcgccgtggaaatctaaacacatcacttctccctgtgctcaaatggctagaaagtcatgcaaatcctgaattgaacacgtaccgtgtgcgtgttgaccttgcatggtttcaaactacagcattaggttaccttcagtttggtcttgtccttcatgctgtcgggggagtggtggctgctgaactccaggatggctgtacaagtaaaaccgatcagcattcagtaaaccagaatacatgcactgactctcaaatgggccactcaaggaccaatgatgttctgcgtaaaaggataactggcaccattctcaatgttgacaacttaaggatgcttggtggcaggagaggtttcttttaccttctctctcttatcttgcacaatacaaaaccagttggacatcaggaccttgtcggcttagtcatctcaatactgcttcttgcagatttcagcttagtcttgcttactttcctccaactatattcatattctatggtcgatgttctgttagtcttgttcattcttcctcttgggatactagcaccatttccagctgggataaatgctctttttagtcatgaacagcggcggtcagctggtcttgctcgtgtctatgccttgtggaatattacatcactggttaatgttgtaagtactcctccatcattgtctgtacctggattttgctctaacaagttcattaggttgccaagttcagattcatagggagttgtaatcattgctgtttgcttgagcatttgttggggattcaatattgccattaagagttcaagcatgggcatcgatagaggctgaatgctggaaccttattcctacccccagatttgtatcatgtaatactcattgcagcgctgtttttctcagtggtttgtcaggttgaaatgtgatctggctggttttgttttgaacttttcctgattttccatttacatacttgcacatgctgtacattttttcacatgaagggtcattactgactttcttcactgtagatacaggaatcatgttttatggtttttacgtacaattgctctatcactcgcaggttgtggcttttgtatgtggatttctgcattacaagtcatcaagcaaaaaacatccaagcatgcagccgtggagttttggtggggaggaaaccagctggtcgctattccctataggacttgttctatgcaagtgcattcaagcaaggcttgttgattggcatgtatctatcttggagatccaggatcgtgcagtttatagcaatgacccaacaatattttggcagtgaaagcatttcgatttacaggagttctcatgaggagagcttaatgcaactcaagtttttgtgggagttgataaaaggaaggctatggagttagtctgttctttgtccgcccagtcaggggaagcatgtacaaagtagatgctggtaattgcctgcctatatagacttaatgacttacagtgcatggtcaaccttttgtccagtcactcacccagctttgttttccttgtacataggaaacgggtttaattagttgaccgattcgttgtaggatttaggatttagacaccatagaattatagattacccaaggtaatctcaaagagatggtggaaaacatatatacttcttttgtttaaagctttgtcttttgcattgatgttgagctgggaaacgggtgaggcatcaaatagagcttttttcccctctgttaagattaagacaaatgttaacgtgctgatgttttattcaagatctggttgccatatgttcccgtga

SEQ ID NO: 24260 - DNA, 581 bp, Zea Mays
tttatgtattgtttcttttcaatcaggcaagttttacttgataatgtggacatcaagacgttgcaattaaagcgacttagagaccagatcggattggtgaatcaggaacctactctttttgcaactacaattcttgagaatattctttttggcaaacctgaggcgacaaaggcagaggttgggtctacgactacttccgcaggcgctgaaccgcgctggtggcaaggctggaaacaagggtgctgaagctgctcttacttccattgagatggcctctctgttccggcatcacttaggctgacactttgcatattctggtttctatacacgagctcacaagacatgtttctaaacctggcacaatgaataattgtcaccatgaggtcatgaataagcacaactgtcacggcgtgtgctagggcagtggggctgtcgccaaggacatgcagcttgtgaagcagtgctggagccgtccccatcgccgagcagctcgtgagggtaattcaagcacgctaatgcagtctggtcctacaatagcgatccttggtcttcacctacatcttcacctaccgaacatcagg

SEQ ID NO: 24261 - DNA, 1509 bp, Zea Mays
gaagcacagttaagtggccttcaaaatttggatctctgcacctccaagggttggtgcatcagaatttattgtgccgtattgcaagttcttgaagagcttgaactatcacttttcagttggaaccagatttaaagttggctgcgagaatgaagatgctaacgagaggtcctttggattgatcataggtattagtgaagttgatcccatacactggcctggatcaaaatggaaatctctcctgataaagtgggatggtgctactaagtacagccaccagaatagagtatctccatgggacatcgagggagttggcagctcagtttcagttactcaccgactttcctcttctgtttcgaagcgaacaaaactgtgcttccctccaagcgatttggacacgccaattctagatggaaacggtcgtccagactcagtggaaactgaacgtttccacagggtcttgcaaggtcaagaattggtgcactctagtattcatggtactgcatgctctcattcatcagatagccccagatgtcaaggctcttatggcaggagattctctgctgatgcgtggaactgcaagatgaatgatgtaatgagtgggcctcgacacctaaatgccactgggtttgcttaccagcccctaggcttcagtgaatctgtcaaattctcagaggtcttgcaaggtcaagaaatgtctcaggcggttccttccttcatgagatctgctttcaactctggcacgcagaatggcagggttcgaccatttgattatgtgcagagatcagatgcaactcaaggatacgctctccagcagtttaatctgccagcaacagaagtgcattcgccctcttctgttcttatgtttaaccaaaccatggtaccacatgctgagctagatggtgcgaccaaccgtgaagaagtacatggcagcaggtacttgtcatccaatgcaatagggagagaagctgaaccatggccatccatgcagcagcaaagagcgagtgtaaatggaagcgagcctctcgacacaactgaagcctcagctcctgcaaggaacgctgaatctggatcggtcggcaggggcgcggggcgaagcaactgtaagctttttggtttctccctgactgagaagatccttggaacggatggtggtggtgtgaaagaagggaactacgaagtggaccgtcaaactccccgggtgctagacttgtttgggcacggttctacgcctggagctctgcatgctctctgtgctgctcccttgggaatatgatgctgttctgcctagttttacaacagttagatttatgtaatccttcagccattttcatcgcgttgtacttgaccaatatgtccagcgtatgatttccagttttaattgtatgctgatgctacatatcctctcttgagatccatgcatgagaattctggcagaatgaacagaggtaaattgatgtccagctgttttctttatgaacaaataggtaaattgatgtttaatttcagaat

SEQ ID NO: 24262 - DNA, 2864 bp, Zea Mays
ctccctctctctctctcttggagttgctgtgaaaatacgacctatcggggacagctcgatctccctcccttggctggagcctggagccgacggagcagaacgacggttccttgcggcggcagcgacctcgagctgagggcggcgagaaggcgggaacaactcgatctccctttgctagctagctagtcccgatggagccgagggttccttgcggcgacggcggccccgaacctagggccgcgagaacgcatcgacgggagggcgagcgaaaccacgtcctcgatgcgcgaatcctggagcctcagcgacagagatcgaatccaatcaggaacatctttcatctattaactcaacgagaggtctcacctcgattgaaacaccatgctaaaagaatgtggaatgagtccccaaaatatgatcctgattcaattgagttaaggtctgcagatgctaaacttgatattttttcatgggcagaatcacagtccctgcatagctggtctgccaagtattgccctcttttgccacctcctaggtcaactattgcagctgctttcagtccagatggaaaaacacttgcgtccacacatggtgaccataccgtgaaaataattgactgccaaacagggaaatgtttgaaggttttgactggacatcgacgcactccttgggtggtcaggtatcatccattacattctgacatcctggctagcggaagtttggatcatgaagttcgtctatgggatgctaatacttcagactgtattgggtcacaagacttccatcggccaattgcttccattgcatttcatggaagtggggagattttggcagttgcatcaggtcacaaattgtacatatggaactacaataagagagatggcacttctgtaccagccatcatactaaaaacccgccgctcgctgagagctgttcattttcatccgcgtggggctccatatcttctaacagcagaggttaataatatagaatctgcagactcaccgctgactctggcaagatcctctggatatctaaattacccatcggccctgctggtgacaaacactaattctagattctgtacacttcctgagtccaatgtggtgtcaccttgcttactgtggcctgcatacctcagagatggtggaattttacatgtgctcggcaatgacagtagttcaaccattgtgcagcagagatcatcattagttcaaccttccacatcagatactgcaaatgtacagcttgaacagtttgctacccctatggatgtatgtccgggagagccaacttcatctaatgacatacccgatgcagtaactgttcctacttcaaatggaaatgaaatgcatggtgctggaggccagtctaactcaagactgcagggcagcagctctactagtaatcttgagaggttcagtgctagagatgatttgcaagtgtcttccctgagcaggactgacccaatcccattaacagcagggccttcaggatccgatttacaccgtgctatgccactaaatatgctcctcactggcggattagatgttcaaatgttcctaagaaatgtaggaagtggacagcaggatcattctctcttcggcgactcacgtaactgggaggtaccatttttgcagggtttcttgatggccccaaaccatgcaggtgcttcatcttcgattccccttaccactggcagttctaggggaccaaatcgacgctatgcttcacgctctgtacctggggttgggaatttgctcctaggtcctcaaattgacgaagctgaagctcatgctgtttcactaggtgctggttctgaaatcactgcgtccatgcttgctcctggtactgaattgccttgtacagtgaagctcagaatatggcggcacggtaccaatgaaccatgtgttcctttagaacctgaggcatgctgtctgacgatttctcatgccgttctctgcagtgaaatgggtgcccatttttccccatgtggacgatttctggtagcatgtgttgcgtgtttgttgccacaaacagaagacgaccgtggtagccaattgcctgtgtcttacgaaggggctggatcatcaccaactcgtcacccgcttccctctcatcgagttatttatgagctccgggtttattcccttgaggctgagacatttggggatattcttgcttccagagcaatacgggcagcacattgcttaacatccattcagttctcacctacatccgaacacatacttttggcatatggtcgtcgtcatagctcgctccttaggagcatagttgtggaaggcgaaaatggggttcccgtatatactattttggaggtatatagagtttcagatatggagcttgtgagagtgcttcctagcgctgaagatgaagttaatgttgcatgctttcatccttcaccaggaggtggccttgtttatggcactaaggaagggaagctcaggatccttcagcacaatggcgcagacatgacaaacatgggggtgggttgcttcattgaggaaaatatggttgagatccagaggtacgcattggaatgctgaagaagcttcaccacaccatgtgtttttaggcttacttccatggaatttttttctgcaggcttcatctgtgtgatccatccaaggggaaacattagatccatctctaactaagtgccttggggattggagccttgaattcagaaggtggtcttaggggtgtgtggagcaaccaaagagtggaggcaaacctaaagatactggcggaacgaagaagtccaaatggctattaaggagaagaaagaatgctacatacgtttataccatgacaagagtgtggacaacatagagaaatacaag

SEQ ID NO: 24263 - DNA, 2494 bp, Zea Mays
cgcggaaatccaacccgccacgcgcatgtgacccatccgatccgaccaccctctcctctcctctcttcctcttcctcttcgtcgcaccaccaccaccaccaccctccctctcctcgcctcccaaaaaaggcgcggcaccaaaaggcgcgagagagaggcacggggaccgcccgcctcgctcgcctgcgcaccggattcgtcgctgcggcggtggttgcagcggcggcggcctggcggggagatgtcttcgcgctcggggtccacgggcggagggagcaccggcggcggcagcagcgcggggggaggcggcgcggtgccgctggccgtgctgctcaggcgggaggtggccagcgagcgcaccgcgtcggagcgcccggagctgcactggggcctcttcagccaggccaagaagggcgaggacttcaccttcctcaagcccgaatgcgagcgcgtccctgacgtcccgtcctcctccttctccgccttcggcctgtttgatgggcataatgggaacggagccgcaatttacaccaaggagaatctcttgaacaacatcttgagtgcggtcccagccgatctgaacagggaagactggcttgctgcactcccaagagcgctggttgctgcattcgtcaaaaccgataaggatttccagactaaagcacgttcttcagggacaactgtgacatttgtcataatagatggattggtcatcactgttgcatcagttggtgattcccgttgtgtactacaagctgaaggttcaatttatcatctatcctctgatcatcggttcgatgcaagcaaagaggaggttgatcgtgtaacagaatgcggaggtgatgttggaaggctaaatgttgttggtggtgctgagattggcccccttagatgttggcctggaggtttgtgcctatcaaggtcaattggagatcaagatgttggtgaatttatcgttccagttcctcttgtgaagcaagttaaggtatcactgtttaattcttcacatcagcttcgcaggactgcacttgttttgctttgaaatcttatgccttaccctttcctcttgatctccaatattactaataaagttacagtttctccaagtctctcctaatatgtgtagctattcagcattatgtcaatatcttcagcattcagaccgtattctgcctcataatatgtgtagctatctactgcgggtggccgactcattattgcaagtgatggtgtttgggatgtcttgtctccagaagtagcttttaactgttcacgtgaacttcctccagtgcctgcagctgagcaaatcgttaaaactgctgtgcaatcaaaagggctgagggatgataccacctgtattgttgttgatataatagtagaaaaaaacaactcttccatgccacttgctaaaaggcaaccaggaattggtgtcttcaaaaatatgttcggcaagaaaaaatcatcggattcatcatcccattcccattcagatagagaatatatggatccagataacgtggaggaaatatttgaggatgggtgtgcgcttctttctagacggctggattctgaataccctgttcgaaatatgttcaaactgttcatatgtgccatttgtcaagtagagttaaagccaaaccaaggtatatctgtacatgaagattcatcacaacctgggagcttgcgtcgctgggatggtccattcctttgccagagctgtcaggaaaagaaagaagcaatggagggaaagcgtcgttcacgagattcatcaagaaacagtgggtaagtgaatagttgacatgtgtagagtgatcaggtaactactgaccagcaacaccccagcaccaccattttgcagcatttcttctgttgtggcacttccttgatcacattcacatgtaatatctgggagttctgatctagaactagattgaagtattgaattgctactgtggaggtggctgctgcttatagctctcatcccaagtgaggagcatgccttgtcctcagcaaggtccttgcccaggaatgtaggcagctttactcagccctttgaccttgatggcacatacaggttgaaagattaacgatgccaaaatgatatggcttgtatattctaaggtccattgctgcgacgatcttcttatagagttctgacaaatagctatggcactgtttctgaattagaactaggcgcttacatcaattcttccccgttcgagctagccttaatttatggctagagaccttagtattatcagtcctgctgaggtccagccttcgctgacaccaatgtaattgtcatctaaaatattctttcaagcagctgtgattcatcagtaagacattagttgtcatgtacaatgtacaaaatcttgctaacaagacagatctgtttcgtcattacttggatgaaaatcaattggtgtctcaattggaggaaagaaattgttctaataaatgtggatggtagacttgcttgagtcactcgaag

SEQ ID NO: 24264 - DNA, 192 bp, Zea Mays
tttgaaaagagagtcaaagagtgcttgaaattttcgggagggaagcggatgggggctggcgacgcgcactggccgtatgcggaacggctcctgctggtccgccgatcggctcggggcgtggaccgttgtcgcccgcgccggcggccaaagcccgggggccctaggcgcccccggcagccgtcgtcggcgcgg

SEQ ID NO: 24265 - DNA, 3705 bp, Zea Mays
accaactgtgacaatccagtcaattatgatctctagcccccctccttccggctcctgtcatcctgcgcatgccatcggggcgctcgccgggacaacatttacctcgacagcgacgccgccgctctccctcgacgagagctcgtagctgtgtccgcgcaaggcttactcctttcttggccccgaccccttctccccgccgccggcgccgcgcttggcttgatgctcgacgtctgcgcgccacacgggcccgccaagctcccggctgcgtttgtcgccggcgtgcgagtcgcctgggtcgccggcaggtggtggtggcgatccgtggcggtgggggcggcgcgccatggcgtcaccacgcgggcgtcgttcttcgggctcgattcccagacaagggacccgtcccagttgttgtggatcggtccggtgcctggtgacatcgcggagattgaggcctactgccgcatattccgtgctgccgagcagctccacaccgcagttatgtcagcactttgtgatccagagacaggagagtgtcctgtacgctatgatgtggaatcagaggatctgccaatcctggaagacaaggtcactgccgtccttggttgcatgctggcgttgctgaaccggggaaggaatgaggtgctctcagggagatcaggtgttgcaagtgctttccatggatctgtggacagcacctctgatatgatcccaccactcaccttgttccgtggagacatgaagcgttgctgtgagagtatgcagctggcacttgccagctaccttgtaccgagtgagcccagggggttgaatatatggaggaagctgcagagattgaagaacgcttgttacgatgcaggtttctcaaggcctgatggttatccatgtccgacattatttgcgaattggtttccggtgtacctttcgattgtgtcagatgattcaggaacagatgagcccgaggttgcattttggaggggagggcaagtcagtgaggaggggctggcatggctactagaaaagggattcaaaactattgttgatctccgggaagaagatgttaaagatgatttgtacctttcagcagttcaggaggctgtctcatctgggaagatagaggtggtgaatatgctggttgagatcggaactgcaccatcagctgaacaggttaaacaatttgcagctcttgtgtcagatggcgcaaagaagcccatttatctccatagcaaagaaggtgtttctaggacgtctgcaatggtctcaagatggaaacaatatgttactcgttcagagagattggctgtccaaaatcactatataaatgggaatggtaaggtcctgacaagtgacaagaccaagcagcacacgggcagcccaagctcctctatgaatcgaactgaaattggtatggtaacggaatctgataggaccatgaacaatggagaatcatgtgagatagacatagagacagctcgtcataatctggaggtcactaatgccctttccgatgaccaaagtactcaacaaggtgaaatgcttgggactgggacagaacccttgtcaaactttaaactggagagtaacccccttaaagcacaatttcctacttgtgatattttctctagaaaagagatgagcaagttttttagaagcaaaaaggtttatccaaaatctgttctgaactcaaggagacaatcaagtagcttgctggtctcaaggagaaaacaaaatttcagcacagagcgtaatggaaccattgactatgaagcagcagagttcacaattttagaaagttcaaatggaacatcatttgacaatgattatattctatcagtttcttcaggtatcactgatggaaaaccttccaacaatggagccttttcgttaattgagaaaaaggaaagggaagtttcagtcactacttttgatactagagcatcggcgagcagttctaatggaaaggttcaggttggatcacaaaaaactgctgaaaagaatggtaccccttatctggagagaaacaattcaaataatgttgatggaagtatgtgtgcatctgcaactggtgtcgttagactccagtcgagaagaaaagcagagatgtttctggtacgtactgatggattttcttgtactagagaaaaagtaacagaatcatctctggcttttacacatcctagtacccagcaacagatgcttatgtggaaatctcctccaaagactgtcttacttttgaagaaattaggcgatgagctgatggaagaagctaaagaggttgcttcatttctgcatcatcaagaaaaaatgaatgttcttgtggaacctgatgttcatgatacatttgctagaattccaggttatggttttgtgcaaaccttctatactcaagataccaggtacaattaaacatttatgtttgtgataagtgcgaatgtgcatatattttcatgatactatttactaatgtttgtgtttcagtgaccttcatgagagagttgattttgttacatgcttgggtggtgatggactcattttgcatgcatcaaacttatttagaacttctgtaccacctgttgtctccttcaatctcggatctcttgggttcttaacttcacataatgtacatttcaataatctctgagagagaatttcaccagattaagccgtttttgtgtagaaactaagcatattatcattttgttcacctcagttcaaagatttcagacaagactcgagagatttaatccatgggaacaacacacttggagtttatataacccttagaatgcgcctaagatgtgagatctttcgtagtggaaaagcaatgcctgataaagtgtttgatgtgctgaatgaagttgttgttgatcgaggttccaatccatacctatcaaaaattgagtgttatgagcataaccaccttatcactaaggtgcaaggtgatggggtgatagttgcaacaccaacaggcagcacggcatattctactgcagctgggggatcaatggttcatccaaatgtcccatgcatgctgtttactccaatctgccctcactcactgtcatttagacctgtcatccttccggattccgcacggcttgaattaaagataccagatgaggcaagaagcaatgcatgggtttcatttgatggcaaaaggcggcagcaactatcaagaggagactctgttcgtatatccatgagtcagcacccgctaccaactgttaataaatctgaccaaacgggtgattggttccgcagcctgatcaggtgcctcaactggaacgagagattagaccagaaggcactatagacactagaatctttttttattttttgatgtacatatgtaaattcacgcacaaatatagttttgttttttctgccaacatgtacagtgcgtaacaacaaagaactttgcatatcaaggatctaatcaggtggcttgagggataaatgagagttaataaaaaattgctcaatagaatcttgtttttcaaaacttcaaccaagtttttaacacatcgaaaatgacaaataaaaaaatgttaaatgagtagcccacaagcccaaaacaatggcttcatatttttaatgatgactgacgaacaaatcagagtaacgaaacctgtaggaaacaagtacaacattgaaaacctctaaaataaaaaagcacatcaaaagtcttcgaaattagaaaaacatgac

SEQ ID NO: 24266 - DNA, 2074 bp, Zea Mays
gcgcccctcctccgtgcgtgccccgcccccgtccttcgctcacccgatgccctgccacctccgccgcgatagcctcccccacgaaatgcccccgtgatgttcgccccgctgcgaacccctccccctagatggaataagcagaggtccaatgcggatccgcggcccccgaccctccaccttggtgtgacagtcgcggctccgtggaggcaacttgctccctcgctcccacctcccacgccgccactgttgtcgccttcagcacgctgcccagcccacgccccccccccccccccgcctccaaatgtggatctgccaccccggccctccaccttggtgtgccttcagcacgccaccactgctgtttgattccttctcctttttgtttaggacgtcgccaaattccatccatctctcagcgccgtggtctcccgatgtggatgggggaagattttcctggagatcgaattgtccttttgtgatcctaggtttgatacagtgctgcaattttctgctctcccaccgtacataatgcgctcgaccacattaattttgtcgttaagagtcaaacgatggtttgtgttcacaactgaaaccattggattttgtttttgacatcctcaaggaggaattaaccgagagcttgctgccgcaaagaaggttgctttgctacttctatgaatcttcggacttaagttcatacaagttcaaaaataaggacttaagttcataccacatctttttctggatgtgcactggcaattctggcagatttctcacatctgagatcgggagaagaaagcattttcaaggttgttccaaccctcaggagaagggtgacagaatacatttctataaccacattctgttattttccttataaaagtgagaatagccgatctgttgatgtgcttggccttaagactgcttttgcaaccttcatgggtaaggcaagtaaccttcctcctttgcctctctgatgctatgtgttatgtaataatggcctaaccccatcggtcgcttagtaagttgtcttgtctgttattaacttacattaaaattctgccacaaattcccatcaacaagaaaaacaagaaagatagctactaggagaagctttaatacgctcgatacctggcatgatgagttcctcaatcaagtaagccacatctcccacgagcatgtatctttctggatgtctggttacaatagcagctactcatgtggttgagaataaaatacaaaagataaagataaatattcagatgatcgtcagtatagtctcatccacgacaagttcattatgatttacatagacttcatttttacacccaaaaccaaaagaaaataaaagaaaaccggcaaaaccttgcctacgttagtttcaggctggcccatcggatcctcaatgctttctgttcattttggtcgggaacaagattgatttagatggcgggagcaaacggatggtcagttttcctgaatgcgcaagctttctcatatatatatattcgaaataccctgcagtctctttgcctttcccgcaggttccagagaagaaagcgagggaatggtgcgcctccaagggcgatattccatacttcgagacctctgcgaaggaggaccacaacgtcgacactgctttcctatgcatcgctaggctcgctttggagcatgagcatgaccaagacatttacttcaagacagttgtggaacaagtcccggacactgaacagacaagcggatgtgcttgctaggagccagccatttcctggaaggctggaactacgtggatgttactgaaggactggcccccgatatgtttccctcccattttttcttttgagctccagtaactttattactattctgtgttgctctcactggattttagcacttctgtaagttgtcatcttttaaagttaagaatttttacataagtcttacacatcgaacaaatccaccatgtacattaagatgcaatgcttatcgaacactcaagtattatgctcttgtaacctaaattaatcaaaattgggcaatgatcagcaaccgacttgtgctaaggtagaaaaat

SEQ ID NO: 24267 - DNA, 2448 bp, Zea Mays
gccagcgcgttcttcgtgctctgtcaatctcgcagcagcgccactctcttccccacttccccaccgtggtccccccttccccacccaccggagaccgcgccattccccccttccccaccgcgaccaccagaccggcatggcgcatacctgagattgcgctctccccaccggatccggcttggcgcacaccggagaccacgcccttcacccttccccaccgtggccaccggatcccgcacacgcgcgctccggcatggcgcatccacagcacgaacgcccggaatggagcagcgtgcgtccatgtacccaccggagaccaggccattcaccaccgcagtgcccccaccctcatcatcctcgcgtccccccgtcgctacagccgccaagttggtctgcagggaggtccccccctcaccgcgccacgctcgccgcgcccgccgctcggtcctcgccgcgacatgcgcctaccctcacctacacgatgctcactcctccgcacatcgcaaagccgaaggtccacgccccctccgtgctgtgaccccctcccttgtgtgcccatgatgctggaagggaagtcctaccttgtgccgcgctccctgctaagctcctgcgagatagagacacagtgggcgtacttcgcccacgaggtccacggcggcaagcgcctggcgccggaagactgcgaggtcgaagacctggacaaagctgacgtcggcggcaagcgcagcaagccgccgtctccacagccgcacacgccggacatctccgagggtcgcggctccagccgccatgcctccggttgcggagagcagcagggcactgggagcaaccccatgaattcaatcgaccgtgacctgaccctcaatagcctcctccggactattgaatagggcaaggaagatgtgtgttctggggttttcatggatggcaagttctatgtgatagatggtgtggctaacaacaacaaattgctgactttttgcaggtgacgaaaaggtaaggggtttcgatcggagatggcagcggcggcgaccgcacatagagccagcttcccgttgcgtctgcagtagatccttgctggaagctgcgccgtcgcacctgtggtcaaggtcgagtctgagccgattttgtggggtcctagatccagacgtcggtcgacaggtcgctggcgtcagtggaccacgtcgcctatcgcggttgtggagcggagctgtgagcagatcccaagtccaatgacgaagagggagtctcggtagggtgcgataaggcgcgatgaggtcagacacggagcacggacgtgtcctcagtcgctgttgtcatgtgtcagtggatgcagtcgtcgctatcgcccacaagaaacctcgcttcgtggaaagattagtatttaacatttggatgaggaagtcaaggacaccgacctcaagcgctctaccaggaagtccgaggaggccgtcctcgccgacctcgcttggctcggcctcgaatgggaggaaggtgctcataaaagaacacctgtgatgcctagaaggaaccctccaccacctccaagagagcaatctaatagtttttttaccgcatggaagctcaaaggcaggagatgcaccgttaggtgcattttgggtgacataacatgcacgaggtgctcaagctgtagttaacaggaaccctttgtttgatggggagtcaattaaggcatcactgtcatcaaagcagaaccaaagctgggtggacaccagcatcagtattcctggcaataggcatgatcattccggtcagatgtcactgacaagtaaagcacaaaataactctttgtccaataatgtttttagaggtctctctgacacggagatacaaaattcttggaaaagtagagcagaacaacctcaacccgagccaaaatgtgagaaagacccatttaacagctttgttgcagattttgacactcacaatctcaacattgccgttggtaaggcatccgaacttgaacttgaagtctccaatctaaaggagcagttgaagaaaatcacattagaaaaggctgagatgacaaccaagcatgaaaagttatctgcaatctgccgatcacagcgtcaggagatccaagagctgaagctcactcttgttgagccaacgcctccctcaaacaaagtcagctcaaggacacaagattctggatctcaggcgtccacattcgaggatggtgcacagttctgccatcgcgctccctccgcgctccatccgtcctccgctctcgatcctcgaatcccgcggctccatcctcgaatccagcgctccctccgcactccatccgtctccctccatgctccatccgtcctctgcgctcaatcctcgaatccctccgtgctccatccatcttccgccgcctctgtgatgaacacgggaagcgtacaatgacctggtgctggcgatcttggcatcagtgatggg

SEQ ID NO: 24268 - DNA, 2061 bp, Zea Mays
gcctctcccacactccccacttcaccttcgccctcccccgcctgcgagcgcgaggcgcggaggggctagcgcgctagcggcgccatggccctgaccgacgccaccgcgttcccctacggcctgcgggtcctcgtcgtcgacgacgaccccacctggctcaagatcctcgagaagatgctccgcaagtgttcatacgaagccagtgttgctatccaaattctccgggagaggagaaacaagtttgacattgtaatcagtgatgtcaacatgcctgacatggatggtttcaagcttctcgaactcattgggcttgagatggatctacctgttataatgatgtccatagacggagagacaagtagggtgatgaaaggtgtccagcatggtgcatgtgactacctcctcaagcctgttcggatgaaggaactccgaaacatttggcaacatgtgtataggaaaaaaatgcatgaggtgaaagagattgaaggtaatgacagctatgatgatctccaaatgtttagaaatggtgtagagggattcgacgagagggacctatttatgagagctgactctgatactatgaggaagagaaaagacgtgaataaggaccatgcagatcaggactcaagtgatggagctactgttaagaaggctagagttgtctggtctgttgaccttcaccagaaatttgtaaatgctgtcaaccaaattggatttgacaaagtcgggccgaagaaaatactggatcttatgaatgttcctggcctgacaagagagaatgtggccagtcatcttcagaaataccgcctctacttgagtaggttgcaaaagcagaacgaggaaaggataatgggtgctgctaggcaagatttcaatcaaaagggaccatcggatcatcttaacctccgaagttccttccaagagcaaccaggcaacctttccaatggatgtcagcatagttctcagaaggtcgaagctcagaccaacattctcgatcctcatctggacgacacgaagacttcaatgcccttgaaggtgccagataaaaatggaatttcagcaagtgatgctgttgaccctcacaatatcaccactgcttcacctttaagtggggtgttctcttttgaaagaatgccagtgaatcaggacaggaagctatcagaaaccatgatcttggaatgtgagtcctggagtggaagtgtgccaccaaagcagttcatgcagtatccaaagcataaccatgagcgctgcgaccttctaggagactattcttgcttgcctaaaccggacttggagcacccaattgcccctggtcatctgtatgccccaccgccagtaatttcgatgagttacaatgtggagaaagatgtcagagacttctcagatgtaaaaccagatcttcttggctgtatgaagtccttatcaccagcactgacatgtacagttgagtcggtttctgctcaacttagtgacagtgttgtgacctcaactaacagtgaccggaagttttccagcgtggaggggttgtccagcattaaagattgtgactttgatcaggaaaggaacggagctattttgtttacttcagaagaggcaagtatattatgcggcactgattttacttgtctacctgaagacctgtccggctatcaacttcaaggtgtctccttcgggaataaaggattgaacagcatcgatttatatcagtgcaatgatacaatgttaatacctggactgcagaataattggtatgatgatgatgtagagtttagcagtgaaaccgtggagttcccattgctagacggaggcctgtttgcataaatgcctcatctggccctatctttcaaccatgcccttatgtcagcagggatgatgttcattggtatgttcccctatagcgcctcctgtagggctatatttaacctaacttgatcctgtggtggaaggatttaatttgtagtctcgccacttttgataattgtctgtattatagactgtgccatggcacaatgactgcaatatatactcttcacggtgatcaaaattacatatgaagactgt

SEQ ID NO: 24269 - DNA, 4097 bp, Zea Mays
gaagtaccatgagggactcctcaagttgcaacaaaaagactatgcaaaagctcgtgaacttctcgaggatgttttaaaggacccactaatatcaaatgttcaggctgataacattggcagtgatcagcatttgctgcagctaaggtttttgacattgaaaaatcttgcatctgttttccttcaacaaggttttgagttctacgataatgctcttcactgttacctacaagctgtagagcttgattcaaatgattcagttgtctggaatcatctgggaacactttcttgttcaatgggtttgctgagcgtatcaagatgggcatttgagcaagggcttgtatgcagcccaaacaactggaactgcatggagaaattgttggaggtgcttatatcaattcgtgatgaagtcgcatgcctttctgtagcaaatttaatacttaatagttggccatcacatcatcgtgctttacatgtgaagaagaccattgaatgtgctgaaccggtaccttttgcacctcgtggtattgacatacttgaacccaagcatgcaaaactcatcttttcgaataaaagaaaatccgttgatgatgaaatctgtcaagaaatagggacaaagaagagtaaacacagtgctacattgcaattgaatgaagcaaaatggttggcccttttagatggtatcctaagcttaataagtgcaaacaccgagaaggctggtgaatataattgctcaaatactgttgataggtgttcaatcagtgagggtagtgccaaggggcttgcttataacattatagacgttgtcatatctacagatacattgaaaagtgtggaaactgctggtggaaatggaaatgattctcaccatggtgagattctgccatatgattgcaaagctacagttaaagagaaagatggtaattcagatagggaacatccccatgaaagacggagcacacgccttgagaggctgcgaagtcgcaaatctggaaaagatgaaaatggatctgatggtaaagatatatcccatgctatgacccagtttctagaatcatttattctaaaaggaccaagccctgtagaaaaggcttattgttctggaaatgccgatgcttcaaatcctgatactcataactatacatccaacgaggaggcaaatgatcttaagcaatttctatgcaagatatccaagaattttggccctcatcacattggttatatgttacttgaggagatggctcatctcaaagtgccattccaagattattttgtcaagttaattgaactggacaaacttactagaggctgggctgaagacagatctgcatcgtgcaatttatttctagctgaactgtactatgatcgggctttgtgttctggaagtccaccaacatcttctgagctgtctgattcatcttaccatctttgtaagatcattgaatcagtagctctggaactgccattcaacatatctgttagagaaatacattccaccaacttggatacggaaagtagcaggacaggtgaatcttcaagtgaattaatcgagagaagtcatgaaaatggtcacatcaacatgcttaatgaccaaaagtccaaacatgattcttcttcaaacatgaattgtgcattctggattcgcttcttctggctgagtggttgcctgtccctttcatcagactgcaaagagaaagcttataaggagttcaatattgccctgtcaatactaaaaaatagcaacaaaactaaaagctatggagaggtcattcttctacctcacaccaaacttgtaaaatcacttacaactgacaggattcttcgtgaaatcaacttgatcaggcttgaatctctactttggaataatgatgagaatatcaacaaaataactcatacagagttcatgcagttgctacctccacttttgctttccaccaaagatgcctacgttggaaatgcatatggtccacaaagagaaagcgagaatgttatttcacttgagttgtctgccttggatgtcttaatatctgcatgtgaaaaagcaaaaccaatgaacatccaggtatatcttgactcccatcgaagaaaaattcaagttctaactgtggcagccggcatggttggatctgtcacacccctgaaagcgaaaggttcaagcaatgtggaatttgtggaagcaatgaacaggaaccggctagaaaatgttgtggaagcagtcaaagatgtgtctcgaaatgccagtaaagcaaaagacataatcgatcaatgcgataattccgatgggcaagatggctggagcccactaatgtctatcgttggtgatattcaatcattgctcttgacaatcatgtgtgctgctgtcaagataatactatcgagaaaactctcatgctctggaacctcctatcaggttgaccacttggaatgttcctgtctcatagatgcagccattgcattttgcaagctccagcaccttgatcctacaatatccatcaaaactcaggttgacttaattgttgcagtccatgatttgcttgctgagtatgggctctgttgtgctggaagagatggtgaaggggaggaagggatgttcctaaagttcgcaatcaaacatctcatggctctagatgtgaaactaaaatctcaactcaattcaaatgggatggaagaagatgcagttccaaaagacgtcagagcagaagacagtgtggccgatgaaccatcggttagtgacaataagcagaactccgatgatgaggaagaatcggagttagatgagattcagtcatgtcttgatagtgccttggaccaggcttttttctgcctgtatggtttgaagatcaacccagattcttgcagtgaagatgatctcgctgtacataaaaatacaagccgcggtgattatcaaaccaaagaacagtgtgctgatgtgtttcaatatgtcctgccatatgcaaaagctctatctaaaactggcttggttaaattacggagagtgctgcgggctatacgtaaacactttccgcagccaccttatgacttatttgttaacaaccctattgataatttcttggatggacctgactcatgtgaaaaaatactctctgaaatttgtgaaagcaatgaatctagggaagctatcctgaatgtattgttcccaggtgaaagaggctatgaagcattcaaaaaactctccactgccagctctgagccttattcagatgtttatgagaacttatattatttcatagctcaagccgaagatattagtgccaccgacaagcatacaggttttgttttgaaaaaggaaggagaagaattcgttgaacagagtgccaatattttcaagtatgatttgttgtacaatccattgcggtttgaaagctggcagaagctttccaatctttatgatgaggtggaagttgatctgttgctcaatgatggtagtaaacatataagcatcttggattggcgaacaaacacggatttaatcagaagggttgagatgggccgtcgacatagtcgacgctgcctattgatgagttcactactggccaaaactgcccctgagcagagcgaggcacatgaactgttggctcttgtgtactacgatagccttcaaaatgtggtgcctttttatgatcaaagagctactttgccagtgaaggattcatcatgggagacattttgtaaaaattctatgaagcactttgagaaggcttttgaaatcaaggagcagtggcttcatgcgttttaccttgggaaactgtgtgagaaactggggcattctttttctaaggcattatcatactacaacaaagccatgatgctgaatccaactgcagtcgaccctgtttacaggattcatgcatcacgcttgaagttactttacactcaaggcaaacagaatcttgaagctatacaggaatcaggttgttgccgtgacctactgcccacaactgacctggcctggcttttcgtgaacttggcatgttatattagctgtctaacagctgtgggatgacaagcatgtttggagatttaactgcaatggtttgtttagctccaaatctgcctacaaagcttttttttgaaacgca

SEQ ID NO: 24270 - DNA, 1913 bp, Zea Mays
  misc_feature (1912)..(1913): n is a, c, g, or t
aagaatgggaggaatgccaataatccaattaatacctacattagaacatggaagataatgatatatgatcaggtgtgttgttctgggcatggaaaaaatggaacgctctcggcccttcaacaatctatccgtccagatttaattaccgaggtggaactaccaagttgcacaggtatttggacagtttactacaagagttctcgtggaaatacaactgacaataatgaatatcatgcttatttgataataagcctagaaagccgcacaatggtgcttcagacaggtgatgatcttggagaggtcactgaaacagttgactataatgttcaagggagcacaattgctgctggtaacttgtttgggaggtgtcgcgtcatacaggtatatgccaagggtgctcgtgtgcttgatggttccttcatgacacaagagctaaacttttctatgcatacttccgaatcgtcattgaattctgagcctcttgcagctgcatctgcttcaattgcagatccatatgttctcttgaaaatgagtgatggatccattcgacttctcataggagatccttcaacctgtactatttctataaatgctcctgccatattcgcaagctcaagtgagcggatatcagcatgtacactatactgtgacagaggacctgagccatggcttagaaagacccatactgatgcatggttatccactgatgttggagaggctattgatgataatgacaattcttctcacgacctgtctgatatatattgcataatttgttatgaaagcggtaaactggaaatttttgaagtacccagttttaaacgtgtgttctctgtggataattttgtttctggaccagctatcttgtttgatgtgttttctcgtaattctactaaggattctggaataggggatcgagatgcttctaaagtttctgtgaagaaagaggaagcagcaaacattaagatagttgagcttgcaatgcatagatggtctgggcagttcagccggccattcctctttggattattgaatgatgggacattgttgtgttatcacgcatattattttgaaggctcagaaagcaatgtgcaatgtgctcctttctcacctcatggtggttcaccggatattggcaatgccactgattcaagactcagaaatttgagattttgtcgagtttcaatagatatctcatcacgagatgacatatcatgtcttgtacgaccaagaataacaattttcaacaatgttggaggttacgagggattatttcttggtggcccaaggccaacctgggtttttgtttgtcgacagcgatttcgggtgcatccacagttatgcgacggtccaattgtagcctttactgttctccacaatgtcaattgttgccgtggccttatttatgtgacatctcagggttttctgaagatatgtcagttgccatctgcatataactatgacaactactggcctgttcaaaaggtccccttgcatggcactccacatcaggtcacatattatggagagcagtcactttatccgcttattgtgtcagttcctcaggttcgccccttaaatcaagttctttcttctatggctgatcaagaattgggtctgcacatggagaacgatgttacaagtggtggtgacctccaagaggtctatactgttgatgaatttgaagttcgtattatggagttgggaaaatccaatggacgttgggagacaaggtccaccattccgatgcaatcatttgaaaacgctttaacagtgcgcatcgttaccttgcaaaacacatctacgaaggaaaatgaaaccctgatggccattggaactgcttatgttcaaggggaggatgttgctgctagaggacgggtgcttctgttctctttcagtaaaagtgaaaatnn

SEQ ID NO: 24271 - DNA, 217 bp, Zea Mays
gccgcccccccacttctcttcccccttggctgccgccccctgcccatctcctcctctctcaattcttgcagccatcaaaccctagccgcccctccctctcaaacccctcctctcaaggtgccaatccttgccgctcagatcatcattgttgtggtgcgagtcttcaatcattttgatggagggaagaagggaggaaggaaatgggggagaatccaag

SEQ ID NO: 24272 - DNA, 1227 bp, Zea Mays
ctccaaccgccagcgacgctcccttcctctcccaaagaagctgggggaggttctatcacaccgcatgtccaaaatttccttttggagacttgcactggctcaaacgtagaaagatgtcgagactctacttatacaacaattatttttaaaaagattatatctgaggttgaattatcttcaaatgttgtgattgatgaactttatgaggagtttgctcaacgtatgttgtccgaagcaaaattttcatttttagacaagacaagtcatatttataaagaaatatcttttctatctcctacatatgatcatattttcccaaagcgagtaagtgttgtggcccgactatcatgttcttctaatatgcttgaaggtgatacagggtgttcaatttggccatcaagtttattcttgtctgaatttgttctttcataccctaaaattttctccacaaagtgttgcttcgagctaggttccggtgtcggtctggtgggcatttgtcttaatcatgttggtgcctctaaggttattcttactgatggtgacccatgtacactcagaaacatgaaggaaaatatggaactgaataacttatgcattgagcaggaagattctagagcgctaaaagaaagtaagaataaggtcgagtgcaaatatctttcttgggaagaagtgtccgaaagtgatttatggggctaccagccggacgtagttcttggcgcagatataatctatgacccggtttgtgtgccgcaccttgtccgagtgctctcaatgctgttgagacgagatggtagacaagggggaaccaacggaacatctgttgacgaatttgtatatgaaacggaggctccggtcgcctacattgccacggtggttcgaaatccggagactttcgactgcttcgccacagcagctgccgatacaggattgtccgtcttgaacatcaccagtagcacggctccttcaagatttctcccttacatgctgtcttatgataggtctagtgtgcagcttcttagaattagtttgttgtcatagaacaactacagaaagttgatgtgtgcttccagtatctgtcgttacgagactcgttgtaagggcatcaatcatgtcatttgcattttaaatgcctaacagtttttttttcctaatttgcctctactactgagcatgtaataagcaacttgagtcttgaaaaagttttttttaagttccaaaacgtcaagg

SEQ ID NO: 24273 - DNA, 2419 bp, Zea Mays
ggcgagcagcttcccgtctccccgtctcatcccatgtcatgactcagcaccacctcccccatcctcctctgtcctcgtataaagcgccgcagtccacgacggcgacgccgcccatgggagctggagcaccagcacacgccgctgccccggctctgcgccgcgaaccctagccgaccgcctcatggccgccgagtcctgcggcagccgcggcgcctcgcccccgccgcctccctccgctggcggcgcggccgggaggcgccgcaaggcggaggcctacgccgaggtgctccgccgcatccgcgctggcgccggcggctacggtgctgcccgccccgggttggaggacgagctctgggcccacttccaaggcctacccgccagatatgctttggatgtcaatgtagaacgggttgaagatgtcttactgcacaagaaattgctggagcaagcccataaacccatgaatggtctggtctttgatgttcgtcctgcacagggttttactctggaggaaagcactggatttgagtccacaacttcctttaagcaagaagaacaagatccccagtcctcagtattcacatcaagagatcaaaggcctttgcatgaagttatatttgcatgtgacgataagccaaagcttcttagtcagttaacctctctcctcggggagcttggtcttaatatccaagaagcacatgcatattcgacgagtgatggctattccttggacatctttgttgttgatggctgggagtatgaggctgacattctccaaagtgcattgagggaaggcgttgataaaataaagtacagagcatggccgttggtaccgtcgatgtctgctaggatggatcaccaaccattggaggtttctccttcatctgactttgtccagataccagctgatgcagttgatgtttgggaagtcgatctcaggcttctcaaatttgaacaaaaattagcgtctggatcatttggtgatctataccatgggacgtactgtagtcaagatgtagctatcaaagtactcaagcctgagcgggttagcgttgatatgctacgtgagtttgcacaggaagtttatataatgaaaaaggttcgtcacaaaaatgttgtgcaatttattggtgcatgcacgagacctcctgttttgtgtattattacagaattcatgcatggaggcagtatttttgacttcctttacaatagacgaggaaattttcaactcccggatgtgattagaattgcatctgatgtgtccaagggaatgaattacttgcatcagattaatattgttcatagggatttgaagactgcaaatcttcttatggatgatcaggttgtcaaggttgcagactttggggttgcaagggttaaagaccagtcaggagttatgactgcagaaacaggaacctacagatggatggcccctgagttggtgttactgttcctgtattgagctataaagtaccgggaaaaatcatttttatctgaaagtactttggaaaaaaataatccaagaaccttttgtgggatcaaatcgctatctcagctttagagtaaattagtgagctgtcaaactgaaggtagtccagcaaatgtttatcatttatttttagtttgccttcagtaatgcataacatataatttattggtatgctgggggtcaatgagctccttagctgtgatatgaatgtgccatcttcacaatgccatcagccttgtaccacatagaagtcaaaactagcttttgtttatgcatcacctcgttctactaaaaaaactgtgcaggtcattgagcatttgccgtatgatcatagagcagatgttttcagttttgggatagttctttgggagctgctgaccggaaagcttccatatgaagacatgacacctcttcaggcagcagttgctgttgttcaaaaggatctgaggcctactattgctgttgatactcatcctatgctcgctgagctactccagagatgctggcagaaagatcctgctctaagaccaacatttgcagagattgtggatatattgaactctataaaggaggcggttcggagttctgtgcatcacaaaaggcattcatgtcgatctcactccgggagaagacgaggctgttgatgtgccagttttatgtggtgccgcacgcccttttcattttatttttgtagtcgagcgataacttcagaatacggccagaagagcttactgtgttcattccgagaggttttggtaactttattttttttaatttggacttatgcttcaaggattttcatcgttaaaaagcttagaggtgcatatccacgtttacatttggcatgtatctgtatctcgtactcgttttcttaagtttggcaggcaaccaagattttaatgaaaatctttaaccattactcactccgtc

SEQ ID NO: 24274 - DNA, 2759 bp, Zea Mays
ggaaattcttgcagttctgagccttgtgtacttgctcatatggttggagatataagcgccttctttgctcagttgacctttcgaaggatttcttcttcagctactcttacaacatcatgcgcagccttcagaagaacataacccagaagaatactgggcaggctgtttatgaaccaatgtgtgtatggaatgaatttctgacacgagcaattcggaatcatctcaagaatacatgttggactgttgccttagtccatggattttttaaacagtatcatctattcatcattgaagaccacaagtagggctgctgctaactcaatgacacccccactaacttaagtgttttactccgcgtctcatgacctgatatatagtgaaagcttgaaacaagtcgaagctctccgtatctgggaaggatttttggttgacccttatagctaggcgctcacgacactttgcgggaaccagattcttgaaacgtggcgttaatgaaaagggcagggtagcgaatgatgttgagactgagcagattgtttttgaagacacatctgatggaatcccaactcagatggcttctgctgtacagcatagaggatcgatacctcttgtctggtttcaggaaacttcaagacttaatattagaccagatattatattgaaacctgatgtggactacaaggcgactcgccttcattttgagaaccttgcacttagatatgggaatccagtaatcatcttgaacttaataaagacccgtgagaagaagccccgtgaatctctgctccgtgcagaatttgcaaaggctatccattacattaacaagagcctgcctgatgacaagcgtctaaaatttttacacatggatctgagtaagctttctcgaaggaaaggcaccaatgtgcttgcactgttgaccaaggtggcatcagatgtgttggatctaactgaattcctccactgtgaaataagtacatcaacaaaacctgatgacacctcaagtggagaaagaactgctgccaaaccacatgatgacagaagtagcagtgatcaaactgaatgtgcagctaagttggcacctcttttattacagaagggtgtcctcaggacaaattgcatagactgcttagatcgcacaaatgttgcacaatttgcatatggtttagctgctttagggcgtcaacttcatgcattggggcttactgaagcacagaaaattgaattgcacgatcctctggctgatgatctgatggacttctatgaatggatgggtgatacattagctattcagtatggtggttctgctgctcacaacaagatcttctgcgagcaaaggggtcaatggaaggcagcaacccaatctcaggagttccttcggaccattcaacgctactataataacgcctacactgatcacgacaagcaggatgctataaacatgttcttaggtcatttccaacctcagcaagggaaacctgcactgtggaagctggactcagatcagcattacaacattgggaggcaagggactttaaaagaagagattggaagatcgttcataaagaggtcactatcagatggtaacatactgttggagaacaacttgcctgtaactagctgtaacaatgaaacaaacaacacagaattgcttccaatgcaacagctggatgatattagagaacctaccgactctgcgccagagatctccatatgtgaacctaacccgtgctccagtgtgaactacggcagagtgcctggaagacactctatttcagaagagcggcagagttatttgaaaagattaggttaccctgaattgcattcttcaaatttcctcgaccttgatttgttgtcgtcttctgggaattcctgtgacgaggaagtttttgagaggtcatcactgatcaattcacctatggatgtggtcagcgttgaatcatctacgtcgtacagtgaacaaggacacactgatgagggaagggatgacatggatctttcccgttcaagcagccaggtctcagacgttcgggactattctgaccggtttgcgcactgggtcgcggatggaggcatgctttggtaaaaggccatggacttttgtcttgcttgacaactcggtagaatctgtgaccgcaggaaatggatgcgagcagatgacatggctagatgcagagatggtgggcgtggaaaaagtctcgcatcggtatggttgtgaccactggaaggcttgaacgctgatattcatcggatggggatggagatttcggtggttgggttgagtacaagattcaatttgctgtggtgaaaaattttaccatagtttgtttagacaataaataggcaaaatatatatgattcttttattttagcttacagtgcgtcccccttctccatagaaaattctgaaaagcaaaaaaaaaaaggaaaatctagaaaaaggaggaaaaaaaacttagataaagaacacttttgctgtaaatagttagtatgttacggaagtataaatattgtgaaattttgctgacgacacgacttcgctcaaacgtgtaatatactgttggacagtgttaacaaaatatatcccgtatcagtacgaaaactgtgtaaatttactgtaacgcacagtatgcattatttatttatttgtttctcagattatggaagagataaaattgcaaaaatatcttaacctctgacttctcacggtgcggccagcctcggtcaagctccccggcggcgggacgaggccggtgtccgct

SEQ ID NO: 24275 - DNA, 1896 bp, Zea Mays
gtacgtaccgtaccctccctcgctcgcttcctcccaatgcgcgtgctcggatcaccgcgcgcgtccccgccggtagatctggggctccagcctccagctccctgcagcggttgctcgtccgtccggctactgcgcggccgtgttggttactttcgggattggcttcggttggcttacttcccgattggtgcttgtgcttgtgcttgtgcgcgcgatgcagggtacgtgacgacggaggagcggcaccgacaggaggtcgttctgccttcgttggatcacgtggagaagaggcgtcgcagtggcgctgacagtggagagcgacaggatgcgccggagaagatccccagaagtagtgcaggaacgattcatcaacgaacaccagagaagaacatctccaaaggcagtgctgcagtcattcatcaacaaacaccggagaagaacatctccaaaggcagtgctggagtcattcatcaacaaacaccagagaagaacatctccaaaggcagtgcaggagtcgttcgtcagcataagcaaattggtagcaacacgacaagggatgatgctaaaccaaaagaactgctacttcatgtcatttcacaagtttcttattttaagacatcttccgttgaggttgtgttgaaaaatcttgcggcttctgtagtgatcaactcaactgtgagcagttgtaaggataccttgcttttcatatcctaactgatgctcagaacttttatgccatgaaacattggtttaccaggatttcgtataaaaatgcagctatccatgtcataaactatgaagcaattgttttggaaaaacttccaaagtatactatccggcagctgtttttgccagaggagttccgtgttctgattaggagcactaagcagcctactgaaaacactagaatgaaatatctgtcactgttcagccactcacattttgttattccagaaatcttcaagtatctaaacaaggtggttgtgttggatgacgatgtagttgttcaacgtgatctgtctttcttgtggcatattgatatgggagacaaggtaaatggcgctgccgagttttgcgatctgaaacttggtgaaatgaaaaatgtcttgggtaaaacagcatatgatcccgagtcgtgtgtatggatgtcgggggtgaatttgattaatttggataaatggagggagcataatgtcacagagaactatctgttgctcatgcaaaagttcgaattcaaggatgagctgtccctgcgagcagcagcatttcctctgagcttgctatccttccaacatctaatatatcccctagatgaaaaattgaccctggctggacttggatacgattatggaatcgatgaagaggttgcgcggagatctgcatcattgcactacaatggcaacatgaaaccttggcttgaattaggtataccggactacaagaagtactggaagaggtttcttgaccgaggagatcgatttatggacgagtgcaacgtaaatccgtgatgcagatggacccaagatgagaacaattgagtaaatctgggacgcagagctggacctgaaatcagaacaacatcagcaagccttaccgaagcttgtgtcgacgagaacgaatactagtggtgaagccaggattttttgagttggatattcccaacctgaaagtagtgtacacaagagtatatacggtagcataaatttgagtaaatgctggggactacgatccatcgacctccctctacggtaacaaaaaaattcaaatcagtcgacttcatcttacaaaatcttcatgaaatacagataattgtacatgctacgaaacgagataacaatgtcaattgcgctataaaatttggatttgggatatagagaagtgaattattgcacaaca

SEQ ID NO: 24276 - DNA, 3689 bp, Zea Mays
ggcgagcagcttcccgtctccccgtctcatcccatgtcatgactcagcaccacctcccccatcctcctctgtcctcgtataaagcgccgcagtccacgacggcgacgccgcccatgggagctggagcaccagcacacgccgctgccccggctctgcgccgcgaaccctagccgaccgcctcatggccgccgagtcctgcggcagccgcggcgcctcgcccccgccgcctccctccgctggcggcgcggccgggaggcgccgcaaggcggaggcctacgccgaggtgctccgccgcatccgcgctggcgccggcggctacggtgctgcccgccccgggttggaggacgagctctgggcccacttccaaggcctacccgccagatatgctttggatgtcaatgtagaacgggttgaagatgtcttactgcacaagaaattgctggagcaagcccataaacccatgaatggtctggtctttgatgttcgtcctgcacagggttttactctggaggaaagcactggatttgagtccacaacttcctttaagcaagaagaacaagatccccagtcctcagtattcacatcaagagatcaaaggcctttgcatgaagttatatttgcatgtgacgataagccaaagcttcttagtcagttaacctctctcctcggggagcttggtcttaatatccaagaagcacatgcatattcgacgagtgatggctattccttggacatctttgttgttgatggctgggagtatgaggtaattcagcatttctggtggataaaaaactgaccaatcattgttcgatagaaccacattaaacctactgcaaatcctttaagatgaggtcatgtgtactggagctgcaatgctaccagtgtaccttttttgcgtaggtataaaaaagttttagggtctgaatctgttccttgtgtaatgatacaaacttttggtactgtatttggtattccagatacaattgggctcagaaacagatagcatacatgtttaattgtttattcctattgtttcaccaatctttgcacattctaaaactattctactataatttgacaagggtctatcaacacatgatcgaactgtgacactaaaatttacaaaattgcaagtgatgatgattccaactcattaaaaaaatcttttcttggcttattctaacacctatttaagtcttacacaatgttttttttgaggggaaagtcttacacaatgtgccacaaccagtatctgtcatagtttgtgacagactggcagcatgcctaaaggcacaatgcaagcgatacaaaacttgcctattcagttaaacttaatgcttcagggccttcagtttattttgacaaactaacatttccttttttagctgtcatattttttcatggttatcactggctactaggtaccttggattagggtgggtttgactaagaggatcctgtctcttttaacgagtgacatcttcattggctttcctttttctttttaaccaaagaaaagaaatgtacccttttagttagcaaagagatgaagagtaaaagaaaaaaacaacacacgagtgctggtagattcaacataggcggtcaatgaggaaaacagattttgtagctgaagcatacatcttgttcaggatctgttcgatcatgaacatatttttagttgggggcagttagagttttgaccttttgtatgtgcagttgtgcatgagcttaggctcaaaggaacatttttagttgctgttagtaattagttattttgttatcctctgcacaatatagatgaaaatagatggtggtaggtagatcctggtttgttgccaaaacaaaatcatctttccacttcagcaggactcactcttctgccaaacactcatcttgacggtcctccattcctatttcattgaaaccattcagtgttgtttcttgatgaactaatctcagaattctttgcagaaattgaatgttttacaaattttagggtggtgatcatttccaaaatattgatttgaagatggatgattttagacagctgtttccagatccatccaactaccagaaatcactggaccccacacaaaagtggggaccagtatggatggtagatgctggaaacgagtatgctggtcatctaaagcccacatagtcatcctaatgctgagctcaagttttgtcactgtaagaaagtttcagagttgtagcaaactttgtaactgcagtggcggcttgaatttgaaaatgtatatatgtttgtaattttttatgtttgttcacttctatttcatcctcctttttcaacaatgtccaggctgacattctccaaagtgcattgagggaaggcgttgataaaataaagagcatggccgttggtaccgtcgatgtctgctaggatggatcaccaaccattggaggtttctccttcatctgactttgtccagataccagctgatgcagttgatgtttgggaagtcgatctcaggcttctcaaatttgaacaaaaattagcgtctggatcatttggtgatctgtatgttcaagaagcaacttgaagtagtaactcttatttatatgtaactgacttatttgatgtgccatcagataccatgggacgtactgtagtcaagatgtagctatcaaagtactcaagcctgagcgggttagcgttgatatgctacgtgagtttgcacaggaagtttatataatgaaaaaggttcgtcacaaaaatgttgtgcaatttattggtgcatgcacgagacctcctgttttgtgtattattacagaattcatgcatggaggcagtatttttgacttcctttacaatagacgaggaaattttcaactcccggatgtgattagaattgcatctgatgtgtccaagggaatgaattacttgcatcagattaatattgttcatagggatttgaagactgcaaatcttcttatggatgatcaggttgtcaaggttgcagactttggggttgcaagggttaaagaccagtcaggagttatgactgcagaaacaggaacctacagatggatggcccctgaggtcattgagcatttgccgtatgatcatagagcagatgttttcagttttgggatagttctttgggagctgctgaccggaaagcttccatatgaagacatgacacctcttcaggcagcagttgctgttgttcaaaaggatctgaggcctactattgctgttgatactcatcctatgctcgctgagctactccagagatgctggcagaaagatcctgctctaagaccaacatttgcagagattgtggatatattgaactctataaaggaggcggttcggagttctgtgcatcacaaaaggcattcatgtcgatctcactccgggagaagacgaggctgttgatgtgccagttttatgtggtgccgcacgcccttttcattttatttttgtagtcgagcgataacttcagaatacggccagaagagcttactgtgttcattccgagaggttttggtaactttattttttttaatttggacttatgcttcaaggattttcatcgttaaaaagcttagaggtgcatatccacgtttacatttggcatgtatctgtatctcgtactcgttttcttaagtttggcaggcaaccaagattttaatgaaaatctttaaccattactcactccgtc

SEQ ID NO: 24277 - DNA, 1758 bp, Zea Mays
gtggcttgctagtcttttatggcatggagtatgattagagccaccggcgcgtatcagcctagaggcgcgccgtccatggaggcgatggaggaggccaacaggacggcagtggagagctgccaccgggtgctggcgctcctctccaacccgcacggccagctcgtccccagcagggagctcgtggccaccaccggggaggccgtagccaggttcggctccctggcggccaagctctccagctccaacggcaatggcctgcagggccacgctagggtcaggaagaccaagaagcccctgcccatcttctacagcaacctcttcctcgagagcagctctgcggtggccgccgccgcgactgtggccaagacgcccagtccgagcccgaccactggcctccagctgttcccgaggtaccaccagatggagggctcgtcgtgtaaggatcctgtcaggatccctgcgcagttccccaagaggttgctgctggagaacctggctgccggtctggaggggtcgtcgccgcctgcccctccggtccggatggtgcagccggtgtccgttgcgcctcccgcagggatgcccaccccggcattgcccgccgcacacctccatttcatccagcagcagcagagctaccagaggtttcagctcatgcagcagatgaagattcagagcgagatggttaagaggagcaatcttggtgagcagggtggtagcttaagtggcggcgggggcggtggtaagggtgtgaacctcaagtttgacagctccaattgcacggcgtcatcgtctcgctcgttcctttcgtctctgagcatggaaggaagtcttgcgagcttggatggaagccgggccagcaggccgttccagctagttagtggctctcagacatctagcacaccggagctgggcctggtgcaaaggagaaggtgtgctgggaaggaggatgggagtggtcagtgcgcaaccgggagccggtgccattgttcaaagaaaaggaagctaaggataaggaggtccatcaaagtccctgcagtaagcaacaaggttgcagacatcccagctgatgagttctcgtggaggaagtatgggcagaagccaatcaagggatccccacatcctaggggttactacaagtgtagcagcgtgagaggctgccccgcgaggaagcacgtcgagaggtgcgtggacgacccttcgatgctgatcgttacctacgagggtgaccacaaccacagccgagttctagcccagccagcctgatctctctggctatcgattattcaagatcgcttccgtagtagtcaccctccctctctagagaagggaggacagcaacagcaacaatgagagcctagtgtctgtacataagttctgcttctaacagttggaggagtgattcggttagctagctctttcagaagaatcagtggtgacagaagggaacttatcgcgtcgatggatggaagaaagggagagagagagttcctcatcagatactcatactctatttttgtagcttcggtttatctctcttttttgttcatcctgtgctagggcccatcctgtgggttgtatgtctgggaatggtgttgggggggattggatcggagaagaaggcatgtggcaggaaattgcctgtaaaagtggctacacctaggaacagaatgtactatcgtcttcagcagtggtacagccttgttgacgcagtggtttttgtttggtctgtcgcgtgttgtttgttagcgcgagtgtgac

SEQ ID NO: 24278 - DNA, 2008 bp, Zea Mays
ccaggctagtttaatccaagatccgcctgtcagaggagacgagcccacaggcacagaaacggacaacccagctcaactttcccgggcccacaggaagccagcccatctgctgctaaacttcctgtcctgtatcatctcgtgctcgtcggtcgtcactagtcctcgctcatagcaggcggcagtgactcatcactactagtgatcagaccagtgagctagcgactgtaccatgcagcagctgtaggagagcctggtggtaggtaggataggagtagcgccagccgccaagtgcgcgtccgggctggctgcttcggcgagcaggagggagccgcaccgccgggctcccgcaatgtcgcctcctccgcccccgccgctgctgcgcaacgagctgtcgcgcaggacggcggtgctgggcctgcgcctgtgggtgctggtgggcatcgccgtcggggccgccttcgtgctgctcctcgtgctcatctccctccacctcgccgcggcgcggcggaggcggcccaggaagggcgtcgcgcacgcgcccgcgcacgcgccggcgggggcgccgccgctgtccccgtccaccatcccgcccgtgtccaaggagatccaggaggtggccgtccacgtcggctcgctccgccactacctcgagacggggcacgcgttcctcaaggacggcggcggcggcgacggtgagtccgtggcgtacgggtcgcagcgcgtccacatcgaggccggcaagggccagcgcatggtcgcggcggcgtccgacgcgctgtcggcggccgtgggccccgaggtgtcgcacctcggctggggccactggtacacgctgcgggagctggaggaggccaccgccgcgttcgcccccgagcacgtcgtcggcgagggcgggtacggcatcgtctaccgcggcgtcctcgccgacggctaccaggtcgccgtcaagaacctcctcaacaacaggggacaagccgagcgggagttcagggtggaggtggaggccatcggccgcgtccggcacaagaatctggtccggctactgggctactgcgccgagggcgcccaacggatacttgtgtacgagtacgtggacaacggcaacctcgagcagtggctgcacggcgacgtcggggcagtgagcccgctcacctgggacgtccggatgaacatcgtgctcggcatggccaaagggatcacgtacctgcacgaggggctggaacccaaggtggtgcacagggacatcaagtcgagcaacatcctgctggacaggaggtggaacccgaaggtctcggacttcggcctcgccaagctcctgggggcggacagcaactacgtcaccaccagagtgatgggaacgtttggctacgtggcgccagagtacgctagcaccggcatgctgaacgagaggagcgacgtgtacagcttcgggatcctgatcatggagatcatctccggccgaagccccgtcgactacgccaggcctgccggagaggtaaaccttgtagagtggctcaagaacaaggtgaccaacagggactacgaggccatcgtggacccgaagctgccggagaagccgtcctccaaggctctcaagaaggcgctcctggtcgcgctgaggtgcgtggatcccgactcgcagaaacggcccaagatggggcacgtaatccacatgctcgaagtcgacgacttcccgtatcgagaggaccgtcgaactcttcggccgggcaacggcagccccctggagaaggcgaggaatccggcggcggggtcatgcgacggcagcagctgctacgggggcgacacgaccaccgcgagcacgccgtccagactagtgcaggacatgtagtagtgatgtgtttgtagccagctgctgctggccttctgagctctgcctgcgggctgcggggcaacatggagatggacatgctgcaactctgctccgtcgttaattaaaggttcccttcctaggtgttgattttggactcaacatattaaaaaaaaatct

SEQ ID NO: 24279 - DNA, 3185 bp, Zea Mays
cgccggctggttgactcgcgtcgcgtcatgtgcgcgtctctcgtctcgttgggattatattccccatccgcaccgcttgccaatcacccgataataagtagcaggggcagggagaacgaagacgacgacgacgtacgccacccgtaagtgagccgagagccctcgagataccatcagctagctagataaccagccagcgcgagcatggaggcggcggcggcggcggtcctgcaccggacggtggaggcgaacggcatctcgatgcacgtggcggagtccggccccgacggcgacggcgcgcccgcggtggtgttcctgcacggcttcccggagctctggtactcgtggcgccaccagatggcgcacctggccgcgcggggctaccgctgcgtggcgccggacctccgcggctacggcggcaccgccgcgccgcccgacgtcgcgtcctactccgccttccacgtcgtcggcgacgtcgtcgccctgctcgacgcgctcggcatccacaacaaggtccttccttttccgtatcaacgttgacttcttcaattcctctcgtgtgtactactgctataagcctataacacacttcgtactcatccatcctctgtgaagtgtgtgaacatatatacaaacgcctctacttctataattttttttaattttgaaaactaactaaaacaataattctaaaactgataaaaatcatctactcatcttaaaactaataataagccaataatatggaattcttcgcatccgtgtttcttcgaaattaaatttgatttttttattaattacgatctcccgtacgtacgtattgtttgctatccagccttttgttccgaggttaaagtaacaagctaattaagttaaagttaaactaagttcattttactgtaatctggtgagtctaatcagtacaccaagctagttaataggctgtttggtttgagaaatgagttagttcattatcttctcactcctcactttcctcactttttttgtttggtttgtggaatggaatgagttgatccatcatcacctcattcctcatagttagttagttagtagtaatataaggaatgaggtcatcccaccaaatttaaggaatggacccatgatgcaccactatattttggatgtagtgattcctcaaaccaaacacccctaagtttctttctttctatccctaagtggtgcagcgtatggccaggcatccgagaatatccaagaatatgtgtataaaacgcacatgttacatgtacgatagaataaagcggtggttgtagcatcagcatcatcaatttagcgtgtgcacatatgtaatcaaactagctagcatgcatgcttatcaaataattgcctgatctctcatcggtgacacaatggagcaataatcaatgtttgtgcctgatctcatcatcggtgtttgatttgatttcgcttcttcacggatcggatagatgtttgcattgcatggcgaagcaggtgttcgtggtgggtcacgactggggcgccatcatcgcgtggtacctctgcctgttccggccggaccgggtggcggcgcttgtcaacaccagcgccgccgccgtcacgcccatcgactacttccaccgcacctacgggcccacctactacatctgccgcttccaggagcctggtgtcgcagagaaggagttctcgccggccaacgccgggtacctgatgaagcggatcctgtgcaaccgcttcacctcctcggcggccggcgacgacaagcgaccgccggcggacgccgccgaggaggagccgctgccgccgtggctgacggaggaggacgtgggccacttcgcgtcggagttcgagcggacgggcttcacggggcccatcaactactaccgcaacatggaccgcaactgggagctggcggcgccgtgggcggacgccaaggtgcgggtgcccaccaggttcatcgtcggcgacggcgacctcacctaccactacccgggcatccaggactacatccacaagggcgggttcgaggccgacgtcccggggctcgagagcgtcgtcgtcatccccggcgccggccacttcgtccagcaggagaaggccgacgaggtcagccagcacatctacgacttcatctccaagttctgatacatgtgcatggatcgaccatcagcttgcttgcttacctgctaaagcctgtaatctcaacctcgatatccgtgctgccaacttgttttgtttttcgaactaagagtaataagtgttcgcatatatgtctggtttaatttgtgacttggacatggtatgttcgatgtgaaatggataaaccatgcgtttcgtaatttaaatgtacaatgcttgtaccggtgaccgtgtactgttgtcggacgatcaacagtggcatactggcatctatgttggaaactataccatgtccaatagctaccagaagcctaggcccgacgtgcctttcggttgagccagatcacgtacgagcgtctataaaaacaccctagacccctaggaattaaggtttcgaggcctcatagcggctgcaactgcgtgaggtgctagaggaggcgagcggcgaccggacgtcgatgacgacttcctgcaggctgcgacgcgagacgcgagcggcattgtgagacgcgagaggcattcccaggcaacgtcggcccaagacgatgtcgtcgagtggcggcccaagacgtgagcgttgtggcggccgtgacgaccataagcgcgagcagcgatgaccgcgtctgccgaggcacgagcggttggggcgatcgcgatctcccgaggcgcgatctgcggcggtggtgatgacctttcaaggcgcgagcggtgatggttgcgttgaccgtctgtggtgtcatccaaagacaacgatctcctcgggtgtggcgcatcggagggcgtcctccttcgacgaccaccttctacccgatggcctctgaggcatcctttgatgtagcggtctcgggatcattctccagcggcgaactatccgatccatgtttatgtcatcgatgattatgttttatacccgctacttacaatatttatgcattccagtgataatttttacgatgatgaagtatgatttttatgtatgcgatttttttatcaattacgctacatagtgtatgtatttatgcaactttatataagaatttatgctctgc

SEQ ID NO: 24280 - DNA, 1580 bp, Zea Mays
gaggattcgacgaaatggaggcgttggcgttggcttctctgttctggagacgcagcgacagccaaactccaaaacggaaatgagacagcgcttggagctgcgttaacagactactcctgctgtttcttattgccaataagcacaagcacacttgagaaccggccatcaccatggagatgagactctttatcgcccttcagtgcgtgcagtgcgccaccatgcaggtgaagcagcagaagaagagcagcaacaagtgggtgtgtgtggtgtgcaaccagcgtcagtctgtgcttcatgtccatgccaggggctatcgtgctgctgatctccgccgcttcgtccaggacaccaaccttgcccgtggccgccgggagttcgcaccgttggccgagcccgacgtggacagggatctggcggcagttgaggagggagatgtgttccctatcgagaagagtcagacggaatggtccgagtatctggacgatccaggggagacaggtaaaggttgtggtggccttggcgcagatgcttcagatggagaatcggatgaaggaattgaggtgataactgaactgcctcagaaaagacctaaagttaggcctcgcaaagcccaatcagatgtagtaggaaagagaaccaagctgtcaacacatcccactttatgtaataagaggcagcagatcaagcaaggatcaaatccccactgtgcaactactactgctgaagcacaaggatcaaaatggaccaagtatttggacacgagccgttttggtgggaggaaatgcttcgatacctctggtctgcactggactgaacatgatgaatctgccactactgaggctactactgacgtagtggtggatgatgagaatcacagggtgcatccacggaatgtcacaagctcagtgtgaggtggctgagcacttgagctgaggaaaattcttgtttctgttctgcatcaactagagtcacctgaccatgtggcacagcacagagaagagccgaagacgtacagcatggatcacaggagcagtacaccttgatgactgactgttgtctgttggtacctataatcctgtgacaggtctgaacaaccgagtgattgattgatgtctccggcttccctgcagccaaaatgacgaatgggttaccctgcttgaatcctttgccactgcgcttgcgtgctactactattccatgcaaaacaacgtgttcggaaccaaaattaaagttccgaacatcgctgtgatgaatgggtgaatcgtcacctttttctttgaaatagcaactgtatgctcgaagaacagctgtgctggtccagctatctgggtaccgtactccctaccccgattgaactgtatttgggtcaaagtaatgggggagatactctttccatgctaggatataaggtgtaactacctttaattctaagatcaagaaatatatttaattctctttatcaataaagtattgttatgagcgtgcttatattatgggacaagaataaaaagtgtttacgacttatataacaagagtagtagatataggtcatgtttgtttcagtttttttagcttccgtc

SEQ ID NO: 24281 - DNA, 1319 bp, Zea Mays
aattacccccctcacacgctttggtactttcaggcatgacttgtcatctcctgacaaaccagctagatgacaccttagacgggtcttaccttcactctccttagcacacccgcaataagcacacttgaatccctgtttcttccacttctcaccatgactccatgagtcatcaatagaaccttgtagttgtttgcgagttcctagtaatataaaaataaatgacgcaaaacaataaacaaagtgctaatctaaaaaatgactttccactagagaattaaaatttatacttccagtttgcatgtgagaactcaatagtgctaatctaatgctagaaagcgttaccatcggtagtaaccactcattcacgggcagatgatgattcaccaatacatggctgttttcccttgtcccgtacactgcctccttccatcacaatcaaaactgcaaacaaggcatttccatcacaaccaaaactcaaacacctgcatatcaatggcgcatcaaagagctcgacctatcattgtagatccagcactgcaggtcccaaataaaactgaggttgtaacgacaaaggagaaaaggagttcatcttgggtgatgcttagtcgatcgttcctggagttttgcttgcgatgggacaaccttcctcgcacactactgatgtatttcaccaacttcctctcatcctcagagggctacttccacacagtgatctgcaactcagagcactaccagaacaccactgtcaacagtgacctgcggttcatggcctgggataagccccctctgacgcaccctgttaacctcacaacagagcattttgatgcgatggcaaacaacggggcgccatttgcacactctttcgccaatgacaattcagtcctggatatgattgacgccaagttgttgggccgggcacctggccgcttcaccccgggtggatggtgtttgggtagctcagtaggcgggaaagatccgtgcaccttcttgggaagatcctttattctcaggccgaccaaaggttcggccaagctagagaagttgttgaaacttttggaacctgataacttcaggcctaaacaatgtaaataggactcattttgcatgtagcattttgtgggtactgttcagaagccaaagtttgacgaaatctttctagttattgcggcagttaggcatacatacaagtgtgttgttgtatacttgcatctggaaagcttatctcaaaagtgatttgagaccatacatgtactactgcggtttcatcgcttccacggatgttaaacaaccgatgataatcagagacttcagcaattttc

SEQ ID NO: 24282 - DNA, 1299 bp, Zea Mays
ccaaccccactgggcaactgcaactgcctgcgccagcgcccccctcgattgaaatctcgccgccagttcggtcgcagtcgcaccgcagccgtcttctccttcccttccctcctcgctaaaaagccaacgcaaccgcttctcctcctcctcctccgcctcctccctcctcaactcaccccagcacgcctcagcccgcattccgccacccacgcgactgatcgaccgacgacttccccattcccgccccgcaacccgcagggctctgggttcggaggaaccgagggcgggggacctccgaccgggccgggcgacatgttgggcgacctcctctccaggatcctcctgctcctgttcggctacgccatgccggcgttcgagtgcttcaagacggtcgaggcgcgccccaacgacgcccgcatgctgcgcttctggtgccagtactggattatcgtggccatggtgatagctgttgagagcgtgatctcttggatgccaatgtattcagaaatgaagctagctttctttgtgtacctgtggtaccccaaaactaagggaagtgacgttgtatatgacacctttcttcgccccatagttatgcaatatgaaccgaacatcgagcagagattgttccatctaagggcaaaatctgggcagttaatttccttctacatgaagaattttgcggataaaggaacagccttcttcatggatgtcctccgttatgtcgtatctgagaaacctgaaggatccaatgcagagtcgcagtgtgatatcagcaggcatcgtgtcttctggttgttgcgtggtcggtatgcgccgacctgtacaggtacaaacctcagccagtaatcaaggcaaacagcatcgtattcgtagccaccaaatggacatgtgcgtccacgtgcacgaatcgcggcgcactgattgcgaggcccttggacggtttttctcgctagtcgctacagacactgacaacgttttcttccgttttttgttttgttgcgtgcgcagaagggagcaagaaggccggctggagtcccttcgcgaccaagcgccgaccaacatctccgccgccggagcccctcttcgacagcaacccggacgccgcgttgctagccgaggtcctgcgtgccgccttgggtgcaaagccccggcgtgcgcccaacgaccagcattactagagggaattattaagagcgatttttagggatgattgtttgtacatagaatgaatgaacgaatcattcaagggagagggggaaaagagttagtacatagcataatccagcatacattcac

SEQ ID NO: 24283 - DNA, 2630 bp, Zea Mays
ctcgttgaattcagtttcttctacggccgcctcgagcagcgcgtgccgacttgataccctgggaaagagtccatggcgtcctctgcccccggcagaggaggaagacagctgatcctactaccggccgcggcggcggctgtggcggtaatggtactaattggggcggaaccggcgttggcgtgttacccgcgcgtgttcagcttcggggactcgctggccgataccggcaacttcagattctactacggcaacagctccggcgagcccgcactccggcaaccctacggcgagaccttctttcgccgcgccacggggcgattctccaacggccgcctcatcctcgacttcatcgcggacacgatggggctcccgttcgtgcggccgtatctgagcggtcgccgcgcggaggacttcgcgtccggcgctaacttcgcagttggcggcgccacggcgctcggcccggacttcttccgctccaggggtttcgacatcggcgacggacgtgtgcacctaggcatggagatgaagtggtttcacgatctgcttgagctcctctgccgcagcggccgctccggtatggttgctcccttttacctcctggactccatcctctgccttcgacctgatctttggaattccactgctatcgggggagagagaggaaattctagtggcgggtggggaaagtagcatatagcaaatgaacaaaaaaaaagttcgatgtatatggtgtggtgtgcaggtgtttggcgatggaacgagaaaggtgcgcgtgcgatgcaaaggtgttgatagggaatgtttgaattccaaagttatccttccaaatctaaagagaagaaataatcgagtgaatggtgatataggcaaaatgattcatcattgatggtaacagcaataaattgacgcttgtggatggtatcggtccaatgctaaccggacagtctatacagtcattgtcaaaaccagaactgaaagttcagtctatatcatcagaagccgtggcccaacattcttctgcatcagttttttcttttggtgcctcaaatcaccataacattgttctgcatcagtttttttcttttggtgacaacttacggttagaaatgggagattctgtgaaataaactatttagtctctggaggcattctgctgcaacacaaccagaaagaaactgcttcttatttaattgtttggaatacagtcacaatcatcagatacaaaattactgacaatcagggaaatgtcatacaaccaaatgcgtctactttcacttggcacaattgctgtgcacaagcaatccactgctctgctaaggaagctattagtctattactatggttgctcagacatcatgagccaatccctcttcatagtcggagaaattgggggcaatgactacaacctacctatgctctccagagtgccgattgaaaagatccgctcattcacaccaaacgtcattgccaaaatttcttcaacaatcaccgagttgattgggctaggagccaagactctggtagttcctgggaacctcccaatcgggtgcgtcccgaaatatcttctgatattcaagagtgatgacaaagaagattatgagccagagacaggttgcctcagatggatgaacgaattttcagagtaccacaacaagcttctcttggaggagctggagaagctgcgtaagactaatcctaccgtgactattatctatgctgactattatggagctgcaatggaaattttccgttcccctgaacgatttggtatcgaggaacctttggtggcttgctgcggtggagaaggaccctatggtgtgtccctttctacagcctgtggatacggagattacaaggtgtgtgacaatccagacaagtatggctcgtgggatggtttccatccatcggaagctgcatacaaagccattgcaatgggccttttgcgcgggacatacacacaaccatctattgcttccaccaccagttcctgtccacagctcactgagctcggctcttctgttgaatacaaggtcctctacgatttatagttttatagctacatttagttgttagtgttattatacatgcaccgatgcacgtggttagagattcaatttattttttggatgcatacagtatggttacagatgtaatgatttggataattttgcctgattacagagctgcggtactgtactgcacttctcggctgtggcccaagcgattggttgggttttgttttaccttctctttttcagtcacagtgctagaattaggaattgaaaggtggtgcttttaccatccatagaacaagaggaaccacagaattatacttgggggtcccgaaactcatcggtacctctcaatgacttcaaaatggctgattaagaggagtggatgccaattctttgatcatattggctggtacagcgtagatgctatctacttcatttccatttcttgtaaatgtaaccatcagttcttccgatgcacgtgatacttagctgagcttctgcactatcaggaagtaagcagctttttagtatttcagagtcttcttgctgtcactgtctttcccttggcaactcccttattttgtgctcaatcgcacaatgagcaatttctattca

SEQ ID NO: 24284 - DNA, 2388 bp, Zea Mays
gcttgacatgacacacacaccagccttttcacaagattacatggaacttacctcacacatggggttacctgatgtctccataaagcgattttctgtgactcatgatattagaaacctgttaatgtttgtggatgttgttctctatggatctttaagacaagaacctgtcttccctcctttgttattgctgtccatgtcctccgaaattccagttgttgcaccaaatcttactgttataacaaaatatgtcagtgatggtgtccatggattccttttcgattctgctgacccaagcacgatttcttcagctttcatacaaattttaggagaaaaaaagcttttggatactgcctattctgttgctctggaagggaagctactttccaagaacatgttagcacatgattgtatcaaagctcatgttaagcttcttgaaagtgttattcattttccttcttatgcaaaattgccatcttctgtttctaaagttcaagaacgaacatggttgtgggatcctttcgagttgaaagctgcactagaaaatagtttgttggaagatgaaagccatgccagcacaaaggctgttgatattcttagagaattctctcaaagtaaccaaacaacttatgctgatacaaatgatacttcttcatatgattaccctcgtttgtccgattggtatgatttaggtgaaattgaaatctttgaagacattgagaggagagaaatggaggagattgatgaaagggtggaaagacctttgttatcatgggatgaagtgtacaaaaacgctcgtaaatcagaaaggctaaagtcagaaggaaatgaacgtgacgaaggtgaactagaaaggactgggcaacctgtgtgtatatatgagatctatagtggagagggggcatggccatttttacaccatggatctttgtatcgtggtgttacactttcgaaaggaggaaggcgaccaagatcagatgatgttgatgctgttaccaggctttcagttctagacaacccatactatcgagatcttctttgtgaatttggtgctatatttgccattgcaaacagagtcgatactgtacataagttaccatggataggtttccagtcatggcgggctgctggaagaaaggtatccttgtctgaaagagctgaagaaaccttagaggaaattacatctggagaaagtaacgaggatgttatatactactggtcaccaatggatatggaccaaacttctgacttttggttgacatgtgattctctaaatgctggcaattgcagatctcttttcgaagatgcatttagggctatgtatggattaccagagaatgtcttggcccttccaccaatgcccaatgatggtgatcattggtctactcttcatagctgggtcatgcccaccccatcatttctgaaattcatcatgttctcaagaatatttgttgattcacttcatagcttgaatgtgaatagtactgaaacaacgtcttgcttccttggggcatcagaacctgaggcactgttattgtcgaatcctggaagtccttgtaaatgtctgggcttatcacagtggaaggaagatggtctaccttaaccctttcactggggataccagtgagcagcatctgctcgataagagaaatgggatgtgggtaaagttcttcaatttcacccttctgaagagcatggatgaggatctggcagaagaagctgatgatggcatgcatcctggaaacgagcagtggctgtggccattgactggtcaggtgttctggcctggtattgctgatcgggaaagggaggagaaatacattaaaaagctggataaaaagctcaagaacaaggtgaagttacttgaaaggcagaagtctggttacaagcagaagcccctgggacaatgaccatgactgaagagctaacaattcaagatttttttccttgccacgtccggtgcatgcacgtggaagaagagttggagcacaaaaggcaccgctgttgtgaatacgcattctttctacacctcattgatctccctctccaaagatgtttggtgagtctggaggatattgtcaggatggaaaagcaccattttttttcctgttcgtataaacagattagataggatttgtttggttcgctgtctaatttaccacactttgtctaacttttttgtctaagtttagtttttcgatttaaacgactaaccttatgtaaagtgtgacacagttagccacgaactaaacagacctgtaatgcgccatatagttgaactgattcttttctttgctttccccatccgccatggaaagtcagctggacgagcagcaaaattttggtagggtgacactaaccatcgttgtacatgtaaatatctagtgctgt

SEQ ID NO: 24285 - DNA, 1067 bp, Zea Mays
tttgaataacctgtagctttggttgatggaacagaggtgcactcgccagttgttctctcaaatgccacaccatacaaaacatttgtggacctagtaccttctagtgttcttccggaggacttcctctgtgcaattaaggcagcagattacagctctgcaacaacaaagattaatgtggctgtcgacagactgccacagttccagtgttgcaacaccaatcttgaaggtggcccagagcacatgggcacaatacacattgggtccgaaagcatggaggaaattgacgttgcatacagggaagcagcagacggcatctcgtccaaaagacctgttatagaaatgacaattccttctgttttggataagaccatctctccgccaggtcagcatgttattaatctctttgttcagtacacaccctacaaactttcagaaggcagctggcaggattctaatgtcagaaaagcctttgctgagcgatgcttctctttgattgatgagtacgcgccaggcttcagctcatcggtggtaggctacgatatgctgactccgcctgatcttgaaagagagttcggcctaacagggggaaacattttccacggcgcaatgggcttggattctctcttcctcatgaggcctgccaagggatggtcggattacagaactcctgtgaaggggctgtacctctgcgggagtggcgcacacccaggtggcggggtgatgggcgcgccaggacgcaacgccgccgccgttgttttggaggaccacgtgaagacaaagtaggtgtagtgtagctcgctggaaaccaagatggcatttttatcatcaggagaaaatctttgatgccatggtgctgttttagtgcctttcttttcttttcctttttggagaattattgtcgcaatccatagtcggagaacttatatcatgtgaagactcgtgtaacaaatcctcactaacatttctgtccctgtccggcgggaaattggaactgtggtaaaatgtggacccatctctttgaaccacaaaggccctatgggcttattttgtgatgaaacaaccaatgg

SEQ ID NO: 24286 - DNA, 2227 bp, Zea Mays
cctctgcctgctccaccagtccaccccaccaggcaccagtccaccaccgacgcccgcacgcacgaggcacacgatggcctcgctggaggcggcggagacatcaccgccgtctacgcccaccaccagcgcgtccccctgcccgaccccgcgcccgctggctaccgcaccgccgaccatgggtgcggcgcttctccgcgccgcgcgcagcggcgacgagagacagctcgtgaaagcgcttctggcggaccctgcggccccagaccttgagaccgccgccacagccggagggaacacgctcctccacgtggcggccgcgggcgggcacgtggacctcgcgttgctcctcctccgccgcgccccgcgcctcctcacggcgcgtaacgcggcgctcgacaccccgctccacctcgccgcacgcgcgggggcgcacaaggtcgtcgcgctcctcgccgcctcctcgtcctcgtcatcgtcctcaccagcttgctccctgcgcgccctgacccgggccacgaaccggcgcggggagacggcgctgcacgacgccgtgcggggcggccacgaggccgcggcgcgtgcgctggccaccgcggaccctggtctcgtggggatgtgcggcggcgctggggagtcgccgttttacatggcgtcggcggctgggtccctggggatgctgcgcatgctcttaaaggcatataaggacgcggaggaggaggtgcccgacctcgggtcgagcataggtccgggtggccgcacggtgatgcacgccgctgtgctcacgagcaatgaaatgatacaggaattgctgcagtggaaccccactcttgtgaaagaagttgatgactcgggcagtactccttttcactacatcgcttctgttggaaatatttccgcaatgaagctcttattgcgccgtgacagttctccagcatatagctcagattcaaacggtttatttcctgtacatattgctgctaagatgggctacggtcaattcatctacgagctctgtagattttgcccagattgtgacgaattgcttgacagtagaggaagaaatttccttcatactgctattgagcataagaaatggaaagttgtctggcgtttctctggtactgcagatcttggaaggatggcaaatgtcatggattcagaaggcaacacacctctgcatcttgcaatcaagaatgcagaccagatgatagtgagccttcttatggcaacaaatagtgtgctgccgaatatagtgaacaaccagggcctcaccgccttagatcttgctgtactggcaactgacaaaggcataagttatacactggtcatcatactccgctgtttggcatggactggagctgtccttagtcctcgtcgccttgatcatttcatcgatgattttggcattggcaaaacttcaggaaacgagctcaagaaattcaccaacattgcacagaacttaattgttggttccgtccttgtttcaacggtcacgtttgcagcagttttcactcttcctggcggctacatatcggaggggcatccacacgccggtgcaccaattctgtcacacaggtacaccttcaaggcgttcgtgatggcaaacaccctcgcatttgtcggctccaccttgtccaccatctggctcacctatgctgggtcggaacacgtccacccactgcttcgtgcaatctacatgttcctctccgtaatttcgatggagcaggcaacaagaagtatggttataggattcgcattgggtgcgtatgtcgttctgagcccagtcagcgagcggattgccattgtggtctgcatgtccaccttcatgacgctcttgcttcgcaacccttctagctggcagctgtggttcctgttcatgccgattaagaggcgattgggatggaaaggagcttttaagacccacttgcctccggaaacaaggagccgccttacaattggtgttggctccaattttgcttgccagttccttcggaggatgctcggtatgttatttacgtacagctttatctttctgttagcattgctatgatgagaaacaatatagtgtgcctcggtgtaatattcatgttccttggagctgtatgttttgtacttttgtatataaatagttcaagttccacgaatggttgctttattcctgaactcagatattttaatcatctaatgcgatggtggaattaaaaaattcaaaattctgcgagtggttgcc

SEQ ID NO: 24287 - DNA, 2634 bp, Zea Mays
attctttccatctacccccacctactgcttgtaaatacaagcaacaccctggctggcacggttcaaaccaagctttctctacccaagtcctgcgccggccgccgcttcttctccttgcatccggttcaggatttccagcggcctcgactcccgatccggtctccgtaggagcgtcggtatcctcgtgtctccggcagtctttcgaacctcggttggtcccgattggcgagaaacccccgcgtcgaattggcggccaaggggcgcgggacgcatcattcgattcttggcggctgcttgcctgcttgtgcttgagcgcttaacagaacttcgcgagctgggctttctctaggtggaaagacaatttgatttggagatggggccggaaatgatagagcaggatggatggtaggaaaaggaaggggaaattcaggaattctctcaggcgtatggctatggagtgcctgtgctctggtgagcagttgaaggcgtcagatgagaccatgcggtcatctgattctacgatcacaaaggatttctcggccagtgggtactcttctcggaatggagagattgagcagtaccttgataatggcaacatagaggaagccgagttgtcgctccgggagggcatttgcctaaattatgaggaagcaagggcattgctaggaaggctagaatatcaacggggtcatgtagaggcagcactccgtgtctttgatgggatagacatatctgcattagttcctaagatgaaaatctcaattgctagaaaaacagaccgtcggaagactcattcacagtgggattccccaccaatgcccttgcatgctgtcagccttctcatggaggccatatatcttaaagcaagagcacttcatgatcttgggaaagataaagaagctgcacaagaatgtagaatgatattggatattgtggaagcagctgtacctgagggcttgccagcaggctttgggaaaggctgtaaattgaacgaaataatatgcaaggctgtagagttgctccctgagctgtggaaatcaggggggttttcacttgaaaccatttcttcatataggaggtcacttcttaataattggaatcttgatggagagacaatagcaaggatacaaaagaaatttgctgtttttctcctatatagtggttgtgaagcacgccctccaaatcttcattctcagttggacggttcatttgtacctcgcaacaatattgaagaggctatccttcttttgatgattcttttgaggaagtccaatctcaagaggattgagcaagatccctctgtgatgcatcaccttacttttgcactgtccatgtcaggacagctaattccactggctggacagtttgaagaattgttacctggtgtgttagacaaaaaagaatggttgtacagcgttgcattgtgttatttagcagaagaagatgatctgagtgccctgaatctactcaaaattatactaaaatctggagaggactccgttcaactcatagaactgcttctagcttcaaaggcttgcattgagatgagtattcatactgaaggtgctttttatgcaaggagagccattgcaaatatgcagggaggatgcaaaccaatggcaggacttgcaaacctattgcttggtgttgcactttctaatcaggctagaagtgcaatatctgatacagatagagcttcttggcagtgcgaagcactggaagcccttgggaatgctgaaaaaaatatacatgggaaagattctagggcattatacagtctcagccttgaaaatgctgtgcagaggaaattagaattagctgccttttatgcaaagaggctggtgaaacttgaggctggatcagagttgaggagttggctccttttagctcgaatacttagtgctcaaaagctgtttgctgatgctgaaacagttgttgatgctgctctagatcaaactgggaaatggtgtcaaggagatttattgcgaaccaaagccagaattcaggctgcacaggggcaatttagagaagcggttgaaacatacacccaacttcttgctatcattcaacttagaacgaaaagtttaactgctggagtttgcttgccaaagggcaacaaggatgataaaggcctggaaacagagacctggtatgatctagctctcttatacctaggtatggcacaatggagggatgcagaggtttgtgtattgaagataagatccatcagtccttattctgcattggcttggcatgctacaggaaaaatatatgaagcaaaaggtcttagaaaagaagctttgggagcttttttcagagccttagatcttgatcctaaacatgtcccaagtttaatatcaactgccactgttctacaacaacttggtgacaggccattgccttctatacggtgcttcctgactgatgcattacaactggatagaactaatcatgttgcgtggttcaatcttggccttctttacaaagaggaaggtggcaggtcagcagctgaggctgctgaatgcttccaagctgctgcttttcttaaagaaactgcaccttcagaacctttcagatgacatctacaggggctatagatatattggtctctatccagcactaatgaaatggtac

SEQ ID NO: 24288 - DNA, 1829 bp, Zea Mays
cgcgcctgacgcctgacgggcgacggctgggcgtgggggagcgcgcgttggctttgcgacttgcgagtcgcttgtcgccattcgattcgcacgaggcgcagagcgcgggggattgacattggctcgccaccggctgtacgccctctcctcctcctcttcttcctctccctcggcctcggtccctcccgtcgcgctctcgcctctgcgtctgcgcttctctccagttctccttgtcgtcgagcgggagcgccgagagagagagatgcgaccgcgatgcccccactcgtcccctcgctgctcctcccaatcccagccttgatcctacccgcgccacctcgcctctcccgccaccgctgcttcctgcccgccgtgtcctcctcctcctcctcctcgtcgtccccgcactccagggagccataccgccgccgccgacgcgacaccccgagccagacaccgacgcctgcgccgcgcccatcctcccagccgcagccgcctccgcgccgcgcaaatgccgccacgcccggcgctcggagtcaggaggagctggaggcggcgatctacgacttcatgtgccgctccgccaagccgggagccttccccacccgcgaggagctcgtcgcggccggccgctccgacctcgcggccgccgtcgcgtccagcgggggctggctctccctaggctggtcctccaccgccgcggagggccccgcgacgacggctgcaccgtgctcatcaggcgggggccaccctgactacccgcctgagacgggcgtgtattaccgtggtgatctagcgcccgtctcggtggaggactccgagtgggaggacgacgaagaggatgcctcaccatctgggcgggagtcgggaacagaggaggccagcgaggtccggctcaacgcaggaatcgaggggatgctcaccaggctgcagaaggatagagagcgagcgcggccacctccacggactagtacccacgacacacagggccaaagtgacgatgatgcgggcaacagtggcgctcctagccatacagcggctggtggcaggcatattccaagggctcctgagaatggaagtgtccatggatctcattctcaaaatggaacaatagagggcaacagcacctttcagggttcgaacgatgatgcatggcaaacatggacccttggcaagggcgatttatctcattttgaagctgctgaggtcttacctattgaaagaagaaaagtatcccgacatgatgacattgcatccgtgcaaaatgacattcacaggtcatctaatggtgtggctgtaagcgatttttctagcgatggtgttggcactggaagagatgagatacattcacggcttcaaattctggaattggacctttctgctgctctcaagacattaagatcaagatttgacaaagttttatcagatttgtcaaatagtaatggagcaactgtgttggatgacatctctgatgattgggaatttgaggagacaaaggtaatgcaagctcaggaggagttaagatcaatccgggctaaaatagctgtgttagaagggaagatggctcttgagataattgaaaggaacaaaataattgaagataaacaaaggaggcttgataaagttgagaaggcactgagtgagctccgtactgtctgtattatgtgggccaaccctgcttcagatgttttagtggttgggtcctttgatggctggacaagtcaaagaaagttggaaagatcagaaaacggcatgttttccttaaatctgagactgtaccctggtagatatgagaatgcagctaggaatcgccgcggaggttttgtttgcgg

SEQ ID NO: 24289 - DNA, 2343 bp, Zea Mays
aacagtgtcgccactcgccacagagcgctccatcaacacgaccgccggtataaacgcagcccccctccggcctccaccaaggccaacattgctcaggctgctcccaactcccatcctccccctcccggagtacgaagtactagaaagagagcggctttcctctaagaatggcgggtggcggcgccggcgacgacgacgtggtggtggtgagctgcggcggcagaggcggcggcgaccccggcgcatacgccgcggtgctcaagaggaagctcgacctgtactgcgccgccgtcgccaaatccatggaagctaaatcacaagaacattcgttgggctaccccaactcacaagcttcagatgcttcgcaattgatttctcaagcttcctttgatggtatttatgacctctcataactgagtgcatgtcagtctatcaaccaacttggggtaaacatgcaggcaggaagatttcgaaggaagtagtgccttaggatggcaggatgtggtctggtttaaaagcatgttagatgccaaatcctattcagttcaccatctccccgctgatcattccaatagggcattagatgcaaacctcacttatcctagtacacttgattaccagccttggtttgagtactgtgagtgtgaagtgtgaaccattcactagagtctacaggttagtcttccatgataattacgtgcacaagatccgatctcaccagcagtttcagtaggataggttagctgatgctcaaggaatccaggtgagtagaaatatcaattccggattacctttgtggtgtggttgaggttgatgtgccggctcattgataattctggaggaatgatctaaactatgagcaatgttggtgagatcagatataaggatgaaaaatgaagtctgatactgcttcagttatactgaacagtcatgtcaactctgttggtgagctgcactgggcatgcaactctggcaccagttttgcactctggcagtgtgaagatatgatgcatgtgtggttcagaaaatatataggccttttttgtgacatttgaaccgttggacttattttactgtactgttttggtttcttccattctacacacaggtgacatagatggggcaagcctagttacaaactctaatgtcatagaagatgatgattttcaaggcaagccaaccaacagtggcacatcaaaggaactgtcagacgatgatggtgaccttgaagagaatactgaccccgctaacgccaagaagatgaggagttaaatttcggtgttgtgatcagaatggtgtcaaaccgggaatcggctaggcgatcaagaaagaggaagcaagcacacttgaccgatcttgaatcacaggtttcaattgtgttagaatatagatgagtgctcaagttaatatccaactaaaatgaatatactcgtgctaattaccgcacaactctccaggtttccaggttaacgtctgagaatgcatctttgctgaagcgactggctgatatgactcagaaatacaaggacgcttccgttgacaataaaaatctaacagttgatgttgagactatgaggagaaaggtgtgaggagttgtaaaacgaaacaaaacattaaaagcgcacataccatgccgcaatgcgccaagtgtgtgtcccattaagcctgtggggtgttgcccttgccttgccttgtggatgggctgctctatctcaaatgataccgagaggagtccaaacagaatactaccatacaaacatttcttaatgcttgtgtgtgaacatagccgaggaagctgtcaggaggctaactgggatcaccctcatgctaccgaccgcttttgagaagcccacgagcagcgcgcccctgtcatcatgtccatctgatgcagcttctgcttctgcttctgccgccattgaagacagcgtgaagcatttcctccaggcgccacttgaaaacagtgggatcatcccaaacgcagcagtttttcagaccaagccagcttctctgcaccgtgttgctagcctggagaacctgcagaagaggatcgtcggggatgcaatgtattccgagaccgcgtcaacgacattctcagatcctgaagctcttgccgataggtaaaggttgctcctgtcctgtgatgaacagccgtgtgatgctctagcggcctaagtgcttctggtaatggaagttgtagcacccatgcgcctgggtggggtctacacagtgatttgtacactattttgaaggttaataataattgttgagaaatgatctcatccctttgtacctatataagtaaagtattccattaataaagagaatagagttttcactcttcat

SEQ ID NO: 24290 - DNA, 331 bp, Zea Mays
ataataaaaataaaaataaataaaaagtgagagagggaggaaggcgcacacttcctccttccttctttccctcttcgtcttcgcttggccggtgggtggtgcggtggggatgcggcggctatggcggtggtaccagcagtgcctggccgcgcacccggtgcgcacgcaggtcgtcagctccggcatcctctggggcctcggcgacatcggcgcccagaccgtcacctactactccgctagccccgaccgtcgcggccacgacagcagccctcccgaccccgagatacgagattggaaattcaaggaatcctgactggcatttcgtttggtc

SEQ ID NO: 24291 - DNA, 425 bp, Zea Mays
aatctcctctctctctcctcagctcccccctgcctcgctagcgatataacaacccatgtcagcctgcttgccagctcccaccagagatcagagcctcttggctaagctagagtgggagggagggagggagagctcgccgtttccgacacatcggcagcgccggagatcctgaaaagaggtgagcatagggctcctctgttcttgcctaggttttccttgaaacaattgtcggaaaatcgtccaatctgcagtgccagcagagtacctgatcctcgaactttctcgtggaacagaaagtttgcagatgaggacgacagggaccatcatgaaccttcaccgagacatggacggcagggagcagatgaggacgaccatccagaaccaagaacaggtcttcagacaacaggtacccgcaaaacgagcac

SEQ ID NO: 24292 - DNA, 814 bp, Zea Mays
ctggcttcatctagagggaccgtctcctctcctgcacccagactcctctctctctctctctctctctcccctctgtgtgcggtgtgccctggcctcctccgccgccattgcagcgagcaagatcaatccctctgctgccattcatgattggcattgagcctgagttggtgctgttcatcgactgcccaagggaggagctggagcggcgcatcctgcaccgcgatcagggaagagacgacgacaacgtcgacactataaggaagcggtttcaggttttccacgactccactctacctgttgttctgtactacgacagaatggggaaggtccgacgggtagatggcgccaaatccgctgatgcagtctttgacgatgtgaaggctatatttactcagctactgaccactcaggcaagccaaggtggcaatgcgagcagcaggcggagcaatccgccgctttgttcagtgctctaggatgaagcaacatacctccagctccaaataaaaaaaagaggatttcagaaaacacacacttgctgtgcgtatgtggtgtgttcgtgctgtgctgtgctgtgctgtgcagatttaatggcttgttaaaaagaaacagagaataatggccctccccagctgcagctggtatggttgttcgctcagtggcagcactagaggctgcgagcctgctgcaaacacacagcttgtatttctaattgtaaaatgtagcgaaatggatgaatgtgatgtgtgcaactcattcagtttgctttgctgcatctcatctgatgatgcttgtgatggctttcttccgcaaagct

SEQ ID NO: 24293 - DNA, 915 bp, Zea Mays
ccatagttagcatgagacccactgaacgaatatgcataactacatttgcattaaaaagaagattggaccaaatgagctacaacataagattttatttgatagaagggtctaatgaaaacattggaccatgagagtggagaggcagggccattgctactgcaagtcgcccctaagcctggtactaagagttgtaggaggcaagaattcacagttatctttgtctacatgctattctttgaacacaatatttacgagcttgataggcctgttttggaatacaaattatgtgtccgataggtttatgaggttgtcaagttttcatttcaatgcaaatccagctggacaacaccatgtcacaaagcagtgtgcttctagatacagttcagtcttggcgtcatcgaatcaatgaaacatgaagttagaagcacaccgagatccagtggcttgtgaccccttgaccctttagaggaagcgcactagagtcgttggcaagaagaagaggatcgccaagaagaagtctgaggctgccgagtaccaaaagcttcttgctcagaggctgaaggaatagagagaccgcgagagcttggccaagaggaggtccaagctttctgccgcttccaaggcttccgctaccatcgccgcttaagaatgttcgatgctttgatatgtttcaagacctatcttgttacagcttaaataccttatgctactctgattgtgttgcaacttgcaactgcccctgtacttgatagatttgtattagatgctcaagctacagagggtaggttcctaattatgaccatatgactatgtactaaattatatatctgttgctaagttaaaatacatacaaaataagtttactccgaccatcttgtagaaaaacaagttatagtgactaaggatatctgaatt

SEQ ID NO: 24294 - DNA, 722 bp, Zea Mays
ctcaattggactcctgggacagccaaaatataggagttagtttagatcacataccactttttccattggaagaaaggaacaccttttgctgatgaccagggaatgtacaacgcattgacttggtgggagcaaatggataatggcaaacagcttactcgtaataggaagttcctcattgttgttcctgttgtcctgtttatatttgatgcggccccctctggagggcctctttggcgaccgtagaggtgagaggaggaggaggaggctagaaccagggatagatctgagagggtatctgatagctctgcacaccacagactaccaacaacctatgctcttcctcaatacccttgccgtcagtgtgcttgtggtcgcgaaactaccgaatatgcacaaggtccggattttcggaataaatgccgagaactgagcaacgtcatccttcgccagacatttaccctatatgcgcttttcagaacggttttgtgtgttcccccccccttctagtgcctttagttgggctcatcagagcaccagtgttgaaaaagttgttagcaggatgggccttggtcgctgtatagagagatgctcggaggcgtgctgtacatctgatgtgcacggattctgtacactcttaatgttgctatatatacggtttgttgcaagcatctgtcggttgctatatgtacagtgtggttcttgcagagcgatgtgtttcctcg

SEQ ID NO: 24295 - DNA, 151 bp, Zea Mays
tttttcttttctttttttcttttcttttcttttttcttttcttttttcttttcttttctttttattttttaatcccaaatttgaattcaaatctttgttgtgaatttgtactttagattaaatattcaaatcaaagatgccagtatgaaaa

SEQ ID NO: 24296 - DNA, 239 bp, Zea Mays
aggtgaagagcaggtagcctaggaggaggactactacgaggagtacgaggaagtctaggtggcgtctcctagtcagtttaatggcaccaaggaataatattagttcgctttattgttatcatttgtttttgtcagacacttccgctatgtaataatgtttgtgacatttatatctatacacttggtcattatatgtgttgttcttttttggtgcatatatgagacgcacccggctttac

SEQ ID NO: 24297 - DNA, 2614 bp, Zea Mays
atggggggaaactggtctgggaaggagagtggtggccgtgcctgccctccccccgcccggccagcggcaaacccaaaatttgaacccgccgcttcgactgactactaccccaccatccaaaaccccactccggcctccgccgtcatttcctctccccgccaatccgccaccatttccagttccgaccgacctcgaaaccctagcccccagaccatcccactcgcaaccgccatgccggacctcccctgcgacggcgatggcgtctgtatggtctgccgcgtcgcatccccgccggaggtcgacctcctcacctgctccacctgcaccacgccctggcactctccgtgcctctccaagccccccgccctcgccgacgccgccagctggagctgccccgactgctcccccgactccgctgccgtcgccgctccctcgggccccgccaacaccctggtcgccgccatccgcgccatcgaggctgaccacacactctccgaccaggagaaggcgcgccgccgccaggccctcctcaccggcgacgcccccgacggcgcggacgacgatgacgacgaagcgtccgacgatgcccttgagatcgtcggcaagaacttcagctgcgttttctgcatgaagctccctgaacgacccgtcacgacaccctgtggccataacttctgcttgaaatgcttccagaagtggattcaaaatcagaagaggacgtgtgggaaatgtcgggcgcagatcccggccaaaatggctgagcagccaagaatcaactccgcactagtcgaagttatcaggatggctaagatttcaaagaatcctaactctgctggctcagcagttccatatcactatctacgaaatgatgataggcctgataaggcctttacaactgacagggctaagagggctggaaaagcaaacgcatcaagtggccagatctttgtgactattgcacctgatcattttggccccattcttgcagaaaatgacccccgcaggaatatgggtgttcgagtcggggaaacatgggaagaccgacttgagtgcaggcaatggggtgctcactttcctcatgtggctggcattgctggccagtctacgcatggtgctcaatcagtagccctctcaggagggtatgaagatgatgaagaccatggagagtggtttctttacaccggaagcggtgggagggatctaagtggtaacaagcggacaaacaaggaacagtcatctgatcagaaatttgagaagctgaatgctgctttacgcattagttgcttaaagggctaccctgttagggttgtacgtcgtctatatatgcttcgtgtcctccaattgctggacctttgtctcactatattgtcttaaaaggtcgcacaaagagaagcggtcctcatatgctcctgaatctggtgtgaggtacgacggggtttacaggattgagaagtgctggaggaagattggtattcagggtaagttcaaggtctgcaggtatctctttgtacgctgtgacaatgaaccagctccttggaccagtgacgatcacggtgaccgtccaagaccattgccaaagataaaggagctgcaaggtgcaactgatataacagagaggaaagggcgcccttcatgggattatgatgataaagatggctggaaatgggtggtgcctccgccagtcagcaggaagcctgttctatctggggatcctgagaccgacaagcaaatccgtagagcaacaaagcgtgttcatttgtctgttgctgaaaggctgcttaaagaatttgcttgttcgatatgccgggcggtgattaaagaaccacttacgactccatgtgcccacaacttttgcaagacttgtttgcttggggcatatgatagccagtcttctataagggaaagaagccgtggtggtcggactctaagggcacagaagattgtgaagacgtgcccttcttgcccaactgacatctgtgattttttagagaatccccagatcaaccgagaaatgatggagctgattgagactttgcaacgcaaggctgttgaagaagccaagatgacttcagatgatgctgaggaatgtggtgatggtgattcggaggaaaatgatggtgatttggtgaagggagaggatgttagtggtttgaatgagggagagcaagacagtgcagacgctgatgctaatgttgaaggttctgtgaagattgtggttgaaatcaaggaggaaggaaaagatgataaaaggtcaaagatgggcgcgactgaagtggtggatgtgttagttgatgaagatgctgtgaagcagacgaaaaagcgcaaggttgatgctgaggctggcaccaacggtggcaagaggatgaagagcagtagtaccgtggaagaggttgctgtgtgcgtcactcctgtgaaacggagcaggaagagtggtgatatggatgatgagcgcaacggcagtcctgctgtgagcagcggccgctggtgactcgcacagtgtggatgacactggatctgctgatattccggcgaggaggactagaagcccgtgtcagagctgatgctggtcgctgaaggggtagaaggaaacggggaagcggaaaaccagccgagc

SEQ ID NO: 24298 - DNA, 1364 bp, Zea Mays
gtccagataccatcgggcagtcaagaacagatgaacggtgatagttgtgattcccagtaggaaccctcttatccgttctcgtctcctgtcccggactcccgggaccggggaggccgggatcgagaagggcaacgagcgcgtcccgtgctcgccgctcctcgccgatggcgtcctccactctgccagcctaccccttccgtatgtctcttcccggactacgagccccggaccctgctaaggttaagcacgtatccgttcgagcccccgctcgccgtcttcccgttgcagcctccgcggcaccatcaggcgccgcggcggcggcggcgagggagcgcaggcgtttcctggagagctacgggctcaacccaaacgacttcgaggaagatgcagaggagaatccgagggaagagagaaaggacaggcggagacgtcggcagtcggggagaggggagcaaactgcggaagcggcagtgactccagcgaaggtggaggagcctcgggagactcacaaaatgctccaggtgctaggtggaaaagtccgcagaaggaaattactttcacccaaagataggaatgtccgtccaatgatggaagttgtccgaggagcagcctttgacattttacagtcagctggtggttctcctgcttcactcagaccgggtcggtggctagacttgtatagtggtactggatccgttggaattgaagctatgagccgaggatgttcagaggcacatttcgttgagatggatccttgggtcatctctgaggtcctcaaaccaaatctggagtgtactggatttattgacgtgtcacagatacatatgctccgcgttgaaaaattcttggccaatgccgaaaaatctcatggtaaatatccttcattcgattatatcagtgtaacaccaccatatctggaggtcaactatagcacactgctcgcccaacttgcaaggtcaccattggttggaaaagactgcttcatcctagttgagtacccgctgaaaacagacatggctgaatcatgcggaaaccttgtacagatagctgacaggaggtttggtaggaccaacttgctgatatatgggccaacttggtcagagaaaaagaagaaaagatgatttctgaagggggggttcaggcaaggtttgcatgcagggtgtcatgataatcacggttgggaatggttaaggtttcaagatttgcacaggggatatttggcctagtgtaaggcataagaaggtggttgatcttggttcactgggcctatacctgaataacttgcacagcacagagagctcgcatttcgctttcctttgtggtcagagatccacatccgacaagagggggggggggggggggaa

SEQ ID NO: 24299 - DNA, 1455 bp, Zea Mays
ttaaaccctaaaccgtctgccggccgccatgcggcgccaccaccacctcttcgttatcctccgccgcgcggtcgcctcctctgcctcccagcgcgcgcagccccttcccttgctccactccgttgcgctccgaaatggcgcagctggttccttctccccgtgcttcttctcctcccgcgcccgttcctcggtcggcgccgcgaagagccttgtggaagacgaggcggagctcagcgactggattagcgacctcaaaactgactcgttccacctcggtctcagcagcggagacgaaggcgatgcgccgtccacccgcaggtcctcggtcggctcatccaggggcggccgaggtgggtcggactccaggggttcgttcccgaggtcaagtacggccggcggtgagttcagtggagacagacgcggcggcttcgagcagagggggaggatgattagtagtggactggatgatgctgattccggctttggttcctccaggggaaggcggggacggggtgagaggacgtcggggttcgtgagaagaggagggagggggaatggatttgatgaggaggccacatttaggtctcctagggagcagcgaagccagcgagggagggcttcaggtgtggcgagaaggggagggaggtacagtgactttgaccaagatgatggtgacactggatttgggtcttcaaggggaagacacggtgccagtggtcaactgtctgtatcctcacacagaagaggaagggtgagtgatttagatgacgatgaggatagtgatgatgatttggttgggtttggggatcttgatggaaagcagcatcatggtcgcaggaaagggggaagggaaaacacagttgggctgggccgaggtcggggcaggagggatttgggtctgtcacgaaagggagggagttacaatgattttggtgattatgatgacggaaggagaaggacgtccgatcttttgcagagaacagggagaggaagcgatttagatgacgatgaagatgatgatgctggtccagttgggtttgatggttacagtgtaaggcagcaaggtggcaggagaggcaaaatggcgaagagtgttggaccacatcggggtgggaggggcagcgatacggactttggtcaccgacagccaaggggtctgaaaaaaattgactttggcttgtcagaggatgatgatgaggcgggggaagttgatgaggaagatgagccatcggggttcgaagatgatctttttgaagacgagggtgataaggaggatgtgggacatataataggtaataagtctggctcatctatgttacccgaagatgagccagctaaaaatgaaagtgtacagggcagaagtgctgggggtggtgattcttatctgagccagaagagctatcactagtactttattgttcgaaccttctacttctgcttccaacttggctgcaa

SEQ ID NO: 24300 - DNA, 3251 bp, Zea Mays
ctgccaagtaccagtagaccgggggagagctcgaggagtagggttggagtcttggagaggcgtaggggtgcgtgcggcgctggagttgttgttgttgctggcttcgcctcgccggcttacgttttcttcctcctccgcggcgtggctgccactgccagtgggtgtggcctgtgggcgtcgagtcaagacagtgtcgtcgtttcatctccgcggtcaggtttggtttgttgtctagtgcagcggtactgttcctgtagatgtagagcagcagttcgagccttcgagggcgagggagatggactggcctggtcgctgtgcgccctgtgcgggcttccgccccgaactggggcgggggcgggggcgggggcgaggtgttcgtgggtaagggtcgcgggcgttgtgcggctgggaggcggctaccgaggcgacggaaataaagcagtagtagacgagagagccacgatttataaagcgggttttgtgtgggtgtggctcgctgctcgcctctcctccactcctctcactgctcctcccacctcgcgtttgttcggcgggctcaggtggctgcttgctggccttgctgctgcttcagatccttatcccctccgctacatcgaggccgttcggagctgtcctttctgcttcggatgggagtggcggagcagtgcatggaggtgcggggcgcggcgaatcggaggtgatcccggtcatggggtagagtggagggggcggagtgtgtgtggtatggagccgtcccgtggcgccactggcggcgcgcggcggtggggggaggcggagaccgaggttgatgcggcggaggaagggagacgggcggaggacggcggcgaggtgagcctgcgggagtggctggaccggccgggccgggcggtggaggcggcggagtgcgtgcacgtgttcaggcaggtggcggaggcggtggccgtcgcgcacgcacagggggtggccgtgggcagcgcgcggccgtcgtgcttcgtcgtgtcgccgcccttcgcgcgcgtcgccttcatcgagtccgcctccggctccgacgcctcgggttcgtgctctggctccgacgcctccgaggacgccgacccggacgcctcgcctccgcggcgaggggacggcgccggacgcggcgaggagcgcgcggggaagtcgttcccgctcaagagcgtgctggccatggagctcaactggtacaccagtcccgaggaggcggacgacagcgccgctaccttcgcctctgacgtctatagactgggtgtgctcttgttcgagctgttctgcacattcgaaacaatggaggacaagatgcgggcaatggcgaatctgaggcaccgggtgttgccgccacagttgctgctcaaatggcccaaggaagcatctttctgccagttgctaatgcaccctgtgccagaaaccagaccgaagatgagtgaggtgctgcagagtgaattccttaatcagtcaaggaatagcctggaagaacgtgaagcggcacttaggttacgcgaagagatagaagaacaagaattattgctggattttcttcagcagttgcagaaaagaaagcaagatatggcagacagtttgcaggacactgttgctttttctctcttctgacatcaatgaggtactccaccagcagtctgcacttggccactgtgtgaacttctcaccagatttggataaagaggtgtgctctggaactgttgaagatcagagtgattgtggatccaggaagcgttttagacctgagctgcaaggcgttgatatggaggaaaataatcgtagtgtggaagaatgttcaagaacagtgccgtcctctgagttaatccaggaaaatgttctgtcaaaaagctccaggttgatgaagaacttaaaaaaacttgaaacagcttattttctaacaaggtccaagttggcgaagcaagttggcaaccagataaatagttgtaatcgagttgttaagaggactactggttcagctgttgggacagaagcaagttcaatagatgatttttctttggaaaggcaatatggtagaaggcaaagaggttgggtgaactcttttcttgagggattgtgcaagtacttgtcattcagtaagttgaaagttcgggcagaattgaagcattgtgattcactgaactcatcaaacttagtatgctccgtagggtttgaccgagatagagagttttttgcaactgctggtgtaaataagaagataaaagtgtttgagtataatatgattgtaaatgaacaccgtgatattcactatcctgtggtagagatgtctaatagatcaaaactgagttgtatttcctggaacagttatatgaagagccatatagcatctagtgattttgagggtatagtgcaggtttgggatgttactaggagtcaagtttttgttgagatgagggagcatgagcgacgtgtgtggtcggtggacttctcaattgtggacccaacaaaattggtcagtgggagtgatgatggatctgtgaagctgtgggatatgaatcaggctgggagtattggcactattaaaacaagggcaaatgtgtgttctgtgcaatttcaacctgatactgctcgctccattgccatcggctctgcagaccacaaaatttactgctatgatctacgtcacatacgagctccttattgtacactagttgggcacacaaagactgtaagctatgttaagtatctggatgcatcgacaatagtatctgcatctactgacaactcattgaagctttgggacttatcgatgagtccaggaaggataattgacagtccagttcaaacatttaaggggcatacaaatacaaagaacttcgttggcctttccatatctgacggttacattgctactggctctgaaacaaatgaggtttttgtgtaccacaaagaatttcccatgccagtgttggcctataaattcagcgtgacggaccctatatcagggcaggagattgatgaccagtcacagttcatttcatgcgtctgttggagagggcagtcttcaaccctactttctgcaaactccagcggcaacattaagatcttagaaatggactgaggattggagttgggcatctgctgagtctcagctataaatggactgacttcttaccaagttgtgtgcgtgtgaatttgtggcaacggagttgccaacggtgcgtggtgcagagttgggagaggagcatggacacgcgcagcgggacggccgcgaggcc

SEQ ID NO: 24301 - DNA, 3146 bp, Zea Mays
atccagcccagccaggaggaacaagcggatgcctttgatcgattccactgcaccacgcttctctccatttctttctggcgagagagagcgagacagcgagcgggcgcctccctcctgagctgtagtgtgctgctccgtttggaccagcgagattactgccgcgtattgtacctccctccgctaccaccaccaccaccacctgcgtagcagcgaggttatgtagcgcctcggaggaggagctagctgtagctagacacctcgtggtactagtactagtagagccgcccgctatataccgctaggccactggagtagcttgccaggtccaagcagccagccctcccggcccggattgcgctcgaagcaagcggccgcccgaggcgaggcgtgcgcgcgccgcgatggacttcggcgacgacgtcatggacggcggctccgacgcgcagcgccgcaagaagagataccaccgccacactccgcgccagattcagcagctcgaggcgatgttcaaggagtgcccgcacccggacgagaaccagcggatgcagctgagcagggagctggggctggagccccggcagatcaagttctggttccagaaccgccggacgcagatgaaggcgcagcacgagcgccaggacaactgtttcctgcgcgcggagaacgacaagatccggtgcgagaacatcgccatgcaggaggcgctccggaacgtcatctgccccacctgcggcggcccgcccgtcgccgacgaccattttgacgagcagaagctgcgcatggagaacgcgcgactcaaagaagagcttgaccgggtgtccagcctgacgtccaagtacctggggcggcccatcacgcagctgccgtcggcgcaggcgctgtccatgtcgtcgctggacctgtccgtcggcgggctcggcggcccgtcgctggacctcgacctcctcagcggcggctcctcggggtatcccccgttccacctcctcccgatggcggtgtcggagatggagcggcccatgatggccgagatggcgacgcgcgccatggacgagctcatcaggatggcgcaggccggcgagcacctgtgggtcaagacgggcggccgcgaggtgctcaatgtcgacacgtacgacagcatcttcgccaagcccgacggctcgttccgcggcccggacgtgcacgtcgagggctcccgcgagacggggctcgtcttcatgagcgccatcggcctcgtcgacatgttcatggactcgagcaagtggacggagctcttccctgccatcgtgtccaaagcgcgcacggtcgacgtcctcgtgaacggcatgggcgggcggagcgagtctttgcttctgatgtacgaggagctgcacgtgatgtcgccggtcgtcccgacgcgcgagttctgcttcctccgctactgcaggcagatcgagcacgggctatgggcgatcgcggacatctcggtggaccagcagcagcgcgacgcgaggttcggcgcgcccccgtcgcgctcgtgccgcctcccgtcgggatgcctcatcgccgacatggccgacggctcgtccaaggtgacctgggtcgagcacatggagatcgaggatcgggttcccatccacctgctctaccgcgacctcgtcctcagcggggcggcgttcggcgcgcaccgttggctcgccgcgctgcagagggcgtgcgagcggtgcgcgtgcctcgccacggccggcattatgccgcaccgggacattgcagcggcaggagtgacgccggaagggaagcggagcatgatgaagctgtcgcagcggatggtgaacagcttctgcgcgagccttagcgcgtcgcagctccaccggtggacgacgctgtcggggcccaacgacgtgggcgtccgcgtcatggtgcaccgcagcacggacccggggcagcccagcggcgtggtgctcagcgcggccacgtccatctggctgccggtcccgtgcgaccgggcgtttgcctttgtccgcgacgagcatacgcgctcccagtgggacgtgctgtcgcacggcaacccggtgcaggaggtgtcgcgcatccccaacggctctcaccctggaaactgcatctccttgctgagaggcctgaacgcgagccagaacagcatgctgatcctgcaggagagctgcaccgacgcgtcaggctcgctggtggtgtacgcgccgatcgacatcccggcggccaacgtggtgatgagcggcgaggacccgtccgcgatcccgctcctgccgtccggcttctccatcctgcccgacgggcggcccggcgcgtcgtcgtcgagggccggccaggcgccgtcggcggggtcgctggtgacggtggcgttccagatcctggtgagcagcctgccgtcggcgaagctgaacgccgagtcggtggcgacggtcaacagcctcatcagcaccactgtggagcaaattaaggcggccttgaattgcgccagccattgatggagccctgcccggccgatggatccatatggaattgatgcgtgcgtgcatgcatgcacgcgtaggtctcttctcctcccctcggccggccgcctgccgctcgcctgctggctgctgcgaggagtgaattcccttcaaggcgctggttcgcgacggggttcttggttggttgggggccttcaatgctggccattcatggaggcggggctgctgccatggtgtcgcccgcttggggttcacctgccgctgttgctgcgccgtccgatcacccatgatcattcagctctctctctctctctctcttcccgccactcatgcatgcatgatagcttttcctcttgctctagcatctaggtttcccgttcctgttacaggatttgaagcttgctcgcgaggctttgcatgaaacggaggagtcaagaacgcaccatgctcgtctcattcctcttgctgccgtcacgctcggttgttaattaattccattgctcttttaatttgtgcctcccccctctccctagtttttgcagtctcacattctgtagtctgcagcagaggatgatgaatggttcgggtattgacttctgtctaatggtgttaagccttcaatgatcattagttctacttgttttttagtagagataattaagacaaataccactgtcactg

SEQ ID NO: 24302 - DNA, 878 bp, Zea Mays
gcaaggacctcgtgcaataggtttctttggaacccgcaacatgggatttatgcaccaacagcttattgagatcctgagctatgctatggtcataacaaaaaatcatatattcacatctggggcttctggaacaaatgcagctgttattaggggcgctttaagagctgaaaagccagagttgcttactgtaattttacctcaaagtctaaagaagcagcctcctgaaagccaagaactgttgtctaaagtacaaaacttactcgagaaaccacagtatgatcatttgccactaattgaggctagcaggttatgcaatatggacatcatctctaaggtccaacaggtaatctgcttcgcgttccacgacagcaaactgctgatggaaacatgccaggaggccatgaaccttcggaagatcgtgacactcttctacttggattagctccggtagggatctagtctcctttttttttgggtccgtggcgtaggctaacgttggggggataaaaagcaagctgaacagtttagttagtttcggaatatattggataggtggtgcggtgaccttctattggaggagaaagtcattttgtttctcccattgttttgattcttgtcacaaagaaaccaataatcttgtcgatatgcctaattcgtcattgaagggaataagattattagctggagtatatttgttgttgacctcaaggattatagttagttcgtgctccagtttttccatctattttatgtcagtttcctgcttttttatttgagatgagatgtttatcttgattgatgtcttatttttcatttttcaagtgcattattaatatggttatatctttcaaaaagcgagttgggtaaaattaaatttc

SEQ ID NO: 24303 - DNA, 1770 bp, Zea Mays
cctcattcgcgaaaagaaaaacacaaggcgaccgcagagggcaggacaggacagagacgccgaggctaggcagtccatctgttggggtggccagtggggatctcgccggccgggaggatccaaatggcggcggcaatagaggaactgcggctcctgggatccatccctgtactggaaggtccgggagaggtcgacggcgtggtgggtgaggaagggcgaccgcgaggcggcggcgacgacgaggagatcctgcgattcatggactcggtggacagctacctgctcctcatggactccctatcctccgctcttcgtcagggctggcttgacctggcaagtgctcgccattctatgggcacatcacgcgtttcgagtacactgtttgatcacaaggagcagtctgctgccactaagcttcaagttgttgatcatgatggcctgaaatcatcagagtcaataccacactttgctctatcaaagtggtctttgcaagaagaatgtcactccacctatgatctcagtgagagagattttactgagccaaagatgaggcatcgaggatcagttactaccccagaaaagggaaaccatgaaagtgcaaacaccacaacactgtctacaggtgctgatgctagcaatcgtgttcaaagagcgagatcaaaagcattatcagtctttgggggattggtatccccaaaactaagaaccgcccaactttcatttgaaacagcacttgacttgattgtggagctagcaaattcaaggtcgaatatgttagctagtttctcccacttaaaagagtgaagacattatgttatgagattttgtaccttgggcaccatctattcagcactcatgagatcgcagcaactgtaaactaagttttgagatccagtatattttaagaacgactaaatagcatataatgcttgctatgctgattactcgctgcgaaggtgttgctaacatatctgtgaatgcgagaacacatgctggaagcagtcagaaattatggtttgattataaacctcctcattttctactatgaaaacatgattctcgtccatgacgatccgaccaatgtagctctgatatgtgattcaattcgacatacgcaaattctgaacatctcttgaccaaactgcatcggatacgtccgatgtccagaacgatgtattcttcgcaacaggcaccaaaatctcgtcaagcagcagctatacaattctagacagacaaaagaaacgcgaggtatgcctgccgcggcaatctgctgcgcacggtcgtcgggccgccggctacatcaagtaaccttcgacgctaccgtcgtccgaggggcgaccgtgctcgctcatgctccccctcagcctgtagaagctgcccctccccttggtgcgcagcgggccggaccagtcgtacatcgccagggactcgatcttgtccagcaccgcgctcgacgccgaccgtggcctgcgctcgtcggcgccggcagggtccgagccgtatcccagggggagcgccgggcccggagtggccggcgggtcgtcgttccacgagctcctgctgacgtcgttccacggggactcctctgttgcgccgcccacgaaggagccgctgcaggtctcgtcgccgcctccgccgctgtggatcagcttcagcgcctgcacgacctcgcccatgaacggccggtgcgacgcctcgacgtgcacgcacatggacgcgatggccgccgccttggccagcttctcgaagtcgtaaccggccgggagcgac

SEQ ID NO: 24304 - DNA, 1283 bp, Zea Mays
ttcaagcgcgcaactgacgcattggccgtaccccctcgcggcctctcaactatccccaccccaaagagaaaaggaaataaatccccaattaccgacatcgacgccgacggcgatgtccctccgcaagcgccagcgctcggcgagcagctcccgcctcaccgccttctgctcgccaccgtcccctcccgctcccccgtctacttccagctctcccaacccgcataccttccccaacgccgacgtcgtcctccgcctcttcctcaacccctcctcccccgacgacgtggacgtcaagcccgacatcgaccgccacctctccgcagccgtctcatccggaaccttcgtcgacctgcacgtctcgtccgcgtccctcctccgctcccgctacttcgccgccctcctttccgaccgctggcccaccgccgcgactggccgcctctccctcgcggtggtggcgcccccctcttgtccccgcccgttcgatgcccacatcgaggtgctccgcctcctccacactctcgatttcgcgggtgccatccgctcccccgacgatgccctcgacctcctccccatcgcactcctgctcctcttcgacgcctgcgtcgaggcctgcatccgcttcctcgaggccgtgccctggtccgaggacgaggaggcccgcatcatcgacctggcgcggctcctccccgccgatgaggcagccgacctgctcgccagggtttctcctcctcccgtcgccgccggcccttccgctgcgggggtggcccccaggtcgccctccgaggcgatgctgcacggcctgatccactcggcgatccatggccaccccgtccacgctgccaccaaggcgttcgtagcgatgctccttaaggactatccgtcgcggaactgcgtccacaaggtgctcgacgaggcatttcagtcgcgcctggacacaatcaaggaactcatggggaagtacgctagcccggatttcagggttgcggtggacagtgatgaacgcgaggccatacagaggcttaacctgcagtctgcggtgttgaatgtgaaacacctgtattggctcatcgagaggatggtcgatctgagggtggcagataatgcggtgacgctgtggagtgatcaagctgccctggctactgatttgcagaagttgctgaatgatgcagacatgtggcggaacatgacgcctgggcttccaatgcttgtgactcgttgcacactcaagctcgccaattcagtcatcactggggagactctggtacctcggcaggagagctgcg

SEQ ID NO: 24305 - DNA, 668 bp, Zea Mays
gggatatacattgatgttagagtcagacaaaaacaaacatatttgatgatagcagacaagctgcttcaattttgttccctgacaaagatcagtccttgaagttgaaaaaacaccatgggcgagcagaggctcttctgttagcagcctatgggaaaggccttgtgctgccatcggggaagttcagcaaaacctcagtttgatgtctatggtgattgcagattgacttgccatttttttgggggtaaacagaggctcttctgttagcagcctatgggaaaggccttgtacgatgcctatggtgattgccgactgacttaccatttcctgtattgatggtactgcaaattttcatttcgcttaggaggccccaatcaagacattaaggttgaatctgctgtaagtttgcaaaccgtaatagagatcatagctaacccatcatttttcgtggaatgcattacagcattagacatttcccattgtgtccttagtgtggcaggctacctagatgaaatctggatgttgtaaacatgtaatgatggaaactggaatgaactggtcgtcttttcggtgaaagtggactcgtttgctcattttgctacactgacatggttgggttggcagtgttgtgttttaaggtgtttggtttgaagaatgagttagtccatcat

SEQ ID NO: 24306 - DNA, 1616 bp, Zea Mays
actagatagatgctgtcatgctgaggacgaaggcaagcatgttgggcacagcgccatagtatcaaactatcattttgagccgtttcgcgtaccctaaaatcagtggcaacagcgccatagcatcgtcaactccatcaagccgttaccatcaacaacgattgcttgctgccgactgccaagcggggccggtcaatccagaagttggcagcctccaatcgcagcatccctccgagatcgctgccccgtccccctcccccggcttatcccctatcccctcctcccccgctccttccacacaaacctccatgccccttcttcctctcctccccgtcatggcttccaccttctcccccacttccgccgcgagggccctcctcccgggctccacctcccgcccactcttcctcgccgcttcagcttcctcagggcgcattcaaccatccaggaagggactggacttccgccgcggccgattcaccgtctgcaatgtcgccgctcccaccgccgccgaacaggaggcgacggcgtcggccgcgaaggagacccagcgccccgtgtacccgttcgcggccatcgtggggcaggacgagatgaagctctgcctgctgctcaacgtcatcgaccccaagatcggcggcgtcatgatcatgggcgacaggggcacggggaagtccaccaccgtccgctccctcgtcgacctgctcccggacatccgcgtcgtcgtcggcgaccccttcaactccgacccggacgaccccgaggtcatgggccccgaggtccgccagcgggtcctgcagggggacaccggcctccccgtcaccaccgccaagatcaccatggtcgacctgcccctcggcgccaccgaggaccgcgtctgcggcaccattgacatcgagaaggcgctcaccgagggcgtcaaggcgttcgagcccggcctgctcgccaaggccaacaggggcatactgtacgtcgacgaggtcaacctgctggacgaccacctcgtcgacgtgctgctggattccgctgcgtcggggtggaacacggtggagagggagggtatctccatatcccaccctgctcgcttcatcctcatcggctctggtaacccggaggaaggggagctcaggccccagctgctggaccggttcgggatgcacgcgcaggttggtaccgtcagggacgccgagctcagggtgaagatcgtggaggagagggctcgtttcgacagggatccgaagacgttccgtgagtcgtatcatgacgagcaggagaagctccagcagcagatatcatctgcacggagtaaccttggcgctgtgcagattgaccatgacctccgtgtcaagatatccaaggtgtgctctgagttgaacgttgatggactcagaggtgacattgtgactaacagggctgccaaggcgctggctgcgttgaaaggaagggacagcgtcaccgtggaggacattgctactgtcattccaaactgcttgaggcatcggctccgcaaggatccgcttgaatccattgactcgggtttacttgtcattgagaagttttatgaagtctttagctagattgttcttgagggctgccagaacaggcctccttctggtgtg

SEQ ID NO: 24307 - DNA, 964 bp, Zea Mays
atggtgactcagggagagagatacagatacctggacaaaattgggcacgtcttcttctccgcgaacctcgcgtcctcctcgccttccttcctacaagtctcctcccctccccatgcctccctcgggcctcgcttctcgtgctcttcctctcctgcccccgccagcctccaacaacccgcgagggcgccgtccgcccctgcctccgggagcgatgatgatcgcgcgacgcctgctctgatccaacaatgcccccgcccaggcaagcagcttattgaagcatgtaactggcaccgcaagtttgcaaggctatgcggatagcttgttggatgcgacagtcagacattttggttcagcaccgtctgctcagcctgaagaaaatgggtacacaggttcctatgtctatgacattaatgggaacaagtatctggactctcttgcaggattatggtgcacagctttaggtggtagcgagcctcgattagtcaaagcagcaactgagcaattaaacaaattacccttctaccattccttctagaaccgtacaacaaaaccttcgttggatcttgcgctggagatccttagcatgttcactgcaagggaaatggggaaagttttcttcacaaacaatggttcagaagcaaatgactctcagagcaatccaccacaaccacgacgcgaaggactccaagctacaatttctgcatcactaaaacaaaaaaacaacagtaatgcatccaagttctgaacctggaacactatgaagatgcaagggcttgctgcatatggatatttgttttgcatattggttatttatttaggatctagatcaccgatgactatgagtcatatgtaaatatatttttatcataccaaaagtgtctcgaacatatattatatatgaaactatggatcaacttcttgtaatgcaattattgatttttaatatatattattttttcttctt

SEQ ID NO: 24308 - DNA, 3338 bp, Zea Mays
atgccccgcccgccctgctctccgtcgcgcccttccagggatcctccatcgccgctcccgccatcatcgcgcccgcgctccatcgatggaaggtgtcgccccgccatcctcgcctcgctccccgcgacacgcggcgccagcttgtgtcgcatcttctatctattcaccagcaaggtacctggcacagaacccagccgaatcctagaacccagccggatcctagaaatttcccattggcatctggtgaccgtatccggtggttgggcgtcagacgcagcggggcggtaccggtgcttggagttggaccacccgtgcaaggcaccgtggtgcgacgggccgctcggcgcgctggagagcaacgggtgggtgtactcggcgcactgctccttcaagctctttgtggccgatgcgtcgtggtggtgccttgacgggaagtggctcttcttctggggcgactctaaccacgtcgacaccatccggaacctcctcaccttcgtcctcggcatcacggacacgtctgctgtgacacgccagtttgatgcagtgttcaccaatcccattggtggggcagggactctaaggatcacaagcatcttcaacggccactggaacatgagcatgaactatctcggcttgcattccctccggaacagaggtttccggcagctcatccggtcctacttcatgtccggtgatcgtgttccagacgtcatggtcctgaactctcgcctgcacgatggctgctactggaccagcgtccgcatctacgcgcaggctgcggatttcgcagcacagttctggtccggagtcatggacaaagtccgggctcgtgggcatgcagtgcccagggtgttctaccggacgcagatgcctcagatgcagggaaaaaccacgcgactcccttcacggaattgagagatgaagctggtgtcacatactcacatccgcagggatgggtcacgttgcagacacttcctaatgaagtccttgtagtgctgcgaaaggtaatcagattttgttagtagacaacacaaggaaggaagcacaaggaagtttaacctgtatagcacaaggaagcaagcagctcagcctccattttatttggaaaagtcttatacttatcagaaaattctgcaggaaaatcgactgcatttgttgttcttgggtacacaatgaaagatgggaaggcatattttcccccacatgacagtatctatacatattgcagttgaaatggaaataattgaaatacaaggtatgtgcaggtgcagtctattatattggagttaagagagcgctagcttgcagtcacactcgatgaagtcctatagggctagattttaaaagtaagatccagtacaaggttacttcaattgcaattagcgattagccaaaactttcatcttcggtctcactaggcctcactaggcctttcatcttcaaaagaatttataaagatattatttttcagtctatctctacatccctctctccatcttgttatgcaattatgagttcattagatgtcattgatctaaattaatttctatccattatgaacttatttttaatgaaccatgctccttcttcgttgctcacaacagggtccatgtacttggcacatgatatacatatacgagatggacttaaaaattaacaaaggtcttcttttggtggtagataattttggttttcttatgattctctttatgaagtgggtgtggtacctctaaacaaatagatgatctgttgacttatggcagtcaggcattacatttttttgcatgaaatcgacatctgagaagtgataattttgttttgatcgcttctctattgcaagatttagatggctactatcctttgcaattgatcaagaatggtgagctattctaaggaagcttctgaacaatatacctgttgtcctggagtgtcacagatggcaaagatttgcgcttagagaaggaggaagaacggtcggtgctagagtcatctccaaagttcttagctgatcagtttccactttcttctctgtagtctggttgcaactgttgatggttagcacattctttatcttcaattattggaagaaacatttttgcgccaattacatgaaagtggttgcagttttaagggtctgttcaatccctctccaagatattgtaggtgtatgaaatcttctaagcaaactgttaaatacattgcacccgatcagaagggatgctctataatgcagcctgggtgtgatctccgtacatcgtgctccagccgcactcagatctagccttggccgggagacaccgcgacagaggctggacgtgctcttcccgtcctcatgccccatgccgctgcgcgctcttcccttcacctctcactacacggcggctgcggggcaggggtgaaagaggcgaggcttctccagcttctcgaggccggagaccgtttgctcaagggtgtcgttcttgacggcctcctccgacagcgtggacgcgtggttctcaaccatggccttggtcacggcaggaagcagagcctggtgccagagaagctcccagtgccccatgtgttggcagcatatcagcatgaaagatcctatgagccaagagctactagaggctgttgaacaagagaggaacatccgatctaatccttcacgtaatactgctgttttccaccatccaatgctgggtgattttgaggttaagaaactccatcaagaaaagcagttaggaatgatggtggacaaaggcctggtagcaactaggacagggttgagtcagtaccacctgtctcactggcctagaatgtttgaggtgatcaggatgctggaaggagacatgctcacagagagatgggaggtgtcgcagaacgtggacatgccagagttcgtctcatcggagctcctacttcaaaagtacatggattttgcagcggacgaatgctcgcttggtgtagaagccatggagctctctggactaaggtgaccatctgatcgatcgaatcggccatcacacaggtcgcataggtgtcttgccatatcaagcctatattattgttgtattacattggacacatagggaagggaaaaaatccggtgaattatagggtgtgatctgtctgcctatacttgtggtggcattcatttgtgcaaatgattttgatatattgatgtagagaatatatatgttgtttatttctatgtaatcgttgcacactataattttatcaaacaacttttgtattgttgcaaggggcgacaaaaatccagtggattgtagtgtgtgatttgtctatctataactgtggtggtattcatttgtgcaaatgatttgttgtatatt

SEQ ID NO: 24309 - DNA, 1129 bp, Zea Mays
tgaaggagctctgaggatgagacaattcgtagagtagcagcaggagcaattgctaatcttgcaatgaatgaaacaaatcaagatcttatcatggcagaaggaggtgtaaccttgttgtctatgacagcatctgatgcagaggatccacaaactcttagaatggtggctggagcaatagctaacctttgtggcaatgacaaactgcaaatacggttgaggggagaaggtggaatcaaagcattgcttgggatggttaggtgtgggcaccctgatgtccttgctcaagttgcacgtggcattgcaaattttgcaaaatgtgaatctagagcagctactcaaggaaataaggtgggaaaatcactattaatcgacgatggatcgctcccttggattgtaaaaaatgccaataacgaagctgccccaattaggcggcacatagagctcgcactgtgtcatttggcacagcatgaagtaaattcgaacgacattatcaatgaaggagccctatgggagcttgtacggatttcaagggactgttctcgagaagatataaggaagttggcataccggacactgacatccagccccactcttcaagcggagatgaggagactgggaataaaactgtgatgacagagcaacaaagtgcagctggggctggcactatgaagttccatttctcgtgcactttatagaggtacccgttgctctgagtgctggtaatcgacttacctggtttcggcaggcaggcatacacgggcaccacaccgactaatcacaagaggcagtggagcaactttctcctcgagagttcatttttctttgttctgaggggggcagttgaaagcctggacaacactagcaattcatttatttgtaatgatcctagcatagcagatgttgttacctacccaatgcagcgtttgtaatttttttgctgtaaaaatatcaaaggcagaaaaaagtactttcgcagtatacctgttttccgtgaacactagaaagtttttttgtttttgttttattcatatactgcagacgagtcatgtttgctagccgtgattttcttgctttcttaatgcgcgttgacgctttcgtttcttttaccatgtatgctctcagataatct

SEQ ID NO: 24310 - DNA, 846 bp, Zea Mays
gttcccgggttcaatgtctctctccagaaatatagggggtatgattgctggacatgtgtactacttcctggaagatgtatacccacgtatgactgggcgtcgccccctaaagacaccgtccttcattaaggcgctatttgctgatgacaatgttgtggtggcacagccacccaatgctgggattggtgctggtgcaaggttcggtgctattggtgtagatccccaggctcaatgatgaattactttcagtgacctgagggccgaggctgtgactgatctgggatgcggcagtttgtattctctgcgcaaattgcggaactgtacaagccattgttcttgtgtatttatacaggctagatgagagttattgtgcataacaaaaagattagtagtatcggaggcggctaagtttgtcacctgttggcagggcccggaggaaaatggatcgtgatgggcaaacaggccaacccctgttgcagaaacttgttcatgtgacggtttaacatctgacctgctaccctttcatgcatcggtgaatttagtctaggaaactgtttgaagtggggaaatttggtgctttggcagcgagaatttggatggagcgctgtaattgcagaatggtgcaaggaatgactcctaacattgtggacgcctggatggtgttcgttttccttcctgattctgctgtgttcaccgatccggatgatctggtctcctggaagcagtctttgtccatttttccttcatcagctgctctttaaccgtaaaatcggcgttcgtcatttcaagtgttgtgaccgtatcccttttctgttatataaataaaatgtttcagttagctgtttt

SEQ ID NO: 24311 - DNA, 3860 bp, Zea Mays
tctgcccaacaggagcgactccgactccgactccgactccgagggcggtgcgagtgaccttgcccttgtttggattggacgacgactgggtccgcgagctgccagcgcggtctcccaccactatccctctctcccctctccgtttgtctccatcctttctacctcggctgctgcgttgcgtgtggcgctgtgcttgggcagacgtgggcaccatgcctgggtgacttggtgtagcactgtagctgtggcatggagctgaggaagacgacgacgggggagagaagaatgctccccgggtgctaacttggccgccgctgctcaggggacgagtcgagggggagaagaggaaagtccagtttcttcagcttcttggttggatgcagtgaggcgcaggccaggaaggcatcactcgccgagtctgttctagcagccatctccgagctgatgccttcagcggcagccgccgtcgatgctgagcacgagagcttcatggatgtcggcagccacctccaccatggagccctgcccacagtgtcagtggaggcgcagaaggtgcagggttccccagccaacgcgctgcacgtgatggagtatctggctgccaatgttgacctcgccaaggacctcgtcacaaggtgcagcgccatcgcgcagcagctcatggacgacgacctcctgggcataaccgaggacttggacaaggtcatcaagaacataagcaatgagctcaacaagatgccagcagcgacgttcgagagcagcaggtttgcggaaccagcggtcagtggacaccttcaggttgtcaggaaccagcatgatctgttcgagcagcaatcctttgatggctactcggagggagatatgccaatggtcgtggcaatcgagaggccacccaagagaagaacgctgcacaacagtgacatgccgaggctggtggacttcctgcagggaatgtaccaggagtcacatgagatcggtggtcagtcatttggttcactccctgaagtcgcggaatatgtggagccattgtatgattctttcttctgccctctcacaaacaaggttatggttgatccagtgacaacggagagtggcatcacttatgacaggaaagctatagaggattactttgacaagtttacagatggctctgaacctgtgatatgtcctgttacaaagatggccatgcagagcaagacactgaggagtaatcttccgttgaagagcacaattgcagagtggattacaaggaatgaagcgacacgggtcaggatcgcacgcaccgcgctctctatggcgaccacagaggctatggtgcttgaggccatacatgagctgaaggtgctggctaggctgaggagaaagaacagggatcagatgcacaagattggcatcaccaagttcctagcacggcttctggaccacaaggatgcacttattcgctgtgactccctcgacctcctctgcttgttggttgaggatgatacaggaaaggaaatcatagcgaaaaccagagccgtctcaaggacaataaagctgctatccagcagtagtactgatgagaggcatgcatctatatctttcttgctagagctttcgaagtcagagttgctgttggagaacattggatcaactgctgggagcatactgatcctcaccacgatgaagtttaatagctcatctgatcctattgctgccgagaaggctggagaagtcctcgagaacctggagaaatgccccaagaatatcaagtacatggctgaaagtggctacttggatcctctgcaaaggcacctagttgaaggaccagaagatgtgcagatggagatggtgagctacctcggcgagctggtccagaagcaggagatgaccatcaatatagcagggagtgcatcagagatcctcatcaaaatggtgtgcagtggtaatacggcaattcgaaaggcgaccctcgatgtcctggttcagatctcgtcccaccaccccaacgccaagacgcttgtggatgctggtgccgtccctgtcatggtagaggagctcttcatacgaaagattgatgatgagcccatgggctctaagacagaggctgccgcggtgctcgccaacatcgtcgagtctggcttggatccagaggccatcaccgtgaacaaggaaggccacgtcatcacgtccaagtactcggtatacaacttcgctcacatgctcaagtgctccatgcctgacaccctcaacctaagcattgtgcgcgtgctgctcgcgctgaccgctctccccaagcctctcgccacggtggtctcggtcatgaaggagcaagacagtggacagacggtgattgagctgatgggctcgctgacagagtcgcttgtcatcgccgcaatgaggctgcttattgcgttgtccccgcagatggggcacaccattgccgagaagctgtgcaaggccccggggcagccagggaggcttgtcaagagcattggcctgcacgggcggatcatggagcggcacgccatgtcagctactctcctggcgaagctgccgtaccagcacatcgctctgaacctggcgctgatcaaccagggcgcgatggttaccgtgctagccaagatagaggagatgcagcgcggcgagacgcgggcaagccgccatgcgaaggcgtatatggagggcctcatgggtgtgctggtccggctaacgacgacgctgtatgacccggacgtgctcttggcggccatggatcacaacctcacgtcggtgctcacagatctcgtgcggtccgcaggcagcgacgaggtccagcggctcgccgcgattggtctcgagaacctcagcagccagtcgcccaacctttcccagcccccgaccgaggagcggcgcccgaagaagaagaacatcctccggcgcctgcgcgaggcgcacgcggggcgggtgcacgacaaccggaggccgccggcgcacagccgggtttgcccggtgcaccgtggggtgtgttccccgtccaccacgttctgcctggtggaggctggcgcggtggagggcctcttgtgcgtcctggagagcagcgagaacgggcgcgtggtggaggccgcgctcggtgcgctgtgcacgctcatggacgacgcggtggacgtgacgagcggcgtggccgtgctcgcggagcacgacgcggcgcggcacgtgcttcgcgcgctgcggcagcaccgtgacgacgggcggagagggggcggcggcgctgccgcaggcgagacggtcactcggaggtgtttctgggcggtggagaggttcctggctcacggcagcgagcggtgcgtgagggaggtcaccagcgatcgggcgctgccgagcctgctggtgggcgccttccacaagggcgacgccgccaccaagcaggtggccgagagcgtgctccggtgcctgcaccgcatgccggattactccgcgacctacgaatccgtcgaactgtaaccaacacatgacgcgcacgactgcgcatgtcttgcctctcttttatcaagcttcgtctcttggttatgtttgtaaaattggtttttgtgtgtaacatgggttgatgtattgtttggtgtagctaaaggaaaatagaaaaggaaaaactgaagatgcagttatgtatgcaagtataaccaaagtttatagcaagggaagatactagtcttttgattcttcttactatttttttgtgtgtgtgttcagtagttcttttttagggaccgtgttcaattcagtaggttttgacaagagtgcctcctaaaatcagtctccagataatttgttttgtaattttgatgtttcgtttgacatgcctctctagccttttctcgacacgactactagcaagtattccc

SEQ ID NO: 24312 - DNA, 5883 bp, Zea Mays
tctcccccccgtgcgtttcccttccccttctctcctctcctgcctgttcggctccccacactgcagcttcccttccctctcacctcggtgaccgcattgggtgctcgcggggcggaagaggaggcgcgggtcgaggtcggctagcctaacccgtccggccgtaccgaggctggtgggatccgctcgccggccggcaccggggaggtcaccaacgcccatgcttctatgaccgagagactccgggcttgaccaggacggatttgagcgaatatcttgaggttcatattgttgctggaggggaatggaaactccatcagaggccttgaagccggcggaggctaaaccggcgaagccacggccagtggcgcccacgggcaggttcgccttggggactgcttcgtccattaaaaagcgagctgatggttcggctccggcggaggtgggtgtgccccggtcttccttgatgaagtctacctcgtcgctgaacgccagttcggcgacgagaagaagcagcacggggactgctgggaagcaacaggacaatgggagctcagctgctgctaagaagtctagtcctacgctgtcggatggcgcgaggaagactaaactggtgtcagctcccgctgctggctcaaaaccagcagtggagaagaaaacatccttggtcgagaggacaggtgccgatttggccaggaagcctgctgttaaggcatccccaacttcaacactgaagaaggtccagtcaaagacagagagctccaatggcagcagtggcagcaccaggagagtgtcctccaatgcttctgtgccatcgccacgttccgtcacaagcaatgcagcaaggaaactgggtactcaagcatcatctgctgcgtctaatcggcggaagagctcaaccgcagatagccgtgattcgagattcatgatgctgccacaggtggatttgaaggctagcgatgaagtgaggctggattcaagaggtcatcgagttcgtagtctcaagcagctgaggttatcacatgctcttgagtttgtgtatctgagggacaaccttttatcaagtttggagggcattgagattctcaagggggtaaaggttcttgatttgagttttaatgattttaagctccctgggtttgagcctcttgggaactgtgttgtcctccagcaactgtatcttgctggaaatcaaataacttcacttgctagccttcctgaacttcctaacttggagttcctttctattgctcaaaacaggctaaagtcagtttgtatggctcgacagcctcgacttcaagtgttagcagctagcagaaacaaaatatcaactttgaagggatttccacattttccttctctagagcatttgcgtgttgaggagaatccactacttgagatgccacacttggaagctgcttctatcctacttataggtcctactttgaagaagttcaatgaccgagatctgaaccccaacgaggctgaggtagctaagcaatatcctgctcatacagctatttgcattcgggatggttgggaattttgctcccctgaacttgctgctgattcaacattttctttcctacttgagcaatggaataataagctgcctcaaggttacatggtgaataaagcttatgttgaccatccgtttgaagaggatccatgccattgccattttagattcacaaatcttggtggtgagggtgagctagtcctcaaataccaatggtttctgggtggcaaaacaccaacagattttgttgctatccctggtgcatcgagcgaggtgtactggccaaaacgtgaggatgttggaagatgtttgaaagttgaatgcactccaatagtaaatggtgcagaattttcgcccgtttttgctgtatctttacctgtttctccaggtactggatgtccaaaggtcatcaatctggcagtcagtggtgaagtagtggaaggaaacatactcagtggagttcctgaaattgcctggtgtggtggaacacctgggaaaggcgttgcaagttggttaaggcggaggtggaacggcaatgctgtagtaattgatggagctgaggggatggaatatcagttgacagtcaatgatatcaattcaagtttggtatttatgtacacccctgttacagacgagggtgtcaagggagagccgcaatgtacaatgacagattttgtgaaggctgcaacaccatcagtcagcaatgtgcatgttctgggagatattgttgaagataacattatcgtagggaaaggaaaatacttcggtggcagagagggactaagtaaaatccggtggtttagagagaaggaaaatggtgaatttcttcttgtgctatcagacagcatggagtatacactaaccaaggaggacgtggggagacacctcaaatttgtatatatccctgttaaccttgaaggtcaggagggtgaatctgcttgtgcgataacagatgtagttaagaaagcccctccaaaagtattcaatctaaagattgttggggaatctatggaaggaagcaagatatctgccagtgctactgttacaggtggaactgaagggtccagcagggttcaatggtacaaggcatcttcctctgaatttaagaatgaacatgagcttgaagcccttactccgtcacgagtttctaagacattccgcattcctcttggtgctgttggatattatatcgttgcaaagtttacacctgtggcacctgatggtgaagtcggtgaaccagcctatgctacatcagatggccttgtggaaacactaccacccagcctgaacttcttaacagtcactggtgaattctctgagggtcagatattaacagcatcatatgggtatatcggaggacatgaaggaaatagtttatacagctggcaccttcatgaggctgaagatgacgaaggcactccactttcagaggcaaccggtttgctacaatactgtgttacaaaggaagctgttggaaagtttgtttctttcaaatgcacccctgtcagagatgatgatattgttggtgaggcaagatcattcataggaaaggacagagttactccagggatgccgacattactttctcttgaagtaactggtgatgcaattgaaggaacaactatgtttgccagtaaaaggtattggggaggagaagaaggggacacaatgttccgctggatactgacaaattctgatggaaccgagaaagaaattgaaggagcaacaagttcatcatacaccttgaaatgcaatgacattggcttctacatatctgtcttgtgcaagcctgttagaaatgatggagttgatggttctttagtgtcgactgaagcgattggtcctattataccagggccaccaacatgtcaatctcttgaactagctggctctatggttgaaggtggccgtttgacctttcatgctgtgtatacaggaggtttgcggggaagttgcatccaagaatggttcagattacatgatgatgggcacaaggacaagttgactgctgatgaatgtctagaccttgatctagctgatatcgattgccggattgaacttatgtatacacctgtacgagaagacggagtgcacgggttaccaaggagtgttacttctgatacaatcttacctggggagcccaagggtgtcaatcttattctacctgagtgttttgaggacaatgaaatttctcccatcaaaacctatttcggtggcaaggaaggcactggcaaatatacatggtttcgaaataaagagaaacttgataacttggaatttgatctggttgctgaatcatcagaagttgttggagaaaccttaaaatataagccttcattgaatgatgttagttcctatctgattctttattgggttcctacacggcgtgatggaaaggttggtgatcctttgatggctatctctgatgatccggtcatggcagcttttccatctgtttcggatgttcacttagagcagaaaagttcagatgtatattgtggactaggcatctattatggtggatatgagggattaagcttgtatagatggtacagggaatctagtgatggaactaggcttcacatagatggtgctgattcagtcacatacgaagtgacagatgctgattacagctgccgtctactgtttggttatactcctgttcgttcagatgggataagtggagaagaaaaactctctgaaccatctgatgtaattttgccagaactactcaaaatcgagacactcaatttcaaggggaatcaggttgaaagagaaacactgactgctgctgaacaaattccgtacagtgagattcaacaacatatatggaaaaattataagaaagagatgaaatatcaatggtttatttccaatgaatcaggaggcgatcagtcttttgaaccattggcaacccagtgttctcgctcatacaaagtgcgctttgaggatattggtcgttgcctgaaatgcgaatgctttgtcactgatgtatttggacgatctagtgaattggtatccgctgtgactgctcctattttgccaggaaggcctaaaattgaaaagctggagattgaaggaagaggtttccacactgacctatatgccgttcagggtacctatagcggaggcaaagaaggcaagagtaaaatacaatggctcagatcgatggttggaagccctgatcttatctccatacctggcgaaactggaagaacgtatgaagctaatgttgatgatgtagggtataggcttgttgcaatttatacacctgtaagagaggatggagttgagggacaacctgtttctgtttcaacagaacagattgcagttgagcctgaactttacagggaagtgaaacagaagctcgatgatggttcagtcaaatttgaggttctgtgtgacaaggaccgaacacccaaaaaggcacaagtaatgggccatttggagcggagggttttggaagtcaaccgaaagaggataaaagtagtaaagcctggatctaagacatcattcccgagtactgaagtacgaggaacctacgctccaccgttccatgtcgagctgtatcgcaatgaccagcaccgcttcaagattgttgtcgacggtgatactgaagttgacttaatggtgcaaacacggcacatgcgagaccgcatcatcctcacgatcagaggcctcgcccagaagttcaacagcacctccctcaacacacttctcaggatcgagtcatgatagacctgacagtgtaaaaaccaactattacgggaagctgtaccccttgttccgattggttagagtgcgtggttttagtaggattcgtgacatgccagccttttgtgtgtatgggtgtgggacgggccgagcgtgttggattacaattttttccctgacacatctctcaaatcagagcagcatcagctggttgctctgactggtgccgtcgtgcgtcatgaaatgtacatagggtggttagagcgagaaagagagtggtgtttcttggtgctgtatttattatgcactggttgggttgggttttttcgactgccattctcatactaagtattggttctttcttttttcggtcgttgggtttgcatatacttgtaccgacaacacagcttggggtgattgggcgagtgctgttcagaatgcctggtccacacttgtgtacgactggaatcctacggtggcgtattcacatgctgttttatggtgcaaatgtaaattcatctgttcataaacgagaatcaaaatcgtcggccacgtgtattcgtcgtattcgtaccgatgtatactaccttataaaccagtactaatctcacggtggcatcaattatcttcctctgtttcacaaggcacacgtt

SEQ ID NO: 24313 - DNA, 1536 bp, Zea Mays
atgtcaccaaggttgcaggttggctacagaaataggagaagaatagtatgtgagccccatataatcctccccacgtcgtcgtgctcgttttgcgcgtcaaccagcccgccccccaaccccacccagcgcgacgaagccggggggcgatcgctccagcgccgccgcgccagcgacctcaccccccgggagccgccggcggtacccccctccctatcacgcctcatcgaatcctcagatctaagttttttttggttttgtgagttatccaaagttggaccgcaaagatgagtactgctaatcactatcagcacatcaagtcaaccaagcctgttgtaggcaaagcaagaaaattgaaggatctcatgataaaaagtgataataggatatgcgctgactgtggtgcacctgatcccaaatgggcatctactaatattggagtgtttctttgcttaaaatgtggagatgttcatagggcacttggacctgacatttcaaagtgatatcgactccatggttgaggttggtggaaactcatatgcaaattcaatttatgaggcttttcttccaaaagatcacccaaaacccaaaccagattcaacgatggaatataggacgaaatttataagagctaagtatgagacacaagattttttgaagccaagtttgcgcatttcatcaagatcatcttttaaatctaccaattctgtgaagagtgtagatagcaatttctctagcacttcaaggaaggatatctctgaagatacaagagaatttgttggagagctgaatattacagtcgtgaaaggtactaacttggccgttagagacatgctaacaagtgatccatatgttgttttaacactcggagggcaggaagtgtatgaccatgatacgttctcagccgatgatatcatgggtgaagcagagatagatctccaaccaatgatcacagccgccatggcctttggagatacttcacgtcttggtgacatgcaaattgggcggtggttcacgaccaaagacaacgccctgatgaaagatagcacagtgaatgtcgttgcaggcaaggtaaaacaggaggtgcacttaaagctgcagaacgtagaatctggtgagctggagttagagctagaatgggttccgatcctctagactatgataactcccctgatccttttgtctaaaaaactatcctcaagatgcatcaaaattttcaagctgtccactttgatgatcttggacatttttgctggatggcttgaatttgttaaaaaaatgtcattgttaaatatcctggtgtaactgtcagctataatcacagcctttcattttcccccctttggttgtcatgccttgtaactactcgccgtctcttgattgttgttgtattgtcccattgaaaggacatgtgtattataagagatgggcaattatagctagtgaactctttatgctgattcctttttggcgcgcgctgcagtagctatcgtgttattggttttcccggagctttctctagccgtgtcttgtccgctc

SEQ ID NO: 24314 - DNA, 1234 bp, Zea Mays
attgcctttcttcatcaagcaacaaacaaaaaaacaacaggagaacaggcaaaggcctccctccctcaactcaggaaaccatccaacttgtcgatcggccttgcttgccttggtactcctgcttccgccatggttcagatcaaagagttccggatcgtcatgcccatgtccatggaagagtacgagatagggctgagctacaccatcatgaagatggagcagcagaacaccaacagcaaggagggcgtggaggtgctgcagcaggccccgttccacgaggatgccaagcttggcaagggccacttcacttccaaagtttatcatctgcaaagcaagattccgtcatggatgaagggctttgcacctgccagcgccctcgcggtgcacgaggactcgtggtgtgcgtttccaaagagcagaacagtgcccgctcttcagcaagtgctcactcaccattgacactgtcaccaggcccgacaacggttgctctgaaaatgcgcacggtttgagcggcgagcagttagccgcgagagaagtcgagatcatcgacatcgcttccgtgtcgcgggactactggagcaaggcgatcggcgctccgagcgtcgacctgactgccttcaagtcacagcggacagaacgaggccctcttctcaagggatggatggactcgtgccatccggtgatgaccacgtacaagctggtgaccatggacgctcccatatggggcctcggcgaacgcctggaagactgcatcattgcgggggagagggcgttgttcttggcatgccaccggctgtgcttcgcgtggatcgacgagtggtacggcatgaccgtggagcagatccgcgagatggagcggcagacggacatgctgctcaagaagacgctgaagaaggccgggagcaataagcacgagggcaacacgaagacgctcaaagacgagctagtggccgtggggagctagtggccgtggggcatcaaacatgtcacagattaggcatgtgcaagtgtaatgtgtccacaattaactgaagaaaatatgcatcgctgtatgtatctatataggagtacaatgaaggcagccatctgtggtttgtctttaaccccctaaaactagcaagctagctcgtgcaaatagtattatttcactgcttcctgcattctatttctatcttttattaggtgagtgcccgtgcgttgcaacggaaccgtataataacacaataacttatgt

SEQ ID NO: 24315 - DNA, 1514 bp, Zea Mays
ctccgtgccaaaacgaaagggaccgctgctctgctctgcctgcctccccttcatcctccacttcttcctcttggtctggttcgggcagagcatccgcacctgctcggccgattaccccggcgttttctgttccctttcaccccgcgtgcgggcgctatccttcccgtggcgacgtctgggtgaccgctgccgcagccctacactaggttcctaggtattcgccgggcccttccccggcgacgagcacccaccatcttaggctacctctgtggggatcttctgtgaagcaagagaagttacctagcacacaactcaaagttcagtagattattgaggatcaacatttcagccatctgtatgttagttaatatgatggccgatggtaacatctggttagaaagatagaaactcattattgcgctacatatggtagtgcccattcgacataagaactaagctggacattggtagatccaagttattaatggcgcacacttcctgtgatggtgtacatcatgttataagtgtagcacatggggaaactgcatcaacatcaaccagtcatcaagatatgtgcagtgactcggatgaaccacatcaggaagataggctatcaacaagcacacaaaccctgtcatcagagtcttcgccatcaatatcaccaactgcttatagcaccagaaatttatcttttcctagaagagatagtatatatggtcatggaagaagtccatggaattctggtttatggatctcgtttgaaattgtcatgtacattgctcaggttgtagctgctattgtcatcctcatcttttcaagacatgaacatccccatgctcctttgttcgcatggataattggatatacacttggctgcattgctagtcttcctcttatttattggcggtatgttcatcgaaacagacatttggatcaagaacctcagcagccacctacaacatatcctactttgactccttctcagtcatcagaaggacgcaaccatcgtaccagtggtattgttttgcatcttggatgtatctcaatttcttgcccaaggcttagtgtgctggcttatcacttcaagacaggtgttgactgtttctttgctgtatggtttgttgttggcaatgtgtggatttttggtgggcgcagtatttcatcagatgctcaggacgctcccaatatgtacaggttgtgtttggcattccttgcgcttagttgtgttggatatgccattccttttataatgtgtgcagcaatatgctgctgctttccatgcttgatttctgttttgcgtcttcaagaagatttgggtcaaaatagaggagctactcaagagctaatagatgcattgccaacctacaaattcaaaccaaaacgtgtcaaaaactgggggattgaccatgcttcaagctcagagcatcttgatgagggtggcattcttggcccaggaactaagaaggaaagagttgtttcagctgaagatgctacatgttctcaagtgatgcaag

SEQ ID NO: 24316 - DNA, 3623 bp, Zea Mays
gagaagaagaggagtacgagcgtgtgtgtgtgtgtgagagagagggggaaaagccagaaaggcgtcctctgtcctctccttttctctcccctccctccctccctccaagctccaatccagcaaccccggtctccccaccccacctcacgcaggcggcattaatggattccgcggccgcggccacctccctccaccacacccgcctccttcccgctgcggcgagaaccctaacgtgacgcgctgcccccgaacggctcctcctccctccctccacgccgtcgtttgctccgggtgtgctctcgttgggggagggaaaagaaaaggtcgctgcttttctgtgtgggcgtgggtggcgcggcggcccaatgcggctcgatccggattgctccgcgcctcgatttgcctcgggtttggcgccggctccgtgagtccccgcgcctgctgctgccgccgccgccgccgccgttccgcctcggaaaggtttatttagttggtgaggagaaatggatgtggagaaacctgcttccaaggggcatggtttctttgcgctcttcgattggggaaagaagtctaagaagcgcctgttcgtcgggagcacgggcagttctccaaatctgaagaatgctgcagatgggaaggatattgatgatagtacaccaagcacacggtcaaatttgatccttgaagacaccccaagcttgaaggaaagcactgaacatagctgctcatcttcagtaattgatgaagaggctcattcaagaaggagcccgactgttgtggctaggcttatgggcttggattctatgcctgcggcaagctcaaccgaatccaatcccatgccattaaccgtgcaaccacctttccaaaccaacagccatgaagattttattggcagaagttatgttggtagtccccttaagacgccgggtagtcctattgatcggtttaaagtggaagcactgcctcctagacttgccaagaggacagtatctgttgcacagtataagttgctgtctcccatgaaaaatcctaacaatatatcaagcaggaatgcagctgatataatggaagcagcatcgaggatcatcagacctggagtagaaaatatcagtccctacagagttcatgatgttgggagtgcaattgctgcacgtgcctacaacccaggagagctcataggagcccaacaaaggtcacagaaacttaatgaagcactgagaaaatgtgatggccctgcatcttttaggccgccaagtggaaaaccttcagatggaaggttgagaggttcggagggcacctcgacgtccaggatctcacaggcaaatgtatgtgttccagttggtccaaaggtaaaatccggcgatagattagatactgctcgagctatgcatgcccaggaaaaaagaggcatgagaaaaggtggtagaaagcttgaaactctcaagaaccctgaaaataacatggctaaaagaagtgggttgaaccgacaaaaggatagtaaccaaatcggcacaacaagttcatccagtgtgctcatgccaaacagcagaaaacagaatgctacagccaccaaacataaggtgaactcgaacccagcaacccccagtagacaacggagcaatatccaccagataaatgcccatccaagaaaggtgagggtggccagcacatttgctggaaacagtagtcaaggtagcagaaaagtggacttgcagccaaatgctcatgctaacgtaagaaataattctgtacccaaagcaatcccgaagccaagaagattacaagacaggagagcgtactctgatacaagccagtcaagtgatagtattaattctgagagaagccagaggcggattcggcacaatattgtgattgatgagcagtcatctttttcaacaaacaaaaagaaagtcagcactgagattgtttcattcacatttacctcaccagttgataagtcactacatggcatccacttccccaatcattcagtatttacctcaccagttgataagtcactacatggcatccacttccccaatcattcagtggaaaaacagtttttagggaatctgaacactgtgtcaacttcaagcaatacatcaaacactaaacttgatgtcattgatggtgattttttgggactcctgttggagcagaaattgagagagttgacatctggtgtgagatcgccctacactaagacaaccaaaggtgttcaagcgcatcacacttcaacagcttgggaagatatggcatcagcatgtgaaacatctagcattgcttctactgattatgatagggagtcgttacaatctttcaatgatggaaaagctactctcccccagaccgatcttgcttctagaagtctccagtcatctcagcctgtgaagaagtacgatcacgatgtcacggatcaagcagagccgcctgagcgtctcggccgaggtccactcttcacatgggaggcttctatttcaaccgaaacctgtagctcatcagagagctggaggagtgcaaagggaacaagattgtttggttcagccgaaggaggcagaacctgtgactcgacgcgctcgagcaagttcctagaagcggacgcctcgtcagagtattccgacacagcctcatcgatcacggtggctacgacagagatccctcgatcagaaagcaacagttcatgtcatatggatggtagacaggatctgcagtttataagagagatactgaaagccagctctcctgcccggcacatcttctcttatctggagcggttcggcgattcaggtgttctggatgcgcacgtattggaggaactaaacggggatattaggctgttgggtggtgaagagcgcaagggttacaggctgaggcggaggctgctcttcgactgtgtcaatgaatcgttgagcgcgagatgcgcttactacttcaacggtggctacggcctgtggttcacgggaacggcggtcctgcagagcttgtcggcagaagggatccaccgagagatgaccggcctgcaggtcggcgaggagtggatggtggacgagctcgtgtacagggagatgagtggtcctctggggagctgggtcgacttcaaggtggagtcgtaccaaggcggcggagacatggcggcagagctgctaggctccttgatcgacgaagtggtcgctgatcttctgaccaccggctcgttctcgtagcggatgctggattggatggatcctccgccctcactaacgatacctaccttgtttgtatatcggtagctcgtctcgagaggaattgtgtagctagcgttcctaagatgaatggaatgtcactaacgtaccattcattcactattcgatgactgatcgttttcctgtcaaaagtggaaagaaaggggaaacaaaaaagaaacattcttggcctgttctatgggtagtttgatctactcagatggtcatgttgcaggaaaaatagtagctggacaagtcaattttgtgaagccactgacaatggctgttagtgtaggtatgactgcatttttgtttaaagggttcaaaggatgactggctgaatcttattaaaaaggtggcgaattgtatgcgctttttaaatgactaataattgtatgtgtt

SEQ ID NO: 24317 - DNA, 674 bp, Zea Mays
gttcgtgctccagcttttccgtctagtttaatggtttttcctagtcgtcctccgtcctcctcagctctggctgccaaccccaagaagagaacagccttgcctagtcactaggccctagtgtgcccattgcctagggaaggaggaacccaaggagaggtgcgcggctggtggcatgcgagtggcagcggtgccgcgggactcttctcctcgctggccgtgcgcgccgtgccccgacgcgtggtttgctgtgcttcatcgtctgggacttaatgtccctgcgccatcacatgacgatgataaattccaagcatggtggtgatgaagcatgaggagggtgcccaaggcagcaaggaagggactaaacacatagtcatcatcattgcttggacgatcttgaaacattggaatcagtgtgtgtttgatgtcatgtcactgtcggagctgacgatgttgcatgagtcgaacgagccatgtcacctctgggacatcagttgggctatgctgtttctatctaatttaaagggctgtactgagctctctcctaggacattagctgggctatgctgtttctatctactttaatgggggcagatgtacaagaaaactaaccaaagccgtggaatcagcatgtattcggactgttttgtctatctattaatgaaataatatgcagt

SEQ ID NO: 24318 - DNA, 2189 bp, Zea Mays
gtgagatgacccgacgccgaccagattgacctgttgccctgttgagtgtgaaggaggcgcacgcgcttgagctgaagaaactgccgcgctgatctagcccgccgggatgggcgcctcggggcctgcggctccgccggcaacgcatcgccgccgctgcatccagctgctgctgctgctcgccctggccgtcgcgccgcttggcagccgtgggcttcgcgtccgtgccgcgggggcggacacgggagggctgagccgggacgcgttcccgaaggggttcgtcttcgggacggcgacgtccgcgtaccaggtcgagggcgcggcgacgtccggcggccgcgggccctgcatctgggatcccttcgtccacacccccggaaagattgctgaagacgccaacgcagatgttacaacagatgaatatcatcgctacaaggaagatgttgatctcatgaaaagcctaaattttgatgcataccggttttcaatctcctggtccaggatcttcccagatggcgaagggaaaattaatgaagaaggagtacagtattacaacaatcttatagactacatgattaagcaaggccttactccttacgccaaccttaaccactatgatcttccgcttgcgcttcagaagaagtaccaaggctggttaggcccaaaaattgtggacatatttgctgactatgctgatttttgtttcaagacttttggcaatcgagtcaagaactggttcacattaaatgagccaaggatagtagcattccttggttatgataaagggcttaacccccctaaccggtgcacacaatgcactgccggtgggaactcatcgacagaaccttacattgttgttcataacattctcctatctcatgctactgcagttgcaagataccgcaataaataccaggcaactcagaaaggcaaggtcgggatagttcttgacttcaactggtatgaaccttttacaaactcaactgaagatcaaaaagcagcgcaaagggccagggacttccatattggttggtttcttgatccattaataaatgggcaatatccaaagataatgcaagacattgtgaaagaccggctaccaagtttcacacctgaacaggccaagctagtcaagggctcatcagactatttcgggatcaatcaatatactacatactacattgcagatcaacaaactcctccgcagggaccaccgagctactcgtccgactggggcgtccaatattactttcaaaggaatggcgtgcaaattggacagatggtataggcttctccgggttactgactttgaaccatactttattctattggtgctagaagattgataagtgcaaaagtagcatgaagattctgatgatcaatgtacctgtgctttgcaggcgcactcaatttggctttacatcgtcccatcgggcatgtatggagtcgtgaactacctaaaggaaaagtaccataatccaatcatcatcatatcggaaaacgcctggaaacctcacgcgcgaggagtacgtgcacgacgccgtgaggatcgacttctacaagaactacctgacggagctaaagagagggatcgacggcggcgcgaacgtgatcggctacttcgcgtggtctctcctggacaacttcgagtggctgtcgggctacacgtccaagttcggcatcgtctacgtcgacttcgcgacgctgaagcggtaccccaaggactcggcgtactggttcagagacatgctttcggggacgggctccaaggctgctaccccgcagactggttcaggcggccggccggctggttcggcttcagccacctcgaacggacctgccttgctggtctcccttttggtctccttgggtgttctgcttccatccatcttcatggtttcctcggtctaattagaaatgtattttcatagtacggatttgtagttgtgtggatgacaacatgttccttttaagaatcaggacatgttgcatcgatgcgggacctgttgtaggaatgagaccatgattcagggcttattgttcagagccagttttgttttgttttgtttgcggattttcagatacagatttgaacgtgtattcatggatagcttgcgttttttggtgtatctgggcacctaccggtttagtggaggtgttctcttctctgcaacccgccgccggtgagaaag

SEQ ID NO: 24319 - DNA, 2386 bp, Zea Mays
aaaaaaaaaaaaaaaccaaacgtgttattgctgcacctaaggaaacgcggccgaggacgagagtgggccagcggggtcgaggaggtaaagaaaactaatggcagcgaaggagggaggcagtggggaaggtgggaagcggctgcccaaagccacctccaccaccaggccttcttctacccccatcccaacgcccaggccacaccagcgcagcgagctctctcctcgtagcggagtcccagcccctcacgccctcccgatcgcgctcgtcggcgcccttgtcgactcgagcccgcttctgggccgatcgacagcgagagcgagagcagcggcgcgccgaggagagctctttcggtgctgctgtataacgacgacgacagcaggcggcagataacacataaaggcgcgcgatgtgcgacgcggcggccgtggcggctccgcggtacaggggcgtgcggaagcggccgtggggccggttcgcggcggagatccgggacccggcgaagcgcgcgcgcgtctggctcggcaccttcgactccgccgaggccgcggcgcgcgcctacgacgtggccgcgcgggccctgcgcggcccgctcgccaggaccaacttccccgcgctcacctcccgccctcctgccaacctgcccgcgcccacgcccacgtgcagctcaagctccaccgtcgagtcctccagcgggccccgggccggggtgcccagggcgggcaggcgcgctgctgggaagccgcgtgccccgcggcaggcggccgcgcccgccgacgccgactgccgtagcgactgcgcctcgtcggcctccgtcgtggacgacggcgacgacgcctccacggtccggtcgcgcccggcgctcgacctcaatctccccgcgccgctcgacgtcgacgatggtcatgacctcgagctttgcacggacctgcggctctgaataggcgaccggatccacggacggatcgggacgaagggagagaaggcggtttttgctttggtcttcttttcttgatcagattctgccttgctttgacttgtcgtgctcgagggagcttgtaccagtgctgcactgtactactcgatacgaatggcaatagaattggatgacgattcctgcaacgctatgcagactgcggatccgttcagaggttattcacttcgccatgtgcaacaattaaagattgaaaggaggcttgagtcaattgaatcatctctgaaggataaccacaaagttgaacatgaagagataaaaaagatcgtcacttccagcaatattagcgctccaggctgtgtagccacggcgatgaccacaatggttgttgggtacgcgttaggctggcgaggcggtgcttggtacgctcgaagggccttcagaagagagcagcaaaagctgatgatgggtcacatgaagtcgtcacagaacaggtggcactggcggcccttcaacaggctcaggaacagcaggaggaggctccgcgtggaggcgatcaggacgcagcgaacggaggtgcccgtcgaggagtccgcccccgccagggacgccgccgctgccgcgcccctggacggaaacggagccggagcggacggctccgtggttccttcctcggacgacagctgggttgtcaagctcgagcagtcgttcaacattttcgccacggattcggtgattatggtactcaagggcgtgtacggtgatcggtactacgccaggttctttgcgctggagacgattgcgagggtgccgtacttcgcattcatatcggtgcttcacttgtatgcgacctttggatggtggagacgagctgattacataaaggttcactttgcgcagagctggaacgagttccatcacctcttgatcatggaagaattgggtggcgactctttgtggtttgactgttttcttgctcggtttatggcattcttttactacttcatgactgttgcaatgtacatgctgagcccacgaatggcatatcacttttccgaatgtgtggagagacatgcatattccacctatgatgagttcctcaagctccatgaagatgagtttcaggcatcaagaactccaggttctaggaggcctaaaatagataacttatacgatgtattcgttaatatacgagaagatgaggcagagcactgcaagacaatgaagacctgtcaaacacatggaaatcttcgttctcctcattcaacgccgaactgcttagaagatgatacggaatgtgtaatacctgaaaacgactgtgaaggtgtcgtagtatacaaagtataaaattttgatgatatcctctcttttttctatgtctcattcaaagtaaaatccaggtcatatatcacagaaaccaatttaaatgcaggatcaaatatctgctccctcca

SEQ ID NO: 24320 - DNA, 281 bp, Zea Mays
cgagtcgggttgtttgggaatgcagcccaaatcgggcggtaaactccgtccaaggctaaataccggcgagaaaccgatagcgaacaagtaccgcgagggaaagatgaaaagaactttgaaaagagagtcaaagagtgcttgaaattgccgggagggaagcggatggggctggcgacgcgcaccggccgtatgcggaacggctcctgctggtccgccgatcggctcggggcgtggaccgttgtcgcccgcgccggcggccaaagcccgggggccctaggcgc

SEQ ID NO: 24321 - DNA, 560 bp, Zea Mays
  misc_feature (560)..(560): n is a, c, g, or t
cgatatccacattgattcaaccatggcccaaactaatctggttgtgcattcagccttgggtttgactctttcactacgatgtcccttggaccaaatatttgtgccaacatgacgcccatggaaagatctatatctgccaaagaacctgagaattcagaggatttgcctacagtagttagaagcagtgatgaaatggacactagaaacagtggcgacgttcgtcgtgacacagttgacactcttcctgagtcgaagcagagccatgaaagttgcgcttctaagttcgactctggagagtaccaagtcattttgcgcaaggagttgactaagagtgacgttgcaaattccgggcgaattgtgcttcccaagaaggatgctgaggctggtcttccaccattggtgcaaggagatcctctgatactacagatggatgacatggtgcttccgattatatggaaatttaagtatagattttggccaaacaacaaaagcagaatgtatattctggaagctgcaggtgaattcgtgaagacacatggccttcaggcaggggatacacn

SEQ ID NO: 24322 - DNA, 1964 bp, Zea Mays
acatttgctgctgaagcattggcgggcgttgtttcactggcagatgcagaggttgatccatccatgatggtagtggttagaaatgacatcgttaagctgtttgacaccatcaagagttacgatgatgggaccttctactttgatgaaaagcatgttgatgctaccgaatacaagggtcctataatgacttctgcttcggtggtacgtggtgtcacctcttttgcagctgttgcttctggaaaattggatatccctggtgacaagatacttggcttggcaaaattcttccttggtattgggctcccaggtagctcaaaggattgctttaatcagattgactctttgtcagtcctggaggacaatagggtcttcgttcctttgatactctcacttcctaccaaagtattctcattgtctttgaaagatcagcttaaggttgaagttaccacagtgtttggatctgcagcacctttactcaaagtgaatcttgtgcaagtgttgggaactgactctaaagtcatcaccaatgggaacagggagcttcaatatgaccttgacaaaaatgtccattacttggacattgctccattggaaatagatgttgggaaatactcggtagtttttgagatttcacttcaggaacaagagcgtgagactgtttatgctactggagggaggaacactgaaagtgtatttgtcacaggactgatcaaagttgataaggcagaaataggaatatccgacaatgatgctgggaccgtggagtctgtccaaaagttagatcttctgaaagatacaaaggtgtctctttctgcaaaccacctacagaagctgcgtttatcttttcaattaactactccgcttgggctcacatttaaacctcaccaggttgccactcacttggtattttgataacatgatggctattgtttccccgtacatcacttagcaaatgtgttcaggtgttcttgaagttgaagcatgagagtaaggttgaacacttatttgtggtacctggctctgcaaggcaattcaaaattgttctcgacttcctagggttggtggagaaattttactacctctctggaagatatgaccttgagcttgccgttggtgatgctgcaatggaaaattcatttctacgacctcttggccatttggagttggacctaccagaggccccagaaaaagccccacgtcctcctgcacaagctgttgacccattctcaaaatttgggccgaaggcagagatattgcatatattccgtgccccagagaagaggccacccaaggaactctcgctcgcattcacgggtctcacgcttctgccttttatcggattcttgattgggctcgtgcgtcttggagtgaacgtgaagaacttcccgtccttgccgggaccggccgcatttgcctcagttttccatgctggaataggagcagtcttgctgctctacgttctcttctggctcaagttggaccttttcacaactctgaagtaccttggcttcctcggcatcttcctcgtgtttgtgggccataggaccctgtcctacctttcctcggcgtcagcaaaacagaagacggcatgagtggacagtgcaagcagagctttcccgatcatcaattcgttttttgaggtggccattccaggccactgggtgtctttgcttggtactctgaccgcaccctagtttttctttagctaacatgcattttgagggaggactcggtttatttcagttgtctttgacgaatactgatactaggacaagtaacaggacctcacatcacagtttctgaatagaatggatgtttaatcatagcatttatatgatcattcgatatacatcatccttaatcgaactgaaacgttatatgtacacagaaatgatgcaaagttaaagaatttttgagcgtgtttggatgcacgccacagccggccggcacaaaaaataatggag

SEQ ID NO: 24323 - DNA, 364 bp, Zea Mays
ctctagaccacaaacctctaatctaggacgagctacgcggtgcgcaaatgaaaggaatctacatgcacaccgaactcaccgaggacaaggtcgcacacaggcagcacacggcgaggcgcggacgcggcaggaattccagctccggtgagaaattcaaggcaaaagcgcgagtgctttcccccaatagcgccaagggaaccttcgcctcacccggaagaagcctccccaccgacgcaattggcttttgagttccacggcgacggcgaatctcacccgtgcggtgcgtggcaacgcaatggtggtggtttttggcttctcaggatgattatggctctatgggtcaggagcatgcatgaggctccta

SEQ ID NO: 24324 - DNA, 674 bp, Zea Mays
aaaagagctactcgagatagtataaagctgcaggcctgcagtcgcccccaaattccccgaaccaaatcactcccaccgtctccacagcaaccagcacacatttccctttggcggatcgaaggaaggaaggaggagatgggtggcggcatggaggtgcacaaaaaccggtggatcgaagagtggaacgccggccgggagaacctcgagttcaacttccgctggacccgccgcagcctcgccgtcgtcggcctcttcggcctcgctgtccccatcctcgtctacaagggcatcgtccgcgaattccatatgcaggacgaggatgcaggtcggccatacaggaagttcctgtaagcggcgtccagggctgcaggatacgtcgattcctcgaccggggctgcgaggaggggagtttccgttcagtttgtgtcggtattgttttagtctgaatctgatgaagcaatttggaatgctgaattattgtgcctgatccaaatgaataaggtgtaatgactcgtcttttcaattactgaaactggagatgtttgaatttacttggtcacttgtatggtaaaatagcagcgttgtcatatactgtttatgacttcatttgagcgccgtggaggaatatgggatatccatggaggattggagtttgcagtttgctttcaaaaaaa

SEQ ID NO: 24325 - DNA, 1258 bp, Zea Mays
gattatgcctttctagcacctcctggccaccaaagaagcaaaaatcttccaggttcccacccacacggccacacccactgttctacatgctcatgcatcctcctaatgtaacctgaagctttaagaaaacaaagtgctcccggaagactccaagctgcagctaccggccttcctctcccccattccaattccgagaacaggggcggcggagtcaaccaggtacgatgtgctcggtagcgaggctggcgtttgtgcttgcactggccatagccgcctcgtcaattgaggttgcggagagcagagattttaatatctttgctcagggcagcttgcctgatgcaaccaagggatcgtctggtctagctgcaaccagtggaaagttgtgtcagttatgcgagcagtactcatccgaggcgctcctctatctcacacaaaacgagacccagactgagattcttagcattctacaccatgaatgtgccagccttgcccctctcaaacagcagtgcatcacgctggttgactactacgtaccccttttcttcttggaggtctccatggttacccctgagaagttctgcgagtcgatgcatctctgcaagaaggggatgaagattagcctacccacccgggagggtacttgtggtttgtgccaccatgttgttgttgaaattcttatcatgcttaaagaccccaacatgcagctggaagtaatcgacctactcaccaaaacatgcagcaaggcgcagaactatgaacagtagtgcaagcggctggtcctcaagtatattccacttattctggtgaagggccagaaattccttgagacaacggatgtctgctctgtgatacatgcatgcaaagcaggcacacaagcatcaatggaagccatgcctctgtctgccatgttgtgaaggtgatgcgaatcagaataaggcttatttgcctaggagatcaaattggggagaaacgatgaaaagtcagatgactgttttaagctctcttcctctattgctgaaacactattgatcggtgaaaattcggctgtgtaaaaatcttgtgtaaatttgggggtatatccattgtttctctgaagtatacagcaactgcagctacatcaatctcttcggcattgggttgagaagttctaagcagtaattgcattttactgtatcatctatttgtttgtaaaagaagtgatcaagggcacaacttgccttcaacgagctcctgctcagctatctctacttgttgaagc

SEQ ID NO: 24326 - DNA, 3185 bp, Zea Mays
gtgaggatttatgcggatttatttggagggccatttcatcatgaatggagaaaacgaggataaagatctgaagctaccttctcgtgtggtttctttattatttggtggtgatatatcgacgtcagcacaaacatttgagaaatggctctcattagtacgtaagaggagtggggctttccggccatctgggttcccacatcgaggttcaaggattgaagtcatgccaagtgggagcttctcactatttggtagcggggacttaagtgaacacttgattagagaagcaccaacaagaaaagatccattggactgcgatcaatctcctgaaataagcttgtgggagagacttgggaactcttctgcactggacattgagtcatctgaattttcatgggacgtgttgttgtctctgcatcatacagaacatagtagtagttccgaacaaactgaagacgaaatgaataaagctcttgaggtgactgtgaactctggtggcgtagtgttctttgctctatttagttctccaggtaacattggagttccagaagcggcagctgttataaagttttcgtcatcaaagatggcaacacaggcagagcgtttgggttatgagtttgcaagattgctcggagtccatacaccacaagctagagtagtatataattctagctcagagtggctggcgattaggcatgctgcagaaaatgcacgtacagtagcagtttcaaataatgatgaggttggtgagatgacgtgctcagagttgttagaagctcttgagctaagccgctgccttcttctaatgagttatattcatggctccccactgcttgagagttcaaaggctttccattcacgagaagctgcttgtgttactgcttcatcactgggaagggttttgatgcttgatctgatactgcggaatgaggacagactcccatgccgtcagcttggttggcgtggtaatcctgcaaacctgatgatttcagataaatcatccttacccaatttggacaggttggatgatttcaagagctctacagatagttccaaccaactaattacacattttttgcatagagagaagcggtcacactctttgaatggaaaatttggttcaccagggttggatcccatgtcaccaaaactagaaccattgataaatgaaaaggaaaatgctgaaagaacaaatggcgattttcgcattgtagcaatcgatactggtgtgccccgccgcccccctgtggggcgacgtgtcaaagatcatgagaggtaccccaaagttgtggaactcattttgaatagttcggactactcagcaagcatcctatatgaaatttctggttgtaagcttggacatccacgacctgatgaggttacttccagtgattcttgttgctccctttctgatgaagataatgctggagtgattcatgaattccgaggatcattccgtgcagctcttagggacctggaggggttccatctatttcttctccagctttaccaaaaactggatggtgttttgcgagttttcttgtccataattactaaaacctctgaagaatctgacaataatgatgctgccctttccgattttccttcacctggagccagctatagtactcctcgccttcctagtaagcatctgaacaatgagcttcatagtgattctgaaatgctgaaatctgcaatgaagtcctcttctgtgggatcccgcggaagctcagattcagtttctcctctgcccagggagagttggaacaacaagtccttcaagggaagtgcagaggctccccgtagtttaagaatgacaatgaaacttcgtgatttttacaaaaccccaaaggttgatcctgaattgctcaaagagattgagcagtggaacgaagcacttaagaatgatgtgatcaaattttgccaagagaacaattttcattctggtttctttgatggaactgaaaacaacatggtagctgatgcctatgaattgaaggtaagtcaggatatacctaaacttcgaactccattttaatgaattagtgaacttgataatacatcacttgcaggtgcgtcttgaacacatcattgaaaggatagccttgatttctgatgctgcaaatacagaacgaccttctcttgttgtcaacaacttgttcataggtggggctctggctgcaaggtctaagtacaccctacagcatttgggcattacccatgtactctgtttgtgttcaaatgagattggtcaatccgattcccaatttcccgatctttttgaatacaagaacttttcaattagcgatgatgatgatgcaaacatcagtgatctttttgaggaagcatcagacttcattgatcatgtggatcatgttgggggcaaggttctagttcattgctttgaagggaaaagtcggagtgccacagtcgtacttgcctatcttatgcttagagagggctttactcttgcaaaagcctggaacttactgaagaaagtacaccgtcgagcgcagccaaacgacggcttcgcaaaggctctcctggcccttgacaagaggctgcatggcaaggtatctatggactggcaacacaagcggccagaaatgaaggtgtgtccaatctgcagcaagaatgttggtctaagtacgagttcactcaagctgcacctgcagaaggcacacaagcgtctatctgcaggcagtgtcgacagcgccatgaccatggagatccaaaaatcgatcgagtcactccagatcagccgaggaggaagcctgagcccgtcccagaagctgaccaaggtgttcagcaatgagctgagcttctgatctgttttcctgtactatagatgaggcaatgtacttggctcacattgtaataacttgtactatcagactgaacttgtgactgtaggtttagttcacacgcctatatgattagcacacgaatgttcaggtgtgaagggtgcaacactaaagaatgttcaggtcttgtatttgttgcctgcagtatgcagttttcttctaaagggatctactctcaatctttgtatagagttactaattttatgggtacttttctagtgtacattcctgtttggtcacctagggctggtaagatatgagctctgttttcagcaagcaccgtagaaaagtttggaggttttgctgggtcaaaatacccctccc

SEQ ID NO: 24327 - DNA, 2286 bp, Zea Mays
atggtacttcaacttctaccagtgaattccctatcttgtaagcaaattgagaggcgatcatgcatttctttggaggcatttatacgtgattactttttatgtgagtcccctgttatactcagtggatgcattgatcattggcctgcaaggaaaaagtggaaggacataaagtacctagagagtgtagctggagatcggactattcctgttcaggttggaaaaaattatgcatgtactgagttgaaacaggagcttatcacattttctcaatttcttgagaggatgtggtcaagtgattctgcaaacttggcatatattgcgcagcatcaattgtttgaccagataaaggagctccacgaagatattgctgttcctgagtactgttcagctggtggtggcaaactccagtcacttaatgcttggttcggccctcatgggacaataactcctttgcatcatgacccacatcacaacctttttgctcagatgtatgatgaggagcccttgggcggaacgaactgcattcgtcaagataacaggagcctgtccgagaactggagcggcgtcggtttggaccatgatggcctagaggacgacgaggtggccttctcggatttcgacaaccacaacaccttctcttcgtcgaacagcgagctccatctctcttcgtcgaacgagcacctgcggaacagaagggcgtgcagaaaccatccgtccttccttcaacccaccgcccttgctgctgacggtttgatcaggtcaaccagcaggatgactgacttgactgaattcaaggtcgttacgacgtgcaatacctgcaagcctgcgacgatcaatcgtggggacgacgccaagtccttgaagaaccttgattgcaccgtgccgctgtcaaactaccaccccactgtcgccgcctttccccggacaaggcacaaaggaccacaacatatcctctcctggttgctaccaaagtcaaagaggaagccgaggccagatgtgtcgccgaccaccgtggaatgtgagaacatgtcgcagcttctcaaggactggggcgtgttctcgctggactccctgaagaaagaggttgtcgaggccaacgagcacagggacgccgccctgcaagaagtatcagagatgaaactatcactcggagaactgaccaccaagatagcgagcctggaagcgtactgttcggagctgaagaaggctctaaagcaagcgacaagcgcgaagagcatgcagtctcatcactcgaagagatcgtcgaccaggtcggttagcgggagtcccttgcccgtcagtcacgaggttatggtggaagggtttgtgcaggtcgtgtccgaggcccgcctctccgtaaaacagttctgcaaggcgttgatacagcaggtcgaagaagacgccgacaacgggctatcagagaagttaaatctactcctgcagccgtaccagatcacgctcggcgacaggcgcccgaagctggtgctgtaccacctggaggctctgatgaaccaggcgatgtaccaggacttcgagaactgcgcgttccagaagaacgggccgcgcaggtgcctcgaccctaggcaggagcggcaggagagcttcgcgtcgttcgtggcgctgcgcaacctgagctggagcgaggtcctgaggaagggcaccaggcaccactgcaaggagctcagccgcttctgcgaccagaagatgggctgcgtggcgtcggccctgatgaactggtcgcggccgtgttgggccgagccgctgctgcagtgcttcttcgtggcgtgcaagtgcgtctggctgctccacctgctggccttctccttcagcccgccgctggcgatcctgcgcgtcgaggagggcagggcgttcgagcagacgtacatggaggacgtgctgctcgacatgcagcggtcgcaggaccatgagccgccgccatcggcgcgggtgaaactcatggtggtgcctgggttctacgtccaggacaggctgctcaagtgcagggtgctctgcagttacatcagcggctagatctttgttgctggtcgaaggatgttctagtgttcttttgactgattgttagtgtgatgcagtagcatttgttgttcagctaggttgcaactgggatgccagaatgccattttgaccgttgacgtgcctgtcagatgtatgcatggttttaactacacattcctccaactatcgtgcagcttagaagcaagtgattaatcgattcatcatgttggtcacacacgaatactaacgaaaccaaacaaaaaaaaaaaa

SEQ ID NO: 24328 - DNA, 2622 bp, Zea Mays
gttttcgtttcagtgctgctgcctgcaagccagcaattgcttctccttcctctccctccctctctcttcccgaccgtttgcgccaccggaaggtcctggaagctggaacattgtgagatgaggagcaatagacgacgccttggaggaagaggaggaggatggggtggccagggcggtggtgtaagtgtggccgcttccttcgccgcgctgttgggctgtgtcgtggccctcgtcggcggcgccgccgggcagggcccccggcccccctccgactacaaaaccctcagcggcgccgctccacttgtggtggccaaaggtggattttcaggagtgtttccagattctagccaaggcgcctattctttcgcgatgatcaccagcgcaccggacacggccatgtggtgcgacgtccaactaacaaaggatggtgttggagtctgccttcgggatataaatatgaaaaactgcaccagtgttgatcaagcctaccccgagagaaagcggacctatgtcatcgatggtgtgcggaaaactggatggtttgtttcagacttcaccattgctgagcttcagtctgtttctctaacacaagcaatttggcctcgcactaggagattcgatggcatctatcctatcatcagtattactgactttcggtcccttgtcatgccatctcctgtttggttgaatgtacagcatgacatcttctacaaacaacatggtttggacatgaggaactacatactttcgatcaaaaagggtgtatccatggattatatctcatcacctgaactgggcttcctcaaaaatatgtctggaagagttggtcgcaaaacaaagcttgtgtttagatttcttgaaaaggccctcttagatcattctataaatcaaacatatggttcactgtcgagtaacctaccatttattaaatctattgcatctggcataatagtccctaagagttacatttggccggtgacgaaggataactatctactgccatccacatcaattgtcacagaagcccacaatgcagggctggaaatatatgcctctgattttgccaatgatagaattatcccctataactacagctatgatccgttggcagaatacctgaactttatcaatgatggtggcttctctgttgatggtgtattgtcagaacacccaattactgcatcagaggcaattggttgttttactaaactgaattcaaataagactgatcatggagaacccttagttatctcacataatggtgctagtggagactacccggactgtacagacttggcctaccatagtgcaattgatgatggtgcagacatcattgactgtcctattcaagtgacaaatgatggagttcttatgtgcatgagttccactaacctgcttgacactacgaatgttcagagaacaacttacaactctctggtttctgtcgttccagatattcagcctcaaccaggaatcttcacattcaacctcacttggtccgacattaacagtaatgttttaaaacctaaaatatcttctccagtgagtggttatttccttgtaaggaacccaagatacacaaatcaagggaagtttttgaagttatctgactttctagcaatcgcaatggataaagacttgtctggtgtcatgatcattattgagtgctgctggcttcgataatcatcctaccaaggaagttctgatcaagtcaaaagatagtgatgttcttgtcaaactgaagcagcagaaaacaaaatgcaagcttgtttacactctaccctctggcatcggggatgcttctaattcctcgttgaaagacattaagaagtttgctgaatatgtagctgtggacagcaaatctgtttttactctaagctctgacttcatcataagacagaacagtcttgtgcaagatctgcagtcagcggggctagctttgtatgcagaggtgttccagaatgagtttgtagcacaaccattggatttcttcggagatgaaactgtggaaatcaattactatattcaatcatttaatttatcaggcatcataactgatttcccgaagacagtcagaagatataaaagaaacacctgtacagttctgggaaaggatatgcccagctacatgcagcctcctcaggctggttcccttgcacagtttctacaaaccttcaaaacccagcctccatctctgccaccaatgtcgacgctgaattcttcaagcgtggaggagccacctcttcctactgttgcgttaagaagtgtatctgatggtagtgcctcgggggcgaccaagactcctggcacaccttctgatgctccaacggctacagtaaatgctggcatgctacttgtgatggttttcacagctttgctaatctgagaagccacatgagattgtatagtagacgactgaagctaatctgatctcccttggattcaggtaagctttgactagtgatctggtactaccacacacttgttttcttatttccacctttacaaatttgtcagtagaaaatgttagagtatccatttagggtttggggtttaccccgtgtaattacccgcttacccctgtgtaataggccagaccgagctaacttagtctattaatac

SEQ ID NO: 24329 - DNA, 1481 bp, Zea Mays
gtggtcaccattatttgtttagtcgtatgagcattggaaagagtgtgaatcattttccattgtgggtgattgaaatatcagacaagcccaggcaaagggaatctgaaccagcattcaagttcattggaaatgttcatggtgatgagcctgttggaagagaggttcttatgcatcttgcaaattggctgtgtgataactatctgaaagattcactggcaactctcattgttgagaacatgcaccttcatatacttccgacgatgaaccctgatgggtttgctcttagatggcgtggtaatgcaaacaatattgatctcaacagggattttcctgaccaaacagcctgaaactagagccattatgaattgggtaaagcaagaacacttcacggcttctgctagcttgcatgggggggctcttgttgccaactatccatgggatggaactagagacacaagcaaacactactacggatgtcctgacgataagacattccagcacatggcatctgtgtatagtcggtctcactataacatgtctttgagcaaagaatttgaaggagggataacaaatggagcattctggtacccaatatatggtggtatgcaggactggaactatatacatggaggctgctttgagttaactctggagattagtgacacaaagtggccaaaagcagatgagcttcctatcatctgggaacacaataggatgagtatgctcaatcttctagcaagcctaataaaggggttcatggaaggatatttgcagcagatacgggcaggcctgtacccggctcagtgatgataaagggcattgattccaaggtaagcgcgagcagcacttttggagattaccatcgaattgttgcgcctggtgagacatatgaagtggtggcatcgatgcgaggcttccggcaaaaatctacacgcatcaggctggagcaggaagccgtcagcctggatttcatcctggacccggatggagccgatgggcagacgaagctgctgccccgtagtaacgaccggggctgccgctgcgacaacgacaacgccgccaagccgttccatgtccacgaagctcacctctggttgtacctccttatcgtgtccgttctcctggccctctacgtagtcttcaagaggaaaacggtgccgaggctgctggcgtatagacactcatcgtcactcagacggcctgttgctgtataagaggaactaattttgtggtctaggcggatagttttgtactacctctgttctcgaatagttgttgtccgctagttaatttttatagctagttcatttttatactaaaatgtgacaaatagaaaagaacggagggaaggagcaactgaagttagtcttctctttgccaaaacggtcggttgctgtataagttgaaggatgggtaatgtaccatggaaatgacattttttttgaatcaatgaaatacatgttgcgttgatgacaaggaaa

SEQ ID NO: 24330 - DNA, 1944 bp, Zea Mays
ctctcaactccaagtcttctctctctttctctctattctttccatccccgcttctcggaagctcatcagccatggacgacgccgcgggagaggaagaagcttcgatatgcttctgaatgagatcaggggtaaggcagtcatgttcacgggccactccctcggtggcgccattgccaccctcgcggcgctacactacctctgcatctcatcttcaagctcaccatggtcacctgctgctcctgtcctgtgcgtcacctttggaagcccgctactaggcaatgaggcactgtccagggcaatcctgcgtgagcgctggggtggtaacttctgccacgttgtctcacagcacgacgtcgtcccaaggctcctcttctgccccccggacgccgtccctgcgcatatcattgtcggaatgcaactggatcaatggccggcccggactcgccacacaggtgcggtgaacacggtcaccacacgcatggcggacactgacaagaacgcgctccagcagctgatacagacacacatggccgctgtggccatggagcagaagcttgctactcctgagacgacaggtgggagtccttaccggccgtttgggacgtacgtgctgtgctccccagaaggtgcggcgtgcgtggacaacgcgaccgcggcggcacagatgctgtacgccaccttcgcatctcggagttcgcccggtgcagagtccccggaggccgcgcactcctgctacggcgagctcgtgctgaaaatgccacagcacctgctcctcaagagatgcctgcgtgtggacgacacgcgtgccacgcccaactacgacgacggcgtctccctcgcactggaggcctccggcatcgacgccacggtgagggcacacgccatggaggcatcgacagcgcggcagtggctgaagacatcgaagcgggcagggcggcggccgagcctgaactgcgcttgcctagcgacgcagcttggccggatcacgcctctccgtgcgcagatcgaatggtacaaggcggtgttcgacgcggagatggggtactacgacgcgtttaagcagcgcaggtcgcccaggaagtactccaaggtgaacttaaaccgcatgaagctgggccagttctgggacggcgtgctcactaagctcgacgccggtcagctcccccacgatttccaccgccgcgccaagtgggtcaatgctgcccgtttctaccagctcctggtcgagcctctcgacattgccgactaccaccaccaaggcctccatcggacgagcgggagctacatgacccacggccgggagaggaggtatgagctgttcgacaggtggtggcaggagaaggcatgtacgggcgctggcggcgacatcacgtcctccatgttggcagcgtcggcgagcagccggagacgcagcaaatacgccgggctcacgcaggacccgtgcttctgggcgagagtggaggaagcgagggaggagacggagagcgctcggggcgagcgcgacgtggcggagctggcgatgaagctggaggagctgcaagagttcgagcgctactcccgtgagctggtggcgaacaaggaggtgtctgttgacgtgctcgcgccgcagtcgagctacacgctctgggtggaggagtggaaccagctcaagctcagggatgaggtgaggacactgttgctccagttttgagctgagttgcaaacagctgatgaatttgtagatagctggtgggcattctccaaatggttcagaagtacatgaatcatttgatcattgtccatggatgctactatatagctgattgtaaatatatctaaacctagaaacattgcagtggattacaatatatttattctttcatgggtaccttgatggcccgatactgattcgaaaaagctttcgagcaaggaggcttgaaaacagctgaagttcagatatggatg

SEQ ID NO: 24331 - DNA, 475 bp, Zea Mays
gttccgcgatgatgcgtctcaagcagatttatatcggaggagaaggagatgaaccgcgttggctcttctctcggttctgaaaggtggtctaagtgaataattttttttctttatcaaaccagttttggcttattgtgtttctgaacataatttgattcttcatttggttactggtagttataccaatgcagaataacaaagttttatggtgactaacaaaaacaaaggatgcccaacatatactttcttgtagataggaatagtagataatctccggtatatttggtagtggtttaaactaatgtttgttgttgtcttgtctaatgttctgcttgtaactgtctgtcaagaacatgacttgaccttatgaaacatatttgactgggtatctttagggctgatattgttgttgatagcattatctaatgtcatgcttgtaactttctgtcaagaacatgacttgaccttatgaaac

SEQ ID NO: 24332 - DNA, 342 bp, Zea Mays
cgaccttgtcgcaccacgaggcgccgtcaacgagtcgggtgtttgggaatgcagcccaatcggggcggtaaactccgtccaaggctaaatacaggcgagagaccgatagcgacaagtaccgcgagggaagatgaaaaggacttgaaaagagagtcaaagagtgctgaaaatgcccggagggaagcggatgggggctggcgacgcgcaccggccgtatgcggaacggctcctgctgttccgccgatcggctcggggcgtggaccgttgtcgcccgcgccggcggccaaagcccggaggcccttaggcgccccccggcagccgtcgtcggcgcggacggtatcc

SEQ ID NO: 24333 - DNA, 2135 bp, Zea Mays
ctcgccgtcgcctcctctttttttccccctcctcgacggctcctcctcacaggctcacagcctcacactcacgcggagagcgctcgcgcgggcgcacacgcggaggggacgttcacaggagggggagggaggagatgccggggagccagaacggggggccgaggcctcggccggtcaaagtcgagaccatccacgatcttgcgcgcgccggcgacctcgccggcgtccagaggaagctgctggagaacccctccctcctcaatgacaaaaatcccgtgatgtgtcaaacaccacttcatgttgctgctggctacaataatacagaaatagtcaagttcttgcttaaccagcaaggtacagaaacagttgatctggaggcaaagaacatgtatggggagactcctctgcatatggcagtgaagaacagttcttgtggatcaacaaatctactccttgaacatggtgcacacatagaagccaaagccaataatggcatgacaccattgcatttagctgtctggcatgcaattcaagctggagacttcagcacagttagcgtgttactaagctacaaccctgattgctttgtgaaagatgatgtactacttgattcacagaaggcaaaatgcccttaaatcatattccaggaggagctggtagcgagaagctgctgaaactcctcactcatcatatggaagagcaaagaaaacggaaagctctcatgtcatgcctcgaagggaaagcaatgtcagagtttgaagaggcaatgtcacaaattgttggattgcaggagctaaaaatgcaattgcgccgatgggcacgaggaatgttttttgatgagaagcgacgggctatgggcttggggattgctaaaaggagagctccccatatggcatttcttggcaatccaggaactggcaaaactatggttgctcgaattcttggaaagctcctccacatggttggaattctccctactgacaaagtaactgaagttcagcgaactgatcttgttggagaatttgtggggcatactggaccaaagactaggaggaaggtattaatcctctcttttcttttcatcagaaaggctccgtcagctgcacaaatttcagtttcagggaaattgcgaaacaagttctgaacttatttctattctgtgttctaccttacgcatacattgttaccgtgaccacgacaacagatacatgatgcagagggaggtattctcttcgtggatgaagcttacaggttgataccaatgcaaaaatccgatgacaaggattatggtttagaagccttggaggagataatgtctgtaatggacagtggcaagatagttgtcgtatttgctgggtactgtgagccaatgaagcgagtcatcgcctcgaatgatggcttctgcaggcgggtcacgaaattcttctatttcgatgatttcagtacgacagaactagcagagatcctacatatgaagatgaagagtccaagtgactgtagcttgctttacgggtttaagctgcacccaagctgcagcattgaagccattggagagctgattgccagggagatcactgaagagcagaggaagcagatgaatggaggccttgtagacacgctgctcatcaatgcccgcgagaacctggattcgcggcttgatttcagctgcaacgatgccgatactatgatcacgatcacgttggaagacctggaggcagggcttcgtcagatttccagacaacgtcacctgcagtgacatgtaaatttaggagaattttttctcgatgatctcatgcttgtctccaagggcgaagttatggctgtatcgtctcatccaacgtttttggctattctgactgtgttgtatctagtcgttgctatatagcagtaaaatgcatgtggtatatacaattatacatcatgccctaacattatttgacatctgtggaatagccagtaccacatacggatttcagtacgtgcataatcaattcagatttgacggttgaagtgattgaatttgaatcctaactaaaccttgacgaccgatttttctttttacgaatccattcctttacatcactccattgtcatctgatgacattcactttcaaaaaaaaaaaaaggagagagaa

SEQ ID NO: 24334 - DNA, 799 bp, Zea Mays
gtgactgtcgtcccgtgccctcgcgtccctttcccttcttcccatccacgccagccaagttcaccgccgcgctcttcggcggcaactactgttggatcgtagggcgaaggaaggaaggaaggggagccatgggaaacgcgtcgtccatgctgacccatctcgcagcaggagatcgtgtcgctgtacgagcgcttctgccagttggaccgcagcgccaagggcttcatctccgaggacgagttcctctccatccccgagttctccctcaacccgctctccaagaggttgctccgtatggttgatgggttgaacttcaaggatttcgttgcgtttctttctacattcagtgcaaaagccagccttcgtcagaagatcgagtttatattcaaggtttatgacatcgatggcaagggaaaaattaccttcaaggatctgctagaggttttacgggacctaacagggtcattcatgtccgaggaacaaagagagcaagtggtaactgaagttctggaagaagcagggtacacgagggattacgcattctcgcttgaagattttatccagatcatcgaccatcctggccttaagatggaggtggaagtgccaatcgactagtgaaatgtggaaaacaagcttccggttttgtctgcagaacatggttagtgtcgtgtagcagggcaatatgaccgttcactttcgtcatcttctttgtttccggtccacttgcctaaacttttgtaacctttgttgacttggccttttcgaatatatcaaaaacaaaacaaattttgccctgcta

SEQ ID NO: 24335 - DNA, 2827 bp, Zea Mays
gcggcggcggctccggctgccacaccaacagacaggcaagggctaggcaaggcgcaagaagaggaggggaagtcgaaaataatttagcagcggaagcggaagcagcagcacgaggtgggtggggcagcggcagcggggttctggctaaattattttaatgtctttattatcagagattccagtaatgtgccttgcctcttttatgtgattgtacaaatcaatgaacggaactcatccctggacctccatgtccgggggtgcatgttctaaccttggatatgccagagacatgaatgccaagtactagcatgaatggtgattcattgatgcgtgttcctgcatcaccaatgtcattttcatccaataacatctctggctcttcagtcattgatggttccatcatgcagcaaagtccaccccaagaacagatgcagaaaaggaggtcttcaagtgtaacatcacaacatgtgatcgatgctggtggtgcattgcatgctcagaagaaatcaaggactgatgttagtcagggtgatatcatgcaacatcagctgattcagcatctgatccatggtcagaattctcttcatttccaggggcaacagaacccacagcttcaagcttttatccagcagcataaactagcacaacttcagcaacggcagcagcagcatttgttgcaaccattttctcagatgcaacaaccccaagttggtattcctcggcagccgcaacttaggccgccattggcacagactggaatgcagttaggtggtcctgttaggactcctatcgagaggggtgtttgttctcgcaggatactgcagtatctatttcacaagcgtcatcgcccagagaataactctataacatactggaggaagattgttgaagagtactttgcacctcgagcaagagaaaggtggtgtgtctcttcttatgaaaacagagggaattcttcagctgctgctccacagaaagctctggatacatggcgatgtggcatttgcaatacacatgctgggaaaggatatgaagctacctatgaaatacttcctaggctctgccaaattagatttgaccatggtgttattgatgaatacttatactttgactcacccaacgaatttgggttgcctaatggacaaatggtgctggagcatgcaaaagttgttcaaaaaagtgtttatgaacatctacatgttatacacgagggacatctgagaatcattttcacaccagaactgaagataatatcgtgggaattttgttcaagacgtcatgaggaatacaccactcgtaagactatagcaccacaggttaataatcttctgcaagttgtccagaaataccaagctgttgtcactgaaagtggatcagccgggatatcaaataatgatgcacaaaccatctgcaacatgtttgtcactgcatcacaacaactggcaaaaaatctagagcatcacaccttaaatgaacatgggctctctaaaagatatgtacgctccctgcagatatcggaggtggtgaatcacatgaaggacttgattgagttcagccacaagaacggccttggtcctaaagagagcctgaacagctattctaaaaccatggcgaagtttcagaatatgcatgattcaagacagctcatggctgctgctaaccttgccaataaccagagcaacaccaaactaatggggaccaaagaagaagcaagtgcttctgcgaccaaccagactcctggtgtcggagccatcggcaataatgctcttcagcatgccacacctctaaacagctaccagaatatgctcagaagctccagtgcaaatccagtcttgctgcagcaggaggcatcgagtgtcttcaaaggtcctacagcaatgcacagtggcatacagctggaagcagccagatccttccgtggacctaaccaagtgcagttccaacaccctgcggcgattcagcagcagcagcctatgccgcagcagagcaatttccagggctttggtggtgttaacccacagtaccagcaccatgtgcttaatcagcttctgcaggaagttaagaacaataaccacgtgaaagcacagcaactgcctccagatgcacctaaagcgagcggcggtcttgcaccaggagttgctattcccaacgttgctgctgctggggagcagggacagcatatcaacagtaatacccgtgaccataacggcgcggtgaagggtgctgctccagctggtactggcccaagcaatgtgatcaacaacacagccagcatgccccccggcagaaacaacagcttcaagtcggtgagcagcagtccagctgctgctaccggtggcattgcggtgaactcgaaggtcgacgactccttccatcaactggaggacctcgacctcgacggcttgatcacaaacgaactgatggagagcgggttgttcggcgccggacaagggtggtgagcatgtcccaccacgcctcacactactatcgagttccttcaccgaaagcgccaagcaacaatataagctttgccacccttctctttctggagtttttgtgttgacagtttcagatgatcgtgccatatacaattatgtaaggtagcgagttggatttggcttgggagtcgggaacggcgcaatctatagagctgttagcgtgtgcgtatgacatgttgctgtggttatcattttcatgctatggaggagtgtcgattatagtctcctgttgtctggcacggcgtgagtgtgtgtttcccatggttctatgaaatcaaattatagaagaaacaagatctaatgtttaggaatcgattctctatggttca

SEQ ID NO: 24336 - DNA, 3014 bp, Zea Mays
aaaaagaaaaaaaaagtcctcataaactatagaggtccagttaagaaaatgaaccttttttcaacactaaggcccattcgataaggaggccgatgcgagtcaggccacatgacaaaacaaccgctcctactcttcagtggcaagcacatgttcactcgagcctgttcgcggtggagagtgatagctggggagtggagagtggcgaacccaagtggcggctacggttttacgatctctttctccttagcctcgtctgtcgtcttccttctacctccgttcctaaaccgtaaaccctagacctctcgtgtgtcgatacgatttgcccattcatggcattctctccgacggcgttgttcttgattactgattgagaggtcggattggtgtttcctttgatctgtgagtggagtttgaggcaaggagaggggcgacatggtccatgggcacgaagaactagttcgatctcctcgttgctcgcacctcatcgtggctgccgagaagaaggcggccgcatcgcccaagccggcgaccgtcgctccggccaaactggccaccgcccgcgcaggctgtaaaagagaccaggaactatggggctccagctattggggcaggacgtggtagatgtagcttctgtggaggcaggatgggaccaaggcgtgaatttggtgagggcaatggcaatggtgttgagggaggttatggtggtggtggatttggagatagtggtttcccgcggagggaggaaggtgatggaaaggctatgggaagaggccatggaccacgtcagccttaccgtggtggtggtcgccgtggtggctatactgatagtgaggctggtgatgagtctggtcgcccccctcgccgggcctatgagcgccacagtggcacaggtagaggttatggaatgaagtgtgaggtgcgctggccgtggcatctggggaattgtgactgatgaagcccttgcacaagaaacagtagaaactgagggggctcctgctgtggctgaggctgaaaacaagctggaagaagcaccacaatctgaggttgagaagggcaaagagggcgaatcaactgaagtggaggagcctgaagataaggtacaagccatactatttatctcatgaaatcaatttgcatgtattgtactgttgtgggcttgtcgaaatatcatttctccctccataaatgatattgatgcgttacaatgtgaagaaactaatttctttaagcttgaagtttatcttgttttctagtagcccaagctttaatgacacattcttaaaaatagtttcagtgctagaaacgtccaaaaatagtttcaggataccggatacccttcttgcatgtaatagatagtacaagtaaaggttttatgtcttgtttcttatctactactgtcatgtttaaaaagtgtaaaactttagcatttggtgcctgctagtggtgtgccacatcttatcattcttgtataccggcaaacaacttaggttgtttctgcaatttagggagaaatattttagatgccaaatatctgcactaaaagctgttgtggattcctgtttagacattggaaaatattagacagctagctgagctccctgaagcttttcaggatagaaggctacagattataaagttgccacatggaaaatgatgtttgtactcttggttcacgtgatggaagcacatgtgatagtaattagaagttgcatgaaaggttattgaggcaactgagtaaatcctttactagggacaaatgtggtaatccgaattgttaggacaaatttaatattttaaaatagacatgtataaaatttgatgctgatttttcttatattatcaaacatattattacaaataagaatacatttttgcataaattgttttatgcattacttgctctctacaacaaaaaggtaaaaagataaccgaatttgtatccgaatccatatcgaattttatttctatcatttgaaaaaatatatgataaatttgaggtttacactttatgaatctttacaagctcaatgctaaaaataagaatatgaatttgcatagtggattctatatcctatttattcgcattcatagaaaaagacaagctatccgaataattactattttcatcctgttctcatccctgccgtttcctataacttcatgtttgctttgtgaatcaattgactcttgagtttttagcagcatataattgttgatcctctcaggtagttgatatttttaaatggtaagtgctgaaactgcagcttagatatgatttcatgtctccgatttcctaaagctatcatgcaattcttgtggtcgttgatgttgtgtgatagtttttttggaggccagccaaagctgttctcccaagtcttaactaatctcaatattctctgctaaactttcaatatgtttgtacctacaccctgatccatggagcagcataagatgagtgattcataaatactgttgctgaaatcgtagaagaccatggatttaaaaaattgacttattctccattcccactataatacttgctatcttattaaggaaagcaataatagagcctctttctaatcactaatcagttatagaactcatactgtattactatttggtttccaattaatgtggtttttattcttctcatgcacacttactggtgaaaagatgtaacaatacaatctacagatttgtcattatgcttaaattaaccagtaacatacgagtattggagtctttaccattataatcaatctggtattttctgagctgggaagatgccatctgccacatctgtgtcctgtgcaccacctaaagtatttggaactgttgcataactatgtaactgaatgaactgagtgattctgtttatttgtgcagttaataccagttttttgtgttactgacgatggaaaaatatctaggctctgcacagccgcatcgcagtgtttgacattattttcagaaattgtttgccatgctcttgttttttggtgatgatctgttac

SEQ ID NO: 24337 - DNA, 869 bp, Zea Mays
tcatcaccgctgcggccgtgcgtggaggcgtgaggccgatcaaatcggcggcgaatccccaaccctagcagcagtgggcggccggaccgggacgggcggtagacggctccagcacgcaacgctgacaggtttggccgtgcgaggcgcgagggctagacaggtgtcgcggcgccaggcatccagttccagggctgcgtgggctcgaccagagcgagtctgcaatccgcccgtccttgtccccgtcggcggccgttcaccagtgtcaggtgcggaggtgacaacatttctgaaagaattatatggtgagtcatgtcaaaggcacgtaatgctgtagttgccactggattgctgctcttcgctggtgctggcttatcatttccgttccttttcgtgaaatcaaagaacaagcctattattgattcgacaaaacctctgccaccacaggctacttttcgaggaccatacgtgaatacgggttcacgtgatatcggacctgatcctaccaactatcccaagaagtgatttgaatcttccatgacatttcggagtcccatttcactcgactccactgctgtgaaattgttcgttttggggccatcttactgtgcacgtgccttgatattgcaaaaaaataaaataaataacaatacctaaataaagggtggttattgaagctcctccattctccttgctcccaaacaaattccccttgcttccaaataaatcctagtgtaaagtttcccaatattgtatgggaatatctattttttacagatccatatatgattagttgaatttcatataggcgtattttgttttgtagataagactttattacaaaaaaagagttttaggcttgcgaaatttgg

SEQ ID NO: 24338 - DNA, 3430 bp, Zea Mays
ctcgccgcaattactccggcattcaatacgcgcaccctccacccttcccttcctctcctccaatccttccccgtccgtctccatcgccgccgccgtccctttctctctccctccctccctccctccctccctcctccacacctacaagcagccagctacaagcggaggactcctcctccgtcatgcatcctctatctaccgtctcatgatcactgcactctacgcggagctgtgttctgccggtccacgtacgcgcgcgtgcatacaaagatcggatcgaaggtagctcccgggcggccgcgcgtagatctacgctcggggacggaacggagaggaagctagctaggagcgtgcatgctatgcccgggggcctgatgacccccggccgcaacatgccgacggcggcggccatgatcggcggcctcgccagctacgcagctccttcggccagaacatgatggatgggcaccatcagctcgctatgatgcagcagcagcatcagaaccacggccagcagcaggcagccacgagcgagagcgacgcgcgaggcccgcgccacgacgagctgctgatggagagcaagtccggcagcgacaacatggagggaggcgcccggtcaggcggctccggcggtgaggagctgcaggaggaggatctcggcctgcggcagccggcccgcaagaagcgctaccaccgccacacccagcaccagatccaggagctcgaagcgttcttcaaggagtacccgcaccctgacgacaagcagaggaaggagctgagccgggagctgggcctggagcctctccaggtcaagttctggttccagaacaagcgtacccagatgaagacgcagcaggaacggcacgagaacatgcagctgcgggcggagaacgagaagctgcgcgccgagaacgcgcggtacaaggacgcgctcgccaacgcctcgtgcccgagctgcggcggcccggcggccacggccgtcatcggcgagatgtccttcgacgagcaccacctccgcgtcgagaacgcgcgcctccgcgacgaggtcgaccgcatctccaccatcgccgccaagtacgtcggcaagcccgctggcagcctgctgctgctgccccccaacaacctgtcaaacaacgtctccggcccggcgctttcctcccaccaccacctcctgcccggcggaacagacgtgttcggtggcctccaccgtcatgctggcggtgggtttgactttgacaaggggttggttgtcgagctcgccgtcgccgccatggaggagctggtgcggatggctctgctcggcgagccgctctggatccctgcccttgccgtagacggggctaccaccgagactctcaacgaggaagagtacgcccgcgggttcttccccaggggcgttggtcccaagctgccggagctccggtcggaagcgtcgcgggaggccgtcgtggtcatcatgaaccacgtcagcctcatcgagatgctcatggacgtgaaccagtggtcgacgctgttctcaagcatcgtgtcacgggctgccaccctcgaggtgctctccaccggcgtcgccggcaactacaatggcgcgctgcagctgatgacggcggagttccagatgccgtcgccgctggtgccgacacgtgagtgccagttcctgcgctactgcaagcagcacacggacggcagctgggcggtggtggacgtgtccgtcgagggccagctgctacgtaccggcagcagacaggggcgcgggcgcggtcgacgccggccctcaggctgcctgatccaggagatgccgaacggctactcgagggtgacgtgggtggagcacgcggaggcggacgacatgatggtgcacgacctgtaccgccccctagtctgctccggcctggcgttcggcgcgcggcggtgggcatcgacgctggagcggcagtgcgagcggctcgccagcgccatggccagcggcgtcgtcgtgccggcggcagcagcagggccagccgcgggcgtggtgacgtcgccggaggggcgccgcagcatgatgcggctggcggagcgcatggtggcgagcttctgcggcggcgtgacggcgtcgacgacgcaccagtggaccacgctgtcgggcagcggcgcggaggacgtgcgcgtgatgacgcgcaagagcgtggacgacccgggccggccgccgggcatcatcctcaacgccgccacctccttctggctccccgtggcccccgcgcgcgtcttcggcttcctccgggacgacgccacccgcagcgagtgggacatgctctccaacggcggcgacgtgcaggagatggcccacattgccaacggccgcgaccacggcaacgctgtctcgctgctccgcgtcgataacgccaactcgaaccagggcaacatgctgatcctgcaggagtgctgcacggacgcgacggggtcgtacgtgatctacgcgccggtggacgtggtggccatgaacgtggtgctcaacggcggggacccggactacgtggcgctgctgccgtcagggttcgccatcctccccgacggcggtggcggtggcggtggcgggtcgctcctcaccgtggcgttccagatcctggtcgactcggtgcccaccgccaagctgtccctgggctccgtcgccaccgtcaacagcctcatcgcctgcaccgtcgagcgcatcaaggctgccgtcgccgccgacaacgccggtgtggcggcggcggcggcggcgacgtcccaccattgacgaccatccccagcgcgcggttagcgccgattacgtccttcttattactcgctaaaccatcttatctatctcgctgtgcgtgcgtgcgttcatgcacgcgtgcaggagactgccgggatctgtggagggacgaagagcagggtcgcgtcaaactcaaaccaaaactgaaactggggaggatttggcaaacgcagggagtcaagaacgcaccgcgtgctctccttgcaagctgttgcacatgccctcgatctgatgagcaacacaacaccttgcaagggggttggttcgggcattgactctcttgctctgtcctcccgtcgtcgacctgccactctctcctcggtccatggccgggctgtagtagaagctcgtccgtcagacagctagctaggagcttagaccatgcatgcatgcatatgtagcttgtaactgggattcttccattgtaacgtgcctgtacctctgcctctgtgcatgcacggagcgaggttgtacgtctatggagattgcagaagtctaaaaccggttaatttgatttttttttccaccgtcggagattcattgcttctgtgttttttttacgttcagcatttttttagtatcattgttgcaatattgaaatgcatgtttatactcgtatttacatatttcaatatttataagatcatttacaccaca

SEQ ID NO: 24339 - DNA, 1416 bp, Zea Mays
cagggagcgtgggttacaggaaggttggacaagacgaggtttcatgtgattggagctatcctgtttacggcccagcaaggtgctctgcacccaacagctgttgtgaagactaggatgcaggttgctgaagggcggcttgcacgtatgtctgggtttactgtttttaggaggatattgagaagcgatggaatccctggtattttcagaggatttggcacctctgctgttggagctctacctgggcgagtgctagctctaacatcactggagatatctaaagaaatgacatttaagtattgtgaacattttgatatgtcagaggcgtcacgaattgctgtagcaaatggcgttgcaggcctgatgtcgagtatctgttcatgttcatattatgtgcctctggatgtgatttgccaaaggctcatggttcaaggagtgccagggatggcaacgtacaggggaccatttgatgtgataaataaggttgtcagaacacaggggatccaggggctttaccgaggttttggaatcactatgttgactcagtcgccagcttcagccctttggtggagtgcatatggtggtgctcaacatgctatttggaggagtttgggttatggaaatgactcatcaacaaaaccatctcaatcagaacttgttgctgtccaagcaacagcaggaacaattgctggtgcttgctcgtcgattatcaccactccaatagatacaatcaagactaggcttcaggttatggacaactatggtaatggtaggccttctgtcatgaaaactaccaggctgctgcttgatgaagatggctggagggggctttatagaggttttggacccaggtttcttaacatgtctctctggggcacatcaatgatcgtgacatatgagctcataaagaggctatctgtgaagtcggaatgacacgttttggcagattctcaactgagttgatttactgttcagtatcatctttatgaatacaggcaatcaagttagtttgcctcgctaaaagtataggccagtattatgatagggtaggatgcagaattatggtttagttacataataacatccttctgtaggactcgtgatgtatatatttgtgctaaagaccctcctttcaggatgttgtaggcttgtagccagcttctttaggatgcaacagatggaggccaagatacatgttgtgtctaatgaggcacattgtagctgtagctgtagctgttcatggtgcagcaaaattttggcagagttctgcgtccttttcgttcagtgaccagctctccagttgttgtcgtccaacttacatttttagaatctacagagattgtgttcgtcattgaggatgtgtctggtttgttcgtcatttgtgatggtgttttagtttctatggactaatttttagac

SEQ ID NO: 24340 - DNA, 450 bp, Zea Mays
acttgcaaacgtgtagcatggtgccccggcgtcgtgcatggtggctcggcggtgaaggaggaccttcagagaagaattccggcgactctaaccaagctcaggatgttcatgccctcacacagcgtgccccagcgatgcaccctggccaccctgagactttaaacagcagtcatcgatctgatcgatgatggcggctcctgctggcttcccattggtttccgcccgtgcacgagattgtggccgagacttgggatttcaggtctactctatcgcttttatatcctgggcagaggctataacagcccaggagattctggtgtggggtttgttatgatcgcgtcatggtttgttggagataatcacgctggatttctggttggtggcgctctgttaatgtgtggaggagctactacttacgaagctggtccacacagcagcggaacacctgag

SEQ ID NO: 24341 - DNA, 922 bp, Zea Mays
ccagatccgaagccacgcttccagcctcttgttgtcacttattagctatctctcagctaacctccctaggaagaataataagctgcaaaaggcacaagggcgacgccgataccgatgcaaataccatagcgttgatgtaaagtggcgccagaggagaaaaaaaggaagcgagccgagaaacatggacgaggaagaggtccatatcgcagttgggaagaactcaagaaaggagaaagccaacatactgtgggccgccgccaatttccccagggccaccatcgttcttgtccatgttcactggccctccaagtggatgcctttcatgggtggcaaagtgctatacaagttcgctgatgagaaggagaaggagatgcatagaggcagagaaatgaaagtaatggtcaatatgttatcacagtacaaaaaaatgtgcgggacgagaaaggttagtgcacattaccttacacatgatgacactgttgccggtgttgtgaacctcataaagaagctcaaaattaaaagaatagtcatcggttcaaggaacatgtcaaggcaagttgtggttcgccagtgctgtcaggtttggctggtactcaacggcaaacacatctccaccaggatatggaggggggagctcaggtattttggcatctatacatgagctaggtgaggaatctgacggctacgtgacaccacgaagtgatcttgtagacgaaaccatggatgaggagtcggctgaaatgaatgattctgatcaattagtaacggaagatgaaacattgactgaacaaggcacagaggaatcagtcacttctgaagacatggaaaacttttttcaagagaatgctgatcagtctgatgagatacagaatttcagaaacatagctgacaaggctgaaaaaatcatgctggaacgattcca

SEQ ID NO: 24342 - DNA, 2935 bp, Zea Mays
gttctgccatcctccccctcgcgcatccaggaatcatcgcgtcgtgctcaagccaccccgccgtcatcgcctcacgcaccttccttcggcaaccttctataggcgcaatcacaggaatccccgcggcctcgccccagatccctaaaccccgcctcgtctctcatggaaagtgcgtcctctgcgctcggctctctccgcgtctgcgacagcccgctatccatggaacgtgggtcctctgccctggatcgtcacgtcggccctcgattcgcgtccgcgacagcctaatcccgcacgtggattgggtacccctctgccccgaatcgtcgctcccgcccggcatcagcgtccgcgtccgcgttgtggtgtccgcagtctccatggaaggcgatcccgcgtgtggattagcattagcagatgaagaggcggaatgttcttcttgggatagcgacgatgagtaccagaaattcatccaaaatatgaaccctccaagggtcaccatcgacaacacctcatgtccaagtgctatagttattcatgaaagtgtccaccgacgaaggagaagccaaagcacaggagcatggtgctatgttcatggagaccagtgcaaaagctgggttcaacgtcaagcccctattccgcaagatcgctggatcccttctaggactagacgcactttcgtcaggaaagcaggaagacatggtcgacataaacctcagacctgccagcggttcgtcggcttcaggtgcagccgcgcagctggagcagaaatcaggcggttgctcctgttgagacttcgacagttttgtgttcagagaagctacaacagtactgcaacatcgagttaagtactttcagagagattgtgacgaagagtgttttcgcccaaacgtccagtagtgatatactgacatccatagcgagaagccaatttctgtgtacagatttgtttagcaagttatcatatgctaggatataactgtttgatacacaagggacaaaatctgtggaggtaagggcatctcacattttttttgatgaaacattagcaggagctctgccatatcatataagaagagcaagctagagtgtcacagtctttattacatgaatgatcaaatacttagagtccatagggaaaaagtgaaaactgttgactatatggctaagagacaatcatgatccatgaaaaattctaatggactcatatacacagagggggctagcgtgcttgagagaataatattagccgccaccgcatctctctatagaggtgtacgtgctcaagtcgccaccgttgtttctgtcgtggacatggaaattatatggcggattgctggacatgtagtattggcttatctggtggacgatagactgcctagaccacatgaattaccaaatacttttgagtctttgacatgcaaaaaagggtgaaaactccattagaaaactttagaagctgaaacaaatattcccttcagtattgagttatattagggtatttcatatccccttcaatattcagttttattagagtacttcattctaataaatcacatccaatttcattctgccaatcatattttctttttatgcaattttattctattgatcctattttctttgttttgtttttggcaatgaggtgtttcagcatcgacattcaatttcacagcaggaacttctccattccattccaatccaacatcgacaggcattccatttcacacagctaatcggtggagggaaaaatattcatcaggaaaccagctaatcgtggaaggaaaaaatattcatcaaagtggatgtcactggatgttttagtggatgtcaactttgtcatctactcgtgtttgataccaggatgcagtgcaaccatttccacatatgtattggctagcattgaactgaggctttgtacagtagtaataagaaatgagaaatgtcgaattcttttagggccctgatttggcatcaattgaaaagacattgactgtatctatctacagggttccacatgcacattcagcgagtcaatcctgggatcgtgtggcttccatactgggctgttcacctcaccacatttgatggatgttagagagcgatttcagctagatgggtgctatgaaatttatgatcgcactgacctagctcctcctttctgagggcatcggggttaatatttctgaagagaaaattttgaagtactcctggtggtgctagaacaagttgaagcctatttcaggttcctcgcgctgctcgcattcaagatattttctgctgagcaggtagatgttgctattctcgaggttggcctaggagggaagttcgatgcaactaatgtggttgttagttctcgtgaatgtcctgttgtctcgaaatacaaagcttctgttcgcacctaatcgcctaaaatggaaatgtttgactcattgtttaattcggggggaagctgaaggtggtctgatccgttctaggaagagaaaggctgaccaagtcatcatctccagggacgatgttagcgaaagtcaatttaatcaggtgttgatcattgggttgcaacaaatcatcggtggagactgagtcaccgcggccagaaaaccacggtctcaatttgaggagtttttccatctatgtttgttagaaggcataatgcctatttatctcttgtattcgaacatttggcaattaagaaatagaagattacttccccaatatcccttattcctaatctcacctttcacggcttgtggtgaacaatcacttgctattaccgactgacatgtccactcctcatatgtgcgatattggggttgatatatatgttgttcgtttccatgtaattattgtatactaacatttatcgaataatttttacaccgtcgcaacgcacgggcacacacctagtagtagttgatgatgcctttgcaggtttgca

SEQ ID NO: 24343 - DNA, 492 bp, Zea Mays
cggcttagggtctcaatcaatcgcgctaggatgccttgacgtggggcgctcgtcaccaagaagcagtggacctgataccgccgcagctactccatgggaacacaatcattctgccatccccgggtggtcaggcgggatcatcttgcagcgtgactcgggtacatggtattggatcgaggaattgtggagttcgtggatggaatcgcccacttgagccctccttcatcatgatgccgctcgccgcggttacatccacctacgctggcgattggtgcccaaaattcgaccgagtgcgatctctggcatgtgcgaaagcggggcgtagcaccgacgagttgggtgttgtaacaccctgaatttggggtataaaatttctttttctaatattcactaaattcagttgttaccctctctttttcttgcttttcttttctttattctgaatggtgaagagttattttatatatgtataagtttttagtgtggtaaaat

SEQ ID NO: 24344 - DNA, 210 bp, Zea Mays
taccatgtttgtttgtattgctacgactagcatgtggacacgaggatctgaagaatcaccctggtacctggaatctcaagtgccaggtgttggagacttgttctcaactgcttcgaattaagaacaagacaacacaaaaaagaggttaatggttaaatgtccttcgtccttcgaaacattatttcccttaggatataacgatcttcggat

SEQ ID NO: 24345 - DNA, 1233 bp, Zea Mays
ggctagggttgagggagcgcaagggggccggccggtggccttgcccatggccaagcaaggaaagggtgaaggtacactgctggctacaggctcctatgatggacaggcaagaatatggagtagagatggagacctgaagcagacattgttcaaacacaagggacccatattttcattgaaatggaataagaaaggagattttctcctaagtggaagtgttgataaaactgctattgtttgggatacaaagacatgggaatgcaaacagcagtttgaatttcattcagctccaacactagatgttgattggagaaataataactcttttgcaacatgttcaaccgataacatgatctatgtttgcaagattggggaacagcgtccggttaaagcattcagtggccatcagagtgaagttaatgctatcaagtgggatccgactggttctcttttggcttcatgttctgatgattggacagcaaagatatggagtatgaagcaagacaaatgtgtatttgatttcaaggagcataccaaggaaatatacactattcggtggagcccaacaggcccaggaacaaacaatcctaatcagcagttgcttttggccagcgcgtcttttgattcaactatcaagctttgggaagtcgagcaaggatgccttctgtacagcttgtctggtcataggcaaccagtgtattctgttgcatttagccccgacggcgaatacttagcgagcgggtccctggatcagtgcctacacatctggtctgtgaaagaaggcaggatcctgaagacgtacagaggtactgggggcatattcgaagtgtgctggaacaaagaaggcagcaagattgctgcctgtttctccaacaacacagtctgcgtgatggatttccggatgtagtccaaccagtagggtggtgcatatcaatcctaacacaaggctagatcataaatccgtcccatgcaaatttgtgaagagcggagttgttagcaaaatgtagatcctaggtggcttcaacttttgtccatgcacatttcgtttttcttggtcatacttaccttagagtagcaatgtagtagtggaaatgccttaacagggtttagtagcatggaaatgttttggtggtaaattaatgaattaatctgagatgtactagtttgtagtttgcacataccgtcgtgtcaatgtcttttatattgaactgctatagcgagcttggctgacca

SEQ ID NO: 24346 - DNA, 723 bp, Zea Mays
cttctgcgcccattccctgctctctccatccacgaatcgtgtccgcttcctcctggtgcaatccttttcatccacgaaccgcgtccgcttccctgctctctcctggcgcaatcctctccgtctgtgaatcgcgtccgtttccatgctctctcatggcacattagatctagatcacgcagggcgtttcctggggcaccaagccagagcccaccggctatggcgctgcgtgggagaggagcagggcggttaagcgggccatgaggaggacgcagacgaggagtacgacggcctcgtcattcgcgccaagcggacgaggatgggcggggacggggataaggtatggttccatcgatccattgcagggacattgcaagcggctggatccggcgacggagacaaagccgaggaagagaaggccttcttggtgacgagcgccgcggccttcccccacggcatgtccgtcgccgccgcgggccagtcgatggctgtggccaagaaagaggagttcagcaagtcgccgtccaactcgtcggcaaaattttgaaaacaattccgaaaaaatcctgagacaaaatgccggaaaataccgagacacaaatccggtaattttcgacaaaaaccggtaaccgaaagaaacagtcggtaaaacagcacgccgattccgatagaaaattctgaaaaccgattccgtttttgaaaaataccgttaccggtgaatccgat

SEQ ID NO: 24347 - DNA, 222 bp, Zea Mays
tcgttgtcgttcgccttcgtgctgtgagcgacaacatcgtcatttcccttcatgtgctcatcctcgatctccgcctcgccatcactcttgatcacagcaccgtgtcgacgacttgcgatcctcaccctcgcgctcacgcttcatcgaatgccactccagtactcgccagaagaagatcttcagcagttgattactgaagaaaagaagacccctgggtgacgt

SEQ ID NO: 24348 - DNA, 2013 bp, Zea Mays
gcagaaagtggaggcccccgcgtcgcccccgcttgggcggcgctaaccgtcgtctcctcctcttcctcccctctctacctcgccgccgtcggagctagccggcgggttgttcgcccggctcgtgaggaaggcggcggtggggcgtttcggcgtgtcgtggctcgcggcggcggtggcctgtgctcgcgcgcacgccaacggcggtggcattgctgtgctccaacgcgtggccgaccggtttggaggttgttgttggtccagagaatagaactgttgtttctaaagacaactttctgagagtgaatctcattggtgattttggtggttataccagcatcccagcatttgaggacttctatcttgtgacccctaggaagagtgctggtagtggtgagccacaaaaccttggtgctgaatatagaaagtggatgctgttggagagagttcgttttacagacggtgtcgaatgtaacaagattggtgttggttatgaggctttccaaaaccaacctaacttttgtgcatcgccatttgagagctgtttgaacaatcagctatggacctttttggagtctgacaaaaaccggataagcatgagccgacagccccaatatgttgtgcagggaaggtttcagaggatcaatcaacatccagatgcaagtgttcattctttttctattggagtgacagaagttattaatagcaatttacggatagagctgagtgctgatgacatagaatacatgtatcagaggagtccagggaatataacagacattagtgttccagcatttgaagtcttaagtcaatatggtactgcaaaggtcacaactaagaatattggtacactggaggcttcgtataccttgacatttcactgctcaagtggcatcagttttatggaggagcagtactatatcctcaaaccgaatgaagagagtacccgtttattttacttgcacgcatctacagatcaagcagcaaagtatcaatgtacagctattctgaaggcgtcggattctagtgaactcgacagacaagaatgtgttttttctactacggctacagttcttgataatggaacacagattatcggttcaaatggctacaaattgggtttctttgacaccatcaaaggctatttggttagcttctgggattttctgattgatttaatcagtggcaaatcctgcaggctgaacaaatgtcggagcttttttgacttcagctgccatgcgcagtacagatgcataacctggctcgtcatgttggtgctgctactttttatgttacccgcaggcgcaattgtcctgtatcttcttcatcagaaaggcttcttcgacccagtatacgactggtgggatgacctgctgggggcggactaccgcgcgcaccggaggcacaagaaaggccgccgccaccaccatcaccaccacgaccaccatcaccaccggcaccaccaccaccacgggcactcgcacggccatgaccaccacccccacagtcaccaccacgcgcaccagaggagaaagatcgagcccagccaccaccacgtcctacacaggcagcagcccgggacagcggcagaaggccaccggcacaagcacgacccggcgctcggcgtgcagcacagggaggccgggcacttggggcacaagcgtcggcatggcaaagcggtggtcgcggaggacgccctggacctggagttcagggaacgaaggccatacgaggtcaggcatgccgggcacctgcaccgcgaccaccaccaccaccaccactcctgggaagtgtaggaatagttctgaccgtctgaactttaagacatctagcgtaagatgaagttggtgtaccgtgggcacgggacatgcccttttgcatgcatgcagtgagttagtgggtgtttaatttctagtaaactaatttgtatcgcttcattttatttcattttagtctttaatttgcttaatattgaaactaaaatttcatattcgacaaattagaaaataaaataaa

SEQ ID NO: 24349 - DNA, 5144 bp, Zea Mays
gtccaatactgctatagtagcttctccaagttatgacactgttaggaagatggttcaacttctctcgaaatgaagcttctgtcttcctatgtatagacaagttgttcagttaggaggtctagattctcttaaaatggtgctatctacgagttaggaggtctaggagcacactgaatgttttagaggttgatgaaatcgttgttttcctaaaaaagcattttttctgctttgtttgaaattgtttgggttttcctccccaactttcataattacctatttctattgtatgtttgatcatttggacttctactccatccacaattttggtttattcagtgaggaactatgtttttaaccactctatagtttgtatagacatgcaacattcatctcagggtcaagaaagaagctcaacttggcatgcttcctgtttaaagcaaggcaagaaacatccccgccagatctctgtcgccaaagcagggctggtgaagaagttgtgtttccctcccggattgtcactactttcatatttgttcatttatgtttgttccaatttatgttggttttttacagttacagaatatgtttgttccagttgagttccagtttgaaaactggaacaaccactagcagatgcaaagttcacaaagtagcttgtcaaataatgtgcatgaactggaacaagcaacttgtgcacgaatgagcattactggaacaagtagcttgtgcatgaacgagtaatactgtagatgattggacatgtatgtctattttagatttttaatatttaatgttatatattcagctcataccatacatgaatttgcatttctgtactatactcacttaatgtcctacctgttttgttagcttcaactatccgctttaaactgacaaaaccagaccaaacatatgcaaatctcatatacctgtgaaagcaacaactgatttgccagattggttaattaaacgtaacaataaatagccccgattaaatggcttataaatatacttggatctgttcatttttcacatatcagctattaatgaagccttcactgggttcattttgtactactccattacttatttacagttacaagtattctaagaaacttaatatttcatcatcaaagttgtattcagacagtttcatttacattgctctgattttttgtactaggagctactgacaatggaaagcaacgattagagtaacttgatgagtgaggactattcattcagttgcttcgatcaataagtgaactaatggatgcatgtttcttttgataagtgagctaactactttagtcacaaagttcgtgttgatttctaaacatggtatgatggttttgtcatcctattcgattgagtttgggaaaaagcctgcacattctgaaaacaaacagactgcacattgtgtggctgataaggttgagtgggtaaataagatcaaagctattatttagacatactgaaaatatagtgaaggaagcgtaagcaatttttctgctatatttatgcattgtatccttgtaaaattatcaatattgttctgacttgtggggaaaggtatgagagtattcatttttttgcctcttttctgtttgcattccttcttcagtataatgtttgttagaataaccaggtgaatttacaaatttcatatccatatactttcttcgatgacaaatataaatctacctaggtttgtcataactcataggtcaatcattctaacttcaattgacattttttataaaaagtatcataaggaaaataatatattatcataaaagtgacgtccatctatatcaaattttagatattgatggtggtcagagttaaaaaacagtttgccttaagacaaaccaagatgaacttgtatttacaatcgaaggaaatattgcacattgcctagacatttaatttattagataaattcttttgttagttgttcaactttgtacgtcttataagtcacaggaacaatgtttatctagaacttcggtctcaaattatacagtagtgttcagccatacctgccatgtcacaagaaagagagataaaaagtatttaatagtagacctaatgatgctcatttgtaattgtagatattcgtatatcctttttctgcaaccttgtgaaacatgtgatggtttgacttggaacaaactttgggtctgatatagtaaaatgcaatgtatgtggagggaagtagtagaacaagacagaacaagtgccaaataaggttatatagtagaatacaatgtgtggagggaaatagtagaacaacacaaaacaagtgccaaataaggttacaaggtttatagtagcgattgcttagctgctacaacgacactcatagattagcctggcatttgcaatgtcgctcttgtatttgccataacctcacttaaggtcacacattgcctctgggaccttgacctccgctactgttgtcgcctggccgcgtcgacttcaccaatgccggggtgtccaacctcatcagcttcaccgtcgtcgactgctcccacacaaccgagctgtgggtcctggtaccggtcgcgccccgcctctgctccttctgcttcagcgagtggcagactatcgatacactcgatttcaattgttttttacgctatttactgtattgcaatgggacaatggatgattaggatttgttttttaagactggcccatgatttatcgtcgtatactatttctttaatagattgttcgctacatctactgatctacatgttcacatgtttcaacttctgtcagcatccgtagttactatatgaatgctcattctgtgtcaccttttaagtttacaaatgctcttttccaggtcacatatggaaagtgaagaacccaaatgatttcttcacaggaaggtgcttacatcttgcttccatgcctcggtagtttcggtcactattagttttgctatgcctttcctacataaataattttgctacctcaaaatgcttctaaatatgatgatttatgctggagactgctaaccttcacacatctaataagatgaagcaacaagctagaaaatgtggaatttgtcatatgtccggatgcaaaacgggtaacttcatgctttccacaatgtgtgtcgacatgatgcttgtagagatgcttggaccaatcttcaactcatggggcgcttcatcctcggcctcctacgcatgcacttctcctgcttctcctgctggtcatcgcccaaggtgcacttttcctccctgttctgttcacgtgcccatgtgtcattcttgtttttcactgtttaggatcgtgagggtgttattgcaataatagctgatggagaaatgagaatgattttcaaatgatgacaggattggcagaatgagagcgacaaaggaatgagctaaatcttttgaaatatgaagcaatatgatttctttccagtgttatatttttttatttcctatgcatttcttaaaagtgctattacatgttcacctactaatacccttgtttttcttgcatctcaaggatgaattgctgctcttgaccatagggattggagcagcatgtagtttatactttatcctggttttctctctcgagtgtgtcagatgtgccgtaacagatgactccaaaatggattgcatgctcttcaaatagctacagataactatcttcacataaaatggagagtacaatgtttataaaagaaggaatatggataaggatccagattctcctatagcatatgaagaggcaaaggaaatggcaagccaaagctgcacaatttctgatgatcactcgttgttactgttatccattatctcctcagaggcattgcttttaaattcaacagcagacatggcaggtgcaggtcctatcctatccattatctacccctgcatgtgtgccagctattctactctatgtttcaatagtttggaaataattcagagctaaggttttctgatacaggtacgtgtccactttcttctcaaggaattgcactagaggttggactttgtgggtcaagagaaatttaatgcctattgttaatacaacctttagctatttttccatgatgatggagttggacaagtaccatattgagtataagtgttagcctattatatctttgtacaaccatggcaaacgaataatttcttataacaccatgaagataatgtttaacgaagtgtgtttgcgtgcgtgtgtaatttcttcttttgttttgctgctaagtttgatagttcaaaacatgattcttgtaaagtttggttttagtctaacaaatacactcaagtcctgacatgtaaactgtaaagttggactgttgcttggtggatctgtattgaactttattttttttaaaatgttttatggcttgtatagtttgtattcacttctcacctaagctacaatttgtttttccagcctttcaagatttggcacattgacataatgacatgggttggtcacggattggatgtcaattttgctccctgtaccttgtagattatcggttatgtcaattttcgaaatttctatcgtgatggataacatttgaataaaacatagttaaataaacatgactactgtttcagtctttcgaaattctgatgctatagtgtcagtatactatgtcattttagggaaaatatatgtcatgtttattttgataaaattatatgatttctcactcaattcttgtcggtggcttcaggatttgttattttgtatatcgatctgtgtcatttgacaaagtactttgacttggtataatatgagtgttacttcgaccaaaagagcttggtaaagtgtgagaaactccgcaaacttcttctgcagacgatgactagcaacagttatgacgagggtcaagatagccgccatacatgatacattgagtacaacatcaagataaacactccctccccacacacaacttttgccttccgttcactctgtatgttgtgtttattacggttgcatatgttgtgtttattatggcatcaacacgttccattagaaaatataactattgtttgtcaagtacaaaatcataatcacatcagcttgtaataatattgcatcactgttttgtaccaaattgtaagttgttgtagcaacgcacgggcacc

SEQ ID NO: 24350 - DNA, 1631 bp, Zea Mays
gagatcagcagacatgttttgtgatgacattttcggagaatcacctgcgggagttagaaaatcgggcaagggtgatggtttgcatgttgagagaaatgctcttcatgacaactgggatgatgcagatgggtactacacttaccggttcggagaattgctggatggccattacgaaatcatagcagcacatgggaagggtgtgttctcaaaagtcgtgcgggcaaaagatcttaaagcgagtaaagatgatcctgaagaagttgctatcaaaattattcgcaacaaggagacaatgtacaaggctggtaagcaagaggtttcaatactggaaaaacttgcaagtgtggaccgtgaggacaaacgccactgcgtgcggtttatttctagtttcatgtaccggaaccatctttgcttagtttttgaatctctcaatatgaatcttcgtgaggttttaaagaaatttggtcgtaatattgggcttaaactgactgcggtgagggcatattcaaagcagcttttcatcgccctgaagcacctgaagaactgcaaagttttgcactgtgatattaaacctgacaatatgctggtgaatgaggctaagaatgtgctcaagctatgtgattttgggaatgctatgcttgctggtatgaatgaagttacgccttatcttgttagccgtttctatcgggcacctgagatcattcttgggttagcctatgatcatcctttagacatgtggtcagttggctgctgtctatatgagctttataccggtaaagtcttatttcctggtccatcaaacaatgccatgcttcggcttcatatggaattgaagggtccattccctaagaagatgcttcgaaagggtgcctttactatgcaacactttgatcaagatctcaattttcatgctaccgaggaggatcctgtgacaaaaacggctgtgagaaggttaattttgaacattaaaccaaaggatgtcggttttttgattttgaactctcctggcgaggatccaaaaatgctatccagttttaaagatcttcttgataaaatgtttatattagatccagaaaagaggataaccgtatcacaagcacttagccatccatttatcactggcaagtgacataagatgctgattcctcttgatattgaacttagcatctacactgtaaaatacaatttgggtttctcttgtctaatcatcgacgtttctgtcttgtgtcctgggagctctgagaacaaatacatggatgaagcacggaactatcgaagagatggctatctgcagaccttgttgcatgcacttatcatttggatatgttctgttgcttgattctgccagggcctctgctgtgtgtacactttatatgcttaagcgccaacatttgaaggtcctgggatggagatcgctggaccctcctctcctcatcatgcttctcagataagctgcttttccaataagcagaagctctaccaaactgcgtccttcatgtgactgatgcgtcgttagcttcataaacatgagacaaaaaagatcatctatatgatgtacttgattagtacttgttatttcaacccattcattgtctaattgaaactcttctaatattaaggactagtttggg

SEQ ID NO: 24351 - DNA, 1043 bp, Zea Mays
ccgggaaaaatatcttctttggcacgctcaactgaagcattcgactctggtgccggtcttccccttccgaaatctcgtgcggcggccggcaagttcgcacttcgcagcgcattcaccaccagcttcactcccaactaccgctgatctcactcacgctcaccccagccggccagccccgtccccatccggctagaggttcacatcacctgcgtgacgataaacatcctcttccaaatcgtagtctagcccgtgcccaaaaccctagcgaccgccggagagctcgtccgaatcgaggccaccgaggggaaattagatcgcggcggacgatggagagccctgcgaaagaggaggccgggggagagctggcaatggagatcgagtcgtcggtcacggcggaggactggcgccgcgcgctttctcgcgtcgtgccgtccgtcgtcgtcctccgcaccactgcgccgcgcgcctttgacaccgaggtcgcgggcgccagctacgccacgggtttcgtcgttgacaagtcccgcggcataatcctcactaaccgccatgtcgtcaagccagggacctgtggtcgcggaggcccatgttcgtgaacagggaagagatccctgtgtacccactgtacagagatcctgtacatgattttggtttttttcgctatgatccaggtgccattaagtttcttaagtatgatgagattccgctggcacctgaagcagcatcagtcgggctagaaatccgggttgtcggaaatgacagcggggaaaagggatgcaaatggtaggatattttctgatcaactgaagcagaatagggcaaatatggaagcgacaccgattttcagacactatcaatgtctgactccgattccaagaaaataatatgggatcaaggttttaaagtcggctagtcgactctagtcgcctaagcaccgataaggtgactaatcgcgattagtcgtcgattagctcgattagtcgatcctagtcgactccctagtcgtcctatagtcgcccatctataacaggaccatactgcgg

SEQ ID NO: 24352 - DNA, 1772 bp, Zea Mays
ttcttgcatgcttagttaggaaaggtgggcatgcctccaatgacgaaattttgagctttgcaaagctatttaatgacgagctgactttggataacatgagcagaccacggcttgttaatatgtgtaaatacatggggatccaaccttttggcacagaccactacttgcgattcatgcttcggaagaaactacaagacattaagaatgatgataagatgattcaagctgagggtgtggagtctctttctgaatatgagcttcgacaagcatgtcgtgagcgtgggcaccttggtttgttgtcaacagaggagatgcgtcaacagagactggctggatctatcactcaatcattctgtgccatcgtctcttctaatactctcaagagcttttactgtatctggtaaaatgaaacctgaggaggccgttgtagcaaccttatcttccctgccagatgaagttgtcgatacagttgggactgtactgccttctgaagattctgtttcagagaggaagagaaaattggaatttctggagatgcaggaagagcttatcaaggaagaggagaaaaggcaagagaaagatgacaaggcaaaactggaggagccaaaggctactgaagaagatttggctttgaaggaaatgactgagcctactgttagggagaaagaggaactaaagaaagcaaaaacccacgataagaaagagcagctttgtaatatcagtcaagcattggctgtgcttgcatctgtttcttctgttaccaaggagcgacaagagtttttaagccttgtcaacaaggagatagaactatataataacatgctcgcaaaggagggtacagatggtgaagaagaagccaggagagcgtacaaggctgctagggaggaatcagaccatgctgcagaggcagctgtgggagaaaaggtctcttcagctttgattgatagggttgatgctatgcttcaaaagttagaaaaggagattgatgatgttgatgctcgaattggcaatcgctggcagctgctggatagggactgcgatggcaaggtgactcctgaagaggtagctgcagctgcaaattatctcaaagacaccataggagcagaaggcgtccaggagcttatcagcaatctttctaaagacaacgaagggaatatccttgtggaagacattgtgaagctggcgtcacaaacagaggaaaacaacgaagctgaagaaactgcacgatgatttggaatagcagccacattcttggctcttaaaactcgacggtccattccttttttaaaaggaaccgcacataataaagctagttcctggcagtctcatgcaaaaatcaccaagcaggatggtcattctttttgttctgactggcggctgcagagaaaattgtatcctgctgttgaaagatattcatttatacagttaagtcccagcacaaccgatcgttaggttaggaattctgtccgaaatggcaacttgcatttcaaacgtctgccatgaaaatgagaataaattcggcgggctctacagatttttcatctattgtctgaacaaaagtataggcatcaaataagtatctgggtaagtttatactatttgaataagaatcagctggatttgtttaaattcttaacaagaccgttttagcagtttgactatatggtcaatcaaaacactattttgtattgtatattgtactatgtgcacttttgcagtgagatttaaatatgggtatagagatagataagctactagagatagcctaaatg

SEQ ID NO: 24353 - DNA, 2694 bp, Zea Mays
cccgtttaacggcggcacgacaagcaagcggtcacgtgagagctgatttttctcgcagcgggtagcggtagccctgtccctgacctgatcctgacccgtgcgggcgtgcggctcctcgcggacagctccagactccagagccgcctcttcgccctctcgccatcggcaggctacggtggctgcttccccgagcctgcagatcgggtggtagatctggttggcctagtcgctgtcggatgcagttgccgagctaggtcgcggctgcgcggcggcggtcggggtcttgcgtcgccagatctggataggaaaacgccgcgcacaagctgagctaaattctgttcgattcgagttcttataggggttcttgtggctgcgtgttttgaattttttcccactggttctggggtgccgagaaagggaatcgtggctgactcttgttgccgtcgtcgagccagatctggtcatgctgctaccgtggatgtcttattgcttgatctcctttgttttttaattccttcggttcaagaatagcatcattaccatgagcatacataccagagaaacggagacagattcggaaattttcatttattgctagcttgtagttttggggtcctataatatttttcttggttctcttaattaattgagctagtaaatcaacaaatctgccactacagccgtcacgggcaaacataaaaaaactgaacaacaccaaattgaggcgcctagtccacaaacctgaactgctgaacttaaatgtctggaagccacagtttctgatttctgatggtttgtttttatgctcatttactctttctttcttccaggtagaccaccttgtgttgattcctcgagtcttcacctggtgcttccgtttgcagcttcatttttaactaagatgtcacaagccaaggaagtgaggtacactgcacggtctattacacctcctgctgatagaaatggcacttcaaggtcgcctcctccaaagagacgcagcccttcaaggtcacctccaccaaagagtgcttcacggtccccacgtccaaggagtccaaagagacgcagcacttcaaggtctcctcctaggagacgtggtagatcaaggtcaagggataggagtcggtccaggagcccagatgatagaaatccagggaataacctttatgtaactggattgtctactcgtgtaacggaagatgatcttgagaagttctttagtaaagaaggaaaggttaagaactgtcatgttgttcttgatcctaggacaaaagaatcccgtggctttgccttcgtgactatggatactcttgaaggtgcaagacgctccatcaagtatctgcaccgcactgtacttgaaggtcgcctggtcactgtagagaagtttaacatggtgctgggctgcctctacgtcaacctggttggtccaggctgtgcagtctccaaccatggttgtctccaaaggatgtgcagctgacgtgatggtgcttatcaccacaccctcagagctcatcaccacttgccgtcttcacctcgctcaccgacaatgcatacatgctacatcaacacgacggctgtcgccatagagcgatcttggagtcttgttgtgcatcgcgtcaccaccatcgccaccgcaacttctaccacaaccgccatcgtcaacatcacgctcgtgatccaacaggctctacgatttgtctgcttcgactaagcttacatggtgcatgctgctgccatgtcacgacaccaaccaccaagtctgatgcgaacttcatcgaccagtatcttgatttgatggacatcacgagaggcataatctggcgcttccttggaccatggctacaccgaccacggaacaagtgcacaaaagtcatctttggtttagttggcatgcaacgtaaagtttaatctacctatatcacaagattttgatcaagagttgacaagcttaatggaccatgactatttttcaccaaaagggcaaagctaaaagaactcgtgaaaggacccctactcctggaaaatactgtggtcgaagaggaggatctcaaaggagcccatcaccttaccgccctcgcagaagggagcgttcgcgctcaagggaacgcagaagggagcgttcgcgttcaagggatcgaagggagcggtctcgctcaagggatcgaagggagcggtctcgctcaagggaacgccgaagggagcggtctcgttcaagggaccgcagggagaggtctcgctcaagggaccgccggagggagcgctcacgctcaagggaccgcagaagggagcgctcacgctcaagggaccggaggggcagttcaccccatggcagaaggcatagagatcggtccaggtcacccaccagcaatgggaaccataaggcagactaggaagcgcttttatggacttgtcgttgattgcgtgaacaaaggaacttgtaacactacctataaactggtcagactgagacggttagcatggatttttagtagtgttgctgtattttgttgtttcatacaagtactctattctgttagctttcggatcgaaatgtcggatgatgatggttgttattgttctggaaatcgtagacatgtcctccagaatacctatgaaactatggcatactcgtgtgtttgcttaaggttgctgtggtatgttctgatcttaagattgacacgttgcacggtagat

SEQ ID NO: 24354 - DNA, 1511 bp, Zea Mays
tctcttcctcctgatcacacaacggacagagatgaggctcttgctgtttggaggacatggaactggtggttggctaagtagatatgatgtgtactataatgaatgcattattttagacagggtatctgttcaatggaagcgcttaccaacaagcaatgaaccacctcctcctcgggcatatcattccataacttccatagggtctcgatttcttttatttggtggctttgatggaaagaatacatttggtgatttgtggtggcttgttcctgaagacgatcctattgcgaaacgagacttagttcctagcatcgattcaaacagcaaacctagcactgtgactgatgataaccagctattgaacctaaaggagtcacaagctctagaaaatccaataacagaattggccaaacgtctggggattgcactttctgaagaagtttcagcaagttttgttgacgaagccaatgataaagaacttgtggaattgtcatctagacttgctggtcaatcgcttccagctagtgaccaggttgcatcaattcaggtacttcgtgatcattggaaaagttctccagcaagctcactacaactacaggaactaggacctttgctgagggactatcaacgcctcatcttgcgacactatacgggaaattcattgccagcttttcgtgaaatggaagctctccgttttttccatctaaaaagtgcttcacagttgcgcatggatgacattcccgtcctgttgagcgagtatggaaggctgctttcaacatgagatggtgtcttgcaagctgtgccctcctgcttggtatgtgctcttgagcgtcaccgctgtgttaggctgttaggacatcattttctgcttgcggtgcggaactgtttcagcttttggtctcacacatgtcatcttcactctttgcttcaggtcctaacagaacttctgctccatgtaatttgcggagaactttctgcctgacaaaagcacacccgtggagccattccttgccatcagttggtctgttagtgcaagtcatagtcgtagcagcgatagcgcactgagctgaattcctttttcttttgaggactggacgcagacgcacacatatttcgtgcagcctggctgggcgctggaatggggtcatggtcatgggctcatggccatccacacgtggttaggcctagcttaggcgaggagctgggcggcgtggcaaacttggcaggccgcccatggtcgcgtggaattccaagaaaacggggttttgtgtgatgtgaggctggaaacctggggggtcagcagcacatgtttccagtctattgcactccctctgaccgaaagggcgctgcactgcaattttattttactacctttgttcaaaaataatgggcgtctccttttcagatgtcaatcagtttcaactttgattagatttagtaaaaaaatctaacatttgttggatcgtattaaatattagtacttttatgtgtatatttgatcacgtttaaga

SEQ ID NO: 24355 - DNA, 1534 bp, Zea Mays
ttccccactgttttataggcagctggtgctcctccgaaagcgaagtccagcgccccccgctcccccgttcgcgcaaagacgccaaacccacccaccgaaatctctccccgaacttacccctcgccggcgccggcgatgtgcccgacgaagcccggtcgccctgcccaggcggccgccggctccggcgagaagagctggcgggagcaggccgtggccgccagctcgctgcggccggtcgacctggaccggggcaccaacggctgggcctcgccgccgggggacctcttccacctgcgcgcgcgcggctacttctcctgcggcggcgggaagcgcggcaaggcgccgtccgccgcggagtggctgctccgccccgccggcgtcgactggctccgctctcacgcgcgcctcgaccacgtgctcgcccgccatgacaaccgcgtcgccgccgcattccgccgcgcgcgcctcaggaacgaccccaccgcgcacttcctcctcgccgtcaatctccaggtgccgggccggccggacgcgtacagcgcggtgttctacttcgcggcggaggcacccatcgcgccggactcgctgctcgggcgcttcgtccagggcgacgacgcgtaccgcaacgcgcgcttcaagatcgccaaccgcatcgtcaacggcccctggctcttgcgcgccaccgtcggcaactacgcggcctgcctgctcgggcgcgcgctcacgtgccgctaccacaggggcgtcgactacctggagatcgacgtggacatcggcagctcggcgatcgccagcgccatcctgcacctcgcgctcggcgccgtcacgtcggtcaccatcgacatggggttcctcgtcgagtcccagtccgaggaggagctgcccgagaggctgttcggcgccgtgcgcatcgcgcggatggagatgggcgcggccaggtacgtggagctgcctcctaatgaggccatgcctgagacggtctgcagcggcagggccggggccggtttcagggtaagctccgggaaggtggtcaaccatagccgccaacaagaccgtgccggcggtaaggtgggcaggtcgatgagttgcccggagcgagagcgcggagggaaataggcctccttttttccagagaaataggtgcaaagtacgcgggtgcagtgcagaaagaaaccatccaccggtgggagcgagagcggtggcgagaaaaggccgggtaacccgacacataaggcgctcaagctggtgccattaccacgaatggcacacctcgttcacgaagtactcgtcgaccccggcttggcttgagcagctcagctgcagccatccacatacatgagggcatgtatagctctaagacggtggttcggttttctaaatataaaagacagttaagaaactgatataactacgagactttacactataaatataattaagaaataatattaattctaagactctagaccataaatatagttagaaaccaatatatatggagatggaatatgtatggagatgggctgctcaggaa

SEQ ID NO: 24356 - DNA, 652 bp, Zea Mays
tctgctttcatttggtactcttttatgatataagaggttccagcatattatagtatcatgtgatgatgaatgatgtacaagttcctcgtgcctgatataagttaggcatccatttcaatagatcgtgttgttctagatcaaatataccgagttattatgcaagagaagtatgctgcaagtaacactgtatggctgcataatggagggtttgcattgccgtcatgacctcgtactgtgtagttgctgttgaatcagtcgggcgacaaatccccatagctttcctggacagagttaaggaagacttcaccaaaaagtatggaggcgggaaagcagctactgctgcagcgaacagcttgaagagggagtttggaccaaagcttaaagagcacatgcagtactgtgtggaccaccctgaggaggttagcaagcttgccaaggtgaaggcccaagtctccgaagtcaaaggagttatgatggaaaacattgagaaggttcttgaccgtggtgagaagattgagctgctagttgacaaaactgaaaatctgcgttctcaggtatccaatgccgagaaataggggaagtaataacaataagaaagaaagcagcttctttatgcaatctaggatcaatggaagcaagccaatcggcgtac

SEQ ID NO: 24357 - DNA, 2145 bp, Zea Mays
gatcgagttggctcattaacaattcagtttcgttaacaagcctggagggaaaaaggacacatcacccaaaggcacagggaatcgcaccatcgtgggacccgtacagcgcaccgcccagccgccggatctgcgccggcgacgcgcccggacgtcggatctacgccgccgcaggaggggggaggcggcgctgtggccgttctctgcccgtgagcgcccggatccgtcccgccggtcataattccagaccgctggcgtcgtcgggtacttaggttccgacatgttcattcatgaagcgtgttttggctttctgattttttggtgttattcaattgcaaatacgtgggcttcggatctcgtataatttcttatcaaacatgttggattactcgtggagtgtttctcacttgtgtgaaaccgtgtgagctatttgaacaattcgatccggtcagcaaagggaaaacttttttttaaaaaaatatctgtgtggggggatcgatttgttcctagcatcctgtggacttaaatcagttgaactttggagtccttgtttagcttgtcaccgtcaattaattctacttcatttctggccgcatgcaaaatctgcctaactaatcgtaaacatttctggtggcatgcaaaatccgcactgatcccaatcactggattgtattacagacctatgtgattctgatgatatttggtcacctagtaccaaaacaggcggaaatggttgttttcctcgagaagctaattattattttttacattttaggcttgttcatttcgccgttaatccatgtggattgggtggtattgagtcggtttaaatccataataggttaaaattcatctcaatccatcccaatacactctaatccacatggaattggaataaccgaacaaggctttagtgagaataatacacgtgtatgcttacatgtgtgttgttataaatcctctttattgattctactctctgtccgagattgagatctaagctttagtgacatttctagttataatggtcttatcaccagtggttttgaaatgtagtcagaagcttgcaacactcaaatataatctactacttattgtggtcaacagttgttaataggtttatcgccttataggggatagacttgtgaagccatgctacctcactctggcaaaggactgtaacttagtcctttgcaatggaatgagcaaagaaaagatccaaagaatattgcgtttatggaagcaacttgatagttctgttacatgctaggctgctagctaatccatttgtaccagacaacagacatctgtaatcgctccatatttttttgtatttcctagatttgtctagaatcttacatttatcattgcatgaacgttcattttgtgttatatagtattcatttatcatatatatcaatcaaaatggtcctgtgatatcgagcttcagttgatgcagaggtggtgaaaacatcttgtcttctccaaagactgctgactgcaagttgcaaaagtttgtctttagcttgctgtgttgtttcttcctgcggagtacacgagaagtttgtagatagagtttctggtgtgccttttcctgtaccaatgtgtataaatcttacattgctggcctcttattatgcagcaaggattatggatccgaaagagaagccaaatgtatcgagcagtccaccaacaccacggctggactgcataaaatgctttgatatgctctggttctgttactcaccattccaccagatgcagaattattaccggtatggggagttcgacacctgcttcggcaagtggggcgatcttatgggctgcctcgctctcaagacaaagcggaaggcagaggtggaggagatcctcatcgcgcgggagaaggccaaaccacatatctggacctaccggacggtcgatgaggcatcggagaattggtggcggatgtacaagcatgctgtgatgatgtcaccactgccaggttctgctcagcttcctcgggtccctaagccgacgagtgagtgtgctgcgtgccccagcccagatgggtcgagcgcgtgggcgagcgcggaggggggagaggcgaggcggccggagccgagcgtgagagaggtggaagtcccgcggccttcgtgttcgtcccgc

SEQ ID NO: 24358 - DNA, 3506 bp, Zea Mays
ggttgcattcggaccgtccgtagcgcccagctgacctctaaacccttgtctccctcccccaagtgaatccgtgttgtacctctcgccgccgccgtaccatcgcccgaaatcctagccccattcaccgcctcgctcggaatccaagccccattcggcgccgccgcgaccgccggacaggaggtcatggacgacgtgtgcgaggggaaggacttctccttcccggagcaggaggagcgggtactcgagctgtgggcgaagctcgacgccttccacgagcagctccggcgcacggagggcggtgaggagttcgtcttctatgacggcccccccttcgccactggtctgccccactacggccacatactcgccggcaccatcaaggacgtggtcacccggcaccagtcgatgcggggccgccatgtctcgcgacggttcgggtgggactgtcacggcctccccgtcgagtttgagatcgacaagctgctcggcatcaccaaccggcagcaggtgttcgacctcggcatcggcaagtacaacgagacgtgccgcagcatcgtcaccaagtacgtctctgagtgggaggccatggtcacacgtacggggaggtggattgacttcaagaacgactacaagaccatggacctcaacttcatggagagcgtctggtgggtgtttgcgcagctctgggagaaggacctcgtctataagggcttcaaggtcatgccttacagcacaggatgcaaaactgcactgtcaaactttgaggcagcactggactataggactgttcctgacccagcggtgatggtatccttccctattgttggtgatatggacaatgcagcttttgttgcatggactacaacaccctggacacttccaagtaacctagcgctgtgtatcaatgccaatctcatgtatgcaaaggttagagacaagtcaaatggaaaagtatatgttattgcagaatctaggcttgggcagttaccagttaaggccaaagcttcaggaaagaagcaggcaccttcaaagggaagcaatgctgaagctgctcaggatggtttggataaggaatcatatgagctgctggtaaagattcctgggccatatttggttggcttaaaatatactcccctatttgattttttcattgaactacaagagactgcctttagagtgattgcggataactatgtcaccgatgatagtggaactggcgttgtccattgtgctcctgcatttggtgaagacgaccatcgtgtttgccttgctgctgggatatttgagactgctggacttgttgtcgctgttgatgatgatgggtgctttattgaaaaaatatctgattttaaagggcgatatgtcaaagaagctgacaaggatatcatcagtgctgttaaggataaaggaagacttgttagtaaagggagcattgaacactcttatccattttgttggcgatcgggtactcctcttatttatcgggctgttccaagctggtttgtcaaggttgagaagattaaagaccaattgctggaatgtaacaaggagacttactgggtgcctgactatgttaaggaaaaaagatttcacaactggcttgaaggtgcacgtgattgggccattagcagaagtagattctggggtactccacttccactgtggatgagtcaagatcgtaaagaaattgttgttatggattctatcgaaaagcttgaaaaattatctggagtcaaggtcactgatcttcaccgacactatgttgatgatattacaattccctctaagaggggacccaagtttgggacgctcaaacgtgttgatgatgtttttgactgctggtttgagagtggatcaatgccatatgcctacattcactatccatttgagaatcgagagctatttgaaaagaattttcctgggaattttgtggcagagggtttggatcaaacccgtggatggttttatactctgatggttctctcgacggcactgtttgggaagcctgcatttaagaatcttatatgcaatggccttgtcttggctgaggatggtaagaaaatgagtaagagtaaaaagaactatccttcaccaaaagatctcattgacgagtttggagcggattctctgcgtctatatttggtaaactctccagttgtacgtgcagagtctctacgattcaaacgtactggtgtctttgctgttgtgaaagatgtcttcctcccatggtataatgcgtacagattctttgtccaaaatgcaaagagactggaagtcgagggtcttgcctcattttctccgatggaacaagcggtacttctgaagtcatccaatgtgttggatcactggataaactcagcaactgaaagtctagttagctttgttcaccaggagatggatgcatatcgtctttacacggttgtgccatatttggtaaaatacattgactatcttactaacatatatgtgcgcttgaaccgcaaacggttcaaaggacgtactggagaagaagactgcagaatttctctctcaacactctaccatgttctcgtaacaacttgcgtggtgatggctccatttacaccattctttactgaagttctttatcaaaatttgcggaaggtatcaagtaaatctgaggagagcattcacttctgcaagttcccttccacaactggtgagagagatgagcgtgttgagcaaagtgtaaataggatggtgaccatcattgatcttgcacgtaatattcgtgagcggcataacaaagctctcaaaacaccactcaaggagatggtggttgtgcatccagacaatgactttcttgaagacataactggtaaactaaaagagtatgtcatggaggaaatcaatgttaagactgtcactccatgcaatgaccccttgatgtatgcttctctgcgagctgaacctaatttcagtgtgctgggaaaaagacttggaaaggacatgggcaaagtatcaaatgtggtgaagaagatgactcaggaacagatcttagacttcgaaaaaagtggagagatttcattcttcggtcattgcttgaagctagatgatattaaggttgtccgacaattcaagcgtcctgaaaacgtgtcggagaaggagattgatgctgcaggagatggttttgccattaatatgctactttgtctatagtttggctaatctctttctgctaacatccctatattgcttttgttataggcgacgttttagtcattttagatctacgagctgaccagtcattgtttgaagctggagtggctcgagaggttgtgaacaggatccaaaaattacggaagactgctcagcttgaacctgctgatccagttgatgtgtattacgaatctgtgggcagtgacaaaaacacactggaagagattttgaagtcacaggatcagtatattagggacgcacttggttcaccaattatgccaaaagaaatggcaccaacagatgatagtttatcaaactgttgtttgcag

SEQ ID NO: 24359 - DNA, 1280 bp, Zea Mays
ccgttggatcacttttgctcggtccagattcactcagattgggcttttagaaaacccaacccacgccgcgccgcggggcctcttaccagcttcccaaatcccaggggcaatgtcagcccacgccgacgccggcgccggcgccggcggccgccgccgcgggacccttgctaaggtcgccctctcgtcagtgtcggccgccatggcggaggcctccacctaccccttagacgcagtcaagacgcgcctccaactccaccgcaaccccggcggcgcgcccgggcgcggcgtaatccgggtcgcggccgagctcgtccgcgatggcggggtttatcggggcttctgccccgccgtcctccgccacctgatctacaccccgcttcgcatcgtggggtacgagcatcttcgctccaccctcgctagcgaggggcgggaggttggactttctgaaaaggcgctcgctgggggactctccggcgttgccgcgcagtgcaggtggtgtcaagccctgctgatctcatcaaggtaaggatgcaagcagacagcaggatgttgagccaaggcattcaaccacgttacactggaatggcagatgctctcactaaaatcatacgagcggagggtttccggggactttggaagggggttgttccaaatgcacagagggcatttcttgtcaacatgggtgaattgacgtgctacgatcatgcaaagcatctcatcattcacaaggagatttgctctgacaacctttatgcccacacattggcctctgtcgcgtcggggctgtctgcgacaactttgagctgcccagcggatgtaatcaaaacaaggatgatgaaccaggggaaggagggtaaagctatgtacaggagttcttacgattgcttggtcaagactttgaggcatgagggcgtaacggcactgtggaagggttttttgccaacatgggcaaggcttggcccgtggcagtttgtgttctgggtttcctacgagaagctgcgccaagcatcaggcatttcgtcattttgataatggagggtttttgtttcattccagaggcttttagatcacagaaatgttcattcctgcaacttcatggtagctttataggatcgaacccttttcatgctggtttactggactgcgggcttttatccttcgctgttttcaaggggggaaacagacgaagttgctatgcctcattgtatttttgagtttttgacaatatacaggactcttggacagttggattccacaaaaaaccgatactctcatctttg

SEQ ID NO: 24360 - DNA, 914 bp, Zea Mays
aaaattctgggccttatggggcttctccctcatcgggtcatccctctccgccccgcatctccctcatcgccccgcgcggccgcgcctccctcggtccctccccgctacctcgaacctctcctcctcctcctccgccgccgccttccctccggccagcgcatcctcctcctccgcctccgccgtcctccggctggaggcacatcctctgcctcctctgcctcccctcatgtgacacagcgcacatcgcttccgaagtcccaagagccacgtcgctcgtgccaccggccgccgctcgaacgaggaggacgccaagaggacaggactggaaggcactggcctgccgctgcaaggcggctcccacggcaaccttcgtagcgctggcagcgaccagcagttgaggcagatgctcgattcgctcaaatcctcaaagtccccggctgtgatcaactatggtgcctcatggtgccgtgtctgcagtcagattcttccatccttctgcaagtgcagtgataagttcaagaaacttactttcatctatgtggacattgacgagtgccctgaaacaacccaaaacatacgctacaccccgaccttccatttttacagagacggcgaaagggtcgatgagatgctcggcgcaggagaagagagactacatgatcggctatggttgcattcttgattgattggcctccacctccgttgtttcatgaaccatttatgttgaatgcaactatgttttttgtctctccaaatttctacttgtcaaactcaatgtttcagagaaccttgtctaccagcctttgtgttagtcataagagcaagtattataagtacacctcagcaggctgtaaggtgttccacgttatcagattcttacgtggaggggtgagaaaccaagaaagagaaagaaa

SEQ ID NO: 24361 - DNA, 659 bp, Zea Mays
ggtgagttcatgcgcattattcccacaacttgttgagcgatgaatgtatgtgaggtcacccttgctgtactcacatcccctaggtcatgaacaggtaccacaggatgaggcgcatgaaggatgttgtgatgagttcgtgagtggtctaggccgtcgtctcccagtcacctttggttgatggatcgttgacttcgtatgatgtaattatttaactattttgtatagaactctgttatatattaatgatatgacattcgtttctgtaccatgagtcatcatatgtgtgagacttgatcccagcacacatttgattattcgcgcccgggtttggtgcccctaaaactcgggtgtgacagaggcagaggatgctttcattatagagagcaaggccactggacaatacattgcccgaatgagatgacacagcaacagttagctcccaacaccgtagcaagacaaggttgaccccaacaagcagtaggcaattgtggtcgggcataccaccgtggaaaggtgaatcacttggaggctaaagcaatttaggacacaccgaacgtggtagtaggtatgttcttagttgaatcttgtccagcaagtgtgctatttgttactggtgcaacacatttatttatcgctacaaaatgggtagaaacatataa

SEQ ID NO: 24362 - DNA, 1385 bp, Zea Mays
tttcgttcgtgttcttcagctcagcatccagattccagactagctgctagggctttcctggtgatccagctgatcagcgtcaccaggttcatcatgtggctcaacgactggtgccgcgcagagatgacccagaagagataccacttgcagattcaggcggtgtccatcgtcacgtacgtggggtcgctcctggggatcgtgctcatgtacgtgtggtacgcgcccagcccggcctgcaggctcaacatcctcttcatcaccgtcacgctggcgctcgtgcagctcatgaccttcgtctccatgagctccaaggtgaaggcagggtacgtggcgccggggctgatggggatctacgtcgtgttcctgtgctggtcggcgatcagaagcgagccgcacacggaggtttgcaacaggaaggcagaagtcgccacgagcgcagactgggtgaacatcgcgagctttgtgatcgccgtcgtcgtcatcgtggcggcgaccttctcgacggggatcgactccaagtgcctccagttcaagcaggcggagggggagtcggaggaggaggaggaggacgacatcccctacggcctcggcttcttccacctggtgttctccatgggcgccatgtacttcgccatgatcttcgtcggctggaacgcgaacgcgagccacaccatggagaggtggacgatcgacgtcgggtgggcgagcacgtgggtgcgcgtcggcaacgagtggctggcggcaatcgtgtacatatggatgatgatcgcgcccgtcatctggaagacgaggcaggtgggatcggcggcggagacgtgagcagtttttccgctgattctgagtttctgacagccggaatctatatatacatacaaacacaagagcaaatcaaagggacgggaaacgggaagagctcgggtagtttttgctaagctggaggtgcagcagacaagacaacaagaaagaggaggcaactaaggagtagtactatactgatgccactagtccatcgtggagctcggttcaggaagctcatcgatctcgttgtacttgtaccgaactatctcaaaaaacatagtgcctgtttgtctggattgctgctcggccacaagcacagctgtctggcccggggcaccatccaaacaatcccatatagagcgtgtttggacgcagtcatgcgcttgggttttgcttttgcctgtctgtgcccggcagattcatgggcctgtaagcaaacacgtcccaattatctgaactcggaattatttacgcctcggcaagattcatcaactcaatttttttgtgaacaatcttattgtgttactaggtgaatgcccgtgcgttgctacggagtaaacatattatgataagatatattgaaattc

SEQ ID NO: 24363 - DNA, 3215 bp, Zea Mays
cgcagtgctagtgtgctacgcgcagtgagtgaaaccaataccgtcacggcgtcactcatccgtccatccccgcgaccgcaccgccaccgccatcggaccagagtaccagaccaccacctccccccgcaccacgctgccacactccaccggccgcacccccaccccgacccggccaccccgtcacccgccgccgccgtccccaccacagcacaccccggtccgtcccctcccctccccgatgtccaccccgtccgtgccaccgccctgcccgcacctcgccgcgcaccgcctgtcctcacgcccgctgcgcttcctccgccgctgcctgcgcgtgcgcccgctcggccgccccgagatccggcgggacccgcgcgagctcccgcgctgctcgccctgctccgccgcgtccccgtcccccacctcccgcctctacgcctgcctctcctgcgccgccgtcttctgcccctcccacgccgccacgcacgcctccgcctccgcggggcccggccaccagatcgccgtcgacgtcgaccgcgccgagctcttctgcgccgcctgcggggaccaggtctacgatcccgacttcgaccacgccgtcttcctcgcccagtcctcctcgcttctcccctccacctccacctcctccgcctccgcctccgcctccccggccctccgcaagcgccggcgcgtcgattaccgcgcgtgggcgccagatccggccgagttcgcgctcatgacctccgcggaccccaccacctccgcctcagcctccgcgccggcggggctgcgggggctcaacaacctcggcaacacctgcttcatgaactccgtgctccaggcgctcctccacgcgcccccgctccggaactacttcctcggtgatcgccacaaccggttcctctgcccgcgccgcacgcccgtcaggcaccgcgcctcagacgccgacagggtcgcgtgcctcgcgtgtgatctcgacgagatctactccgcggccttctccggggaccgcacgccatacagccccgccaagtttctatatagttggtggcagcatgcatcaaaccttgcaagctacgagcaacaggatgctcatgaattctttatttccatccttgatcatatccatgaaaatataaaggatgatcaacaaaagtcatatgcccaaggccatggggattgttgcattgctcacagagtgttttctggtatcctgaggtcagatgtcacctgcacaagctgtgggttcacatccacaacttttgagccctgtatggacatttccttagacatggatgcaggagataacagttcttttggtgttgcaaacacaaagtcgcatgtgcgcaatggagagcgaggcttggctggcgtgaattccaaggtattaactctaatgaggtgtttggagaggtttacaaggtctgagagacttgatgccgagcagaagttcttctgtgaacactgcaacgagaggcaagagtccctgaagcaaatgtccattcgcaggcttccattagtttcctgctttcacataaagagatttgagcattcgtcagtcaaaaaggtgtcgaggaaagtcgatcactgtttgcagtttcccttttcccttgacatggcaccttacctgtcgtcatctattctcaggagtagatatggtaaccgtatatttcctgcagaagctagtgacgcggacgcagtttcagaagtgtcgtcagaattcgaaatatttgcggtgatcacacatagcggtaagctagaagctggccattatgtgacatatctgaggctaaacaatcattggtacaaatgtgatgatgcctgggtaaccagagttgaggagcataccgtcaggacttctcaggcatacatgctcttctacgtgcagaagacgttttactacaaagcttgtgaaagagcagccacagtctgatctgaagcaaacattgatgacacaactccagaccaccataaatttatttgtcaccgaatcagatacacatgtagtagtagttcgtcaatcgagagggaaaacgggcgccgtatccacagcacagccatggcctgtcaaatcttttcgttctccactgacctgtagttccaatcagagagaaagctttttcggcagatttttttctttacagacagacatctgcccaagcgaagatgcttgaatttatgcattgagttatattgtgctggctaatggatatgttgtggcgatttccttaatactcaggtgcttcaccgtttggtacctgtggtggtgactggcgaggatgctcttaaccagttgtgcttgtgttcaatataaggtggagcaaggaagaggagtataaaacgtggaaagaaaacataaagaaagggaaccgatttttttttaataagcaggcaaatctggttttacacagaggactcttctaggtgatatgtttggtcttatgtcagcaatcgcctatggtctatttactgtgctgcttaaaaaattttgtggagaggaaggagaaaaggttgatgtccaaaaactgtttggttatcttgggctttttacccttgttgctctatggtggattgtctggccattaaccgcactaggcgttgagccaaagttttcaatgccccactcagctaaagtggatgaagtggtggtggcaaatagcctaatcggaagtgtattatcagactacttctgggctctttctgttgtttggactactcccttggtggccactctaggcatgtctctcacaattccaatagcaatggttgctgatatgatcattcacggccgtcactattcagcagtatatattcttggttctgtccaggtattttcaggctttgttatcgcgaaccttgcagatcgcttttctcgttctctagggctatcatagtctcataaaacagaacaggcccttattagagcgtgcatcaggaagctccaaggtcgggttggttaggccaatacttcagaaaacctggatcgggagataccaggaattattttccctttgcttctttaaacatagtggaggtgaattttgccgtggtgaatagtgaaaggcagcagatgaagaagaaaacatatgttatagcaaccctttgcaactgtaaattctcttactacaaattgcgcgacagtgtagactgcggccgttctcggcccatgtcaacaggcttgctcgatttcaaatttgcaatgtccttttatccgtgtt

SEQ ID NO: 24364 - DNA, 1084 bp, Zea Mays
ggagaagcttttatgcagatttcaagttaatgaagctgtggttagtggatggctctttttccgttatttggtcattggagcttatgttggtcttgctactatagcgggttttgtttggtggttcgtttattctgataatggccctaaattaccatattctgaattggtcaactttgattcatgttctacaaggcagacttcatattcttgcagtatatttgaggatcgtcatccatcaactgtttcaatgactgtgcttgttgtcgttgagatgtttaatgccttgaataacctaagtgaaaaccaatctctgcttgtcattcatccatggagtaacctgtggcttgttgggtctattattctgaccatgcttcttcatgtagcagtcctgtacattgaaccactatcagcccttttctctgtctctccattgtcgtgggttgagtggaaaattgttctttatctatccttccctgtaattttgattgatgaggttttgaaattcttctcaaggagaagcccacgaggtcgaagattccctttaaggttgtggagacgtgagatacttccaaaagagtcgagagacaattgattttaggcttcagcatatcagatgcatacaatgcaaagcgaaaagcttgtcttctgttagtattgagcctaattttggcaaatgttcatggatgaagatgacattgtacaaatctttatgtggctgatatctagggccgagcatcttcgagaatagagttcgcgactacacaattcattggggggggggggggggggggttctcagaatgctagttttgctcagaaaacatagagaagcttcgaaagccttctcactagttatagacggtgctacacttgtatcagaatgtcagatgcttacaaaaggatgagttcatgcaacacccctttctcccaaccaatgaaatcactgtacgcatcaggttctgtcaaattttcagggtgacagacgccgttctggtatttctgccattttatacatcgcaaaagttttgcaccttgatattgttggaaacaatggcatgttcggctgaaatttacaaccactgccg

SEQ ID NO: 24365 - DNA, 470 bp, Zea Mays
cttgctcccaaacaagtctttagttcatttgacagaggtatgacatgtataatgactgagcaggctagagcctgaacatagtcaatgatatgctcatgaggtgaaaccaatcgcttatgcaagggtcgatggctgtttgaaattgctagaacacaaactgaagaccgatttcgagttatatagtggacctgaaaatgttcctgaacttttaaaggatgtgcaggaagtgttgttctttcagatttatttttgttttttagtctcaatgtctagcgtcatagttgtaaagcacatgaactgcgaaattctgcagataatggctgcattttttataaatgtgatttttaggtaccagcagcctagcaacggtcttgtttattgcagtggccaaccagtcaattggtacttaaaaagacatgtttgtttaaatgaatgattcaagtgcatggtttgttaatatttgattgaaa

SEQ ID NO: 24366 - DNA, 1774 bp, Zea Mays
ccctggtccatcagcatttcattcaggaccatagtgatggttcagaggaaatgcaagttaataatgaggcaccactagggtgcctcaagccaaatatttctcagtataactctccagagcagataggtggtgttgaagggtttcctgagaataatgaaaaaaggaatgatattgttgctgcggaaaaaatctgggaggcgactccaaaccaaggccttagcaggcccatctaccgacaagaattttatgcctggccatatatttattcagattatcaaatcgtgcgtcagccactaccttatggttttgacaaccaattttatcagataaatagggaccacggtttccctattgagaacagggttcaatatcttccattcaagatgctccctcaaggtcacccccatgatgcacagcttcaggaatttcagtattttgtggttattgactttgaagcaacctgtgacaaggtgaacaatccatttccacaagaaatcatcgagtttccatctgtcttggttaacagtgcaactggaaaactcgaagaatgcttccaaacatatgttcggccgacgtatcatcaatttttgactgatttttgcaaggagcttactggcatacaacagattcaggtggacagaggtgtgcctctaggtgaagccttactcatgcacgataaatggctagaggacaagggcatcaagaacacaaactttgctattgtgacctggtctaactgggactgccgtataatgctggagtcggaatgcagatttaagagaatcaggaagcccccttattttaacaggtggatcaacttgagggtaccgttccaggaagtgtacggggacgtccgctgcaacctgaaggaggcagtccagctggccgggctcacatgggaggggcgcgctcactgcgggctcgacgacgcccgcaacaccgctcgcctcctggcacttctgatgcaccggggcttcaagttctccatcaccaactcactggtgtggcaacctgccgccgctccgcagtcaaccgccgccacctgccacttctccccggaccgctctccggacccagtcgtcgtccagctccagcaccagcagcagcagcacaagccgaaggaggcgctggggtctcccgcgtcgctggtgaacccatcgtacgccacccccgcgggagggaaggacagagccatgtactgctactgcggggtgctgagccggtggagcgtcgtgcgcaagccgggacccatgcaggggcgctacttcttcgggtgcgggaactggaccgccacccggcgcgccatctgcccgtacttcgcatgggcctcgtgaatagcaaagcaagcagagatctgggctggtgctttaaccgagggaggcgcgccatgttgctgcggctggctgctgcgcctcccagttccgtatatattattattgttattattatggtataataactttgctcgcgagacaatggaggttatctaggtagtgtctctaacctgtcgtactgacttctgtcgatagaagagaatggggccagatgctgcttaggtgtgatctatcctatccatccatggataataaagaagtttgtggattgctgttttattaacttgatggaactcctccgtaggtgtggtttgtgcaacttggattttgaaggcttgtgcgtctgtgagtgtttgatcaaatcgaaggtggtgtttgtttgctgaatgaaatggttatggaaggtgcctattattcctgacaagctctgttcagtgaga

SEQ ID NO: 24367 - DNA, 778 bp, Zea Mays
cagccctactgacgttgcttcgcttcgcgactccgtgataagcgctcgcgccgcctctctggctctcttccgacgccctcaccgttgtcgttcccgtttggccgcacgcgtccgccacaccccagctcgcctccccggctcacgtctgcctctgtttgccgcccttcccgccgccgttcccatctggccgcacgcgccggccacaccccagctcgcctccccgcccccggctcactgcggctcccgtctgcttccgtctgcagtcctccccgccgcagttcccatctggctgcacgcgcctgccgcaccccggcccacctccccggctcgtgaacgcctccttccgccgccctcaaatccgcgtcgtctttggcgtgacaatcctgtggttcctccagttgaacggtgacgagtacagcggattttggccttccgattcgattaaaaattctgtcgtgcagttcctattaaggtccaacccatttgaaggcaattgaaaggccaaaacagattgattaaggtgccaccacctaacaaaaccaagcttgcaatggaatcctcctcaagcaatggtagcaatgtgccactgcctgcatctcaacaccctctacatgtgacagatgcagatgaggaggacaagagtgtaaagcagcttaacgagtgtgccacaatatatctatctctccaggactgcctcattgagtcaaaccgcaactggaaggtctgccaagcattttccagagcttgaaaggcatcaaaagtatgttctatctattac

SEQ ID NO: 24368 - DNA, 823 bp, Zea Mays
tttgtatcaaactgctttgaagttattatcctgtccgcaatgaggaagaatgtcctggccaagtgctatggcggtgatattactcggaagaagaagttgctagagaagcaaaaggaaggcaagaagcgcatgaaacgtgtgggatctgtcgacattcctcaggaagccttccatgagctactgaaggtctccaattcaaaatagatggtgatccactgcaaatttagtttctgtagctgtccaaattttataagtagctgtgtggtgatgagtagcagcaaccttttctagtcatcttctgacagatcttgacagaatgatcgattccattgagtacataatggcctctcctgcgccttgtcagacgagccaacttgtgctggaagttgctcctcctgtagtcctgtcatccatcctgtggtgattgatatacacacaagtcttctcagctggccgcagacggatttcagtagagccaccatctttgtatttgttgattgattgatggaaaaccatcctttgagcacttgctgaacccagttttctctgctgacctgacttgtcacgttacactctattttttgtgttagataacggttttgagcaaaaataataggtcatatacacattaattggtcactgaaacaatgtggtacatgtaataagaggagctgcattgaataaagacatagtagtatcacgtttttggagtttgcgggctatctccttttcatcctgaaatgaacccctcttctaagccgagagtatcgtttggcttcgaacacagaagttgataaataaacacaaaaaataaaaaaaaaga

SEQ ID NO: 24369 - DNA, 1248 bp, Zea Mays
ataaattatcataataataattatctatattaactgactatacaagagtgtcgtataaaattatcataaaaactaaacaccttgtatacaggaaaaacgataaacaaaagagtaaaaaaccaaaaaacaaaaacaaagtaccatcgcccttccggttttctccccagcccccgccccggtcgcggagccgtcgttctcgtctttcggtactcgcgcgcgccagctcacttctctacttcccttccccagatctacctccattcttccctcaaaatcacagatctctctcggccccgtgcccagcgctccgaaaccctagcgccgccgcgggtgccaggccgcgagcgtcgccatgggcatcgtgtttacgcggctcttctcgtcggtcttcggtaaccgcgaggctcgcatcctcgtcctcggcctggacaatgctggcaagaccaccatactctatagactgcaaatgggagaggtcgtctccacgatcccgacaattggattcaacgttgagacggtgcagtacaacaacatcaagttccaagtatgggatcttggtggtcaaacaagcatcaggccatactggcggtgctactttccaaacacccaggctatcatatatgttgttgattcaagcgatacagataggcttgtaacagcaaaagaagaattccatgccatccttgaggaggatgaacttaaaggtgcagttgtccttgtgtatgcaaataagcaggtgcactcgatgatgctgccattacagagtcattagaactacacaaaattaagagccgccaatgggcgattttcaaaacatctgcaataaagggagaggggctcttcgaaggtttggactggctcagtaacacgctcaaatctggaagcagctaaggagcctccgcctcgtcatgaatcatttgctggatggtaaagaatagccgatgcttgcaagtcagcgcgcaaatcccattctctttgttttaactccagaagttctacaccgccatcaattatctgtaaagtgcgtgttaaattttttggatactacattagatgtacccccaggttgagatcaagaataggtctgtggaaaatgacgagcaaactgtgctactgtctttacccgtaaatctcatggatcatgacaagtttttttttgtaccccaatatgattaaacttactccacatttctatgttttcgtatcagtgatcattacagaaactgctcttaagcaccttctgctacc

SEQ ID NO: 24370 - DNA, 958 bp, Zea Mays
cggccagaagtacgttttagaggacactaggaagtatttaaagaaggtgaaaaatgctcaagaagcccacgaagcaattaggcccaccagtataaggaggttgccatcatctttggttggaatacttgacgatgattctctaaaactgtacactctaatatggaaaaggacaatggcttgccaaatggaagcttctagaactcagatgattcaagtggatgttggcactcctgaaggagagatgatttttcattcagctgcatcaaagctagacttcaagggataccaatctgtttatgaggacactgagggagattctgtgcatgaggataactttgaggccttgtcaaaattaatggttaaggacttggtgtcccctgttaacgtgcatcttggacagcactttactaagccaccatcacgttattctgagggtgcattgattaaaaagctagaagaacttggaattggaaggccatctacttatgcatctataatgaaagtattacaggataggaagtacgtgacagcaaaaagtcgagttctacaccctgagttccgtggtcgaatggtctcggcattccttttgcaccatttctctgaggttgctgattacagctttacagctaacatggagacagagctagataatgtctctgctgggctaactgaatggaagggtcttctaaaaggctactgggaacgattcagcaaatattgtgcagatgcgagtaatctggatggcagaaaggtagagagaatgctcgaagaaaaatttggtcctatcctcttccctaatgttgacacagacaatagaatttgccctaggtacattgctcgctcattatcacaacaagaagatgaaaccgaacccaccgaagaatgtcaaaaaacttttacacccagattacttggtgtcatgcctgattctgatgaaaaggattggtgttgccaatga

SEQ ID NO: 24371 - DNA, 1233 bp, Zea Mays
agtttcgactttcgattcccctcgccctcgccgacggccagacgccgaacgtctcgccctctcccgacgctccccgcctcccccttgatccgccgagcgcggcggccgccgccgccgccgaacccgatctccccccctcccgcgtgacaggcacggcctcccctcggttggaagggtttgctgtatcatgcattttttgtggataatcttcattttctcttgagtcaccgattcttttgttgtcttcaaaatgtcgggcttgctgaactcaaaccttaatagttcggcatcaaatctttcagactcagctggaaggccatttacagcatccttttcgggtcaatctggatcaattccaggttttcatcattctggcttgcataacactcatggaagttacaatcttccgagtatgcctggatcacttgcacaaaggaatgctgccatgagtggccttccgtcctctggggttcaacaacctggaggtagcattcctgggagattcccttcaaacaaccttccagttggcatgcctcagattcctcatgcacattcaggtgtcagtggtagagggatgaattttggcgcaggtccggcatttagtagcagcatgaatattggtggtaacatccaaggcttatcctcgggcttgggctccggtggtaatcgcaattctgttcatgggatgccagtatcttcatctataggaaactcgggtcaacggataagttctgtaggaaatatggtaagtgcaagcaatattggaagaaatataggcactggtggtttgtccgtgccaagtattgcatcacgaatcaatttgaatggtagtggtgggagtggtagtctgaatgtgcaaggatccagtcgaatgatgaatggattgcttcatcaacaagcaactcctcagttgataaatatgcttggaagttcatatccaacatctggaggttcattatcacagagccaaattcaagcaggaaataattcttttagttctatggggatgttgcatgatgccagtgacactgctccatttgacataaatgattttccccaattgtctggtcgacctagttctgctggtggtccgcaaggacaatatggatcactgcgcaagcaaggagttggtgttaatacccttgtgcaacaaaaccaggaattcagcattcaaaatgaagacttcccggctttgcctggatataaaggaaccaaaaccaaaagtgagtacat

SEQ ID NO: 24372 - DNA, 1129 bp, Zea Mays
actctgatatttatctcaccctcactttggtctcatctaaacaccgtaaaattgtgatgcccccttctatccattcttatgatcaaaccaaacataccactatagccgtcgccaatacccgataagactcggcaaatcagctggacacatagcacatctatcccgcttccgtctcccgctccagtcgccatggcggaagccctcgtgggcctccgcgtcgctgccctcgccgtcccgcagcctaggagccaccgcagacggcttcttcccgctgcgcgcctcgctgcgttccggcgcgaccggctgagcaccgcccgcgcggccgtcgcagggccaccggaggtggacgaggacgattccatgagtatcgacaacttgcatcgtttcttcgacctcaacgtcggaaagtgggacgggtcattctaccaattcgacgcgcacgggagggttcttcaggagattagcacgcggctgtccgtgagcacgtacggggaggacaacctcatcagcctccttcaatcgttgtacattaagcaagcatcctctgcaatatcaatcgtggacgaagaggattctgaacctgaatgggtggaatacaagatcaaagagacgaacatattcactgtggacaaatatcagcagatagggttctttcctgaagaaaaggcatttgctctgaggtatcagactgctggaatgctggagactgttcttcgggttggcacgcttggagaagatgatactggtgaagaatctcccaaaaacctgaagataccttctcgcaagccatctatcgtatgtgaaaattgtctttactcccttgaaggcaatggtcgaatgagggctttccacataatggatccaaagggagtgcttgacacacttcttatttttcatgagaagaggcagggatctgaattggcacaatcatttaaacactattcagtttgtaccaagagtgccagcagtgataggataagtacagtacttggaagatgggagggtcattctgtgactaagaggagtggggtgtatggagcaacacttgctgaagcagatacagctgttgttctcaaaatgggctctaatggccaattgattcagattgacccagtgcgatatgtcgttg

SEQ ID NO: 24373 - DNA, 1974 bp, Zea Mays
cccaggcgtacgtatccagagcaagggctgtcctgcccttcttcccacggttcacggctgattgagtcggccactgcccacgccacccaaaaactcatggccagcgctgtctgcggcgtcaccgcgcgcgcccacctgccttccgccgtccctgcagccgcaagaaagctcttcttccgctgcagggccgcgtccaccatgaacgaggcatcggcgagctcgccggacgccgaggagaagaagacgacgactgtcttcgtggccggctcgacggggcgcaccggcaagctcgttgtggagaagctgctggccaagggattcggcgtcgtcgccggtacgacggacgtgagcagggcccgcggcagcctgccccaggaccccaaccttcagctcgtcagggctgacgttacggagggcgtcgacaagctggtggaggccgtgcgcggcgtcgatgctgtcgtctgcgcgacgggattccggcggtcctttgacccttttgctccgtggaaggtagacaactttggcacagtgaacctggttgaagcatgcagaaaggctggcgtagcaagattcgtactcgtcagctccattttagtaaatggggccgccatgggtcaacttctgaatccagcctacattgtgctcaatctacttggcttaacactggtcgcaaagctacaggcagagaatcacatcaggaaatcaggaatagattacactatcgtaaggcctggagggctgacagatcaacccccaacagggaatatagtcatggaacctgaggacactctttattcgggatccatatctcggagccaggttgctgaagtagcggttgaagcactggatggttagtttgttatacaaccatgaatcaatgaagaacacttatagtctatgtatttggcattcgacagtatatttttgactcgcgaaaatctcctgaagccttcagtctaggccggctagttcacctctaaaaccggtcagaccgggtgtccaacatcagctagactggccaaaagttaagtgctcgttcccgtgaaacctggctagccgattttttcagattttgaaccggtttattcgaaatcgatttgtggatctatcttgacgtgaaaaaaattagagaatgcattttgaattgttaagaacgcatctactacatccttctaccctcacttatctatccaccttgttgtttgtcatgtcatcttgcaagatttaacggtgttctaagtggtcttgtcgatccaaggaaaacctctaaatacttgttctcgatgagatgagtcttcacaggaggtactcaggagtctaccaagcaaagaaaaggaccaacattagtctaactaacccctttatcgacaacgggatcaacattggtctaaccaaccccttgattggttttgttagtctgctatgttcttgttgtgatcaagattatttgtaaccatgggtgttctaacttttgctggtgtgtgatccaaatcagcatcaacagacttttctatgactacgggggaaagaagagcaagatctaatctgctagcaacaagtcaggttttgagaacactaaggggaaggaggatcacatcgacccttcaatccaaagaacaccaaccatcctacattgatagaagttcttgatgatcttcatcagaagattgaagccaagtctactgccaatctaaaggctttcttaaagagttaatgattagtgagacaaggttactcaattcgtgagcctaacttcaataattctattgtttctacatctgctataccagaggtaaagattgatgaaaaggttctgtttcgggcgacccattggcttaggttttgggcatatttgcagagggttgaagaccaggagataatcaaggagacgtgtcgacggattgaagtcgcatctatgcaatttttttcttattttggttggagttttacgaacatgattacatattgaggtta

SEQ ID NO: 24374 - DNA, 1491 bp, Zea Mays
gaaatatcatgtcaggctattttggatggaaagaggcaagcttgacaaaggaggatactcatcaatatctggtccacgcgtgattgaaaaaacgtttagtgacatgagcatcagtggttctggatttggtagtggttctggattaggtggactgagcactgatatggactcatttgccagcaagcccaaaggtcgtccatctacagcagctactgcacctggtaaaggttttggtatgaaattaggcaagacacagaagacaaatcaattcctcgagtctttgaaagctgaaggagaagtcattttggaggatgtacaaccaagtgcagtttctacaagatcatctgctcttccaccaagtgaccctgtcacagtgaacatagaagagaagctcaatgttgttgttaaaagagatggtggtattagtaactttgatgttcaaggaacacttgctcttcaggttcttaatgatactgatgggttcatccatttgcagattgaaagccaagatatgcctgggcttagcttcaaaacacacccaaatatcaataaggatttgtttaacagtcagcaaattttgggagcaaaagatccaaacaggccctttccgagtggtcaaaatgaaactcctctggtgaaatggagaatccaggggatggatgagtcatctttacctctgtcagtcaattgctggccgtcagtatctggaaatgaaacctatgtgaacattgaatatgaagcttctgagatgtttgatctgcacaacgttgtcatatctatacctctgccagcacttcgggaggctccgagtgttagacagatcgatggagagtggaagttcgactcaagaaactctgtgttggaatggtctattctccttatcgatcagtcgaatcgcagtggttccatggaatttgttgttcccccagctgacccatcatcgtttttccccatctccgttggattttctgcatcgagtactttcagtgatctgaaggttactggaattcttcctctgaaggaaggcaaccctcccaagttttctcagcgggctcgtttgctcactgctaactaccaagttgtttaacgcttgtaccgcgagtgttggtccacttgaatgctccaatagcagatgttattgccgtggacttatgcaagccatggcacgggagattattttgtgtttggaaaatttctttactatgcgcttctcattgttatagcatattgcacaaatgttgttctaatgtattgccaccagagaaataagtaatgttcttgcattttgttggcatgcattttgtacccgtctctttcctcctatgaggatgttgtcaggacagtgttatctcctgggcttggtgtaatgtgatcgtagcatctccacctgatcccttgtccctactgccactagtcaacttttggcaacagatccggtggtcttatttatcttattttctattttaaacttcgctctacaaacaatgtttt

SEQ ID NO: 24375 - DNA, 839 bp, Zea Mays
cacgtatctctgctccttctccctcacgtctcattctctctatcctcccactgctctttctctctctgatatttgttctaccaccgctgttggctttgattttttggagagctgcgtcgttcttatcccgtgtacattagctggacctcctctctccttattgcacgcgcgtgggcaatgagaatggctcgttttctctacttgctggctgcggtcccttgctcaagccgtcgggcaccagatcgcctgggttcctggtcgtccagctcgctggtggagccctggccgaagcggtagcagcgcccaggtttccgtctgcccaagctctgccatggcgagtccctcccgtctttgctccttccctgcttgcgtcgtggtctccaagctcgtcagcatttgttcaagtcgtctcggcttgctcggacttaaattctagcgccttgctttgctctcgtggtttagcgacggccgatgtgagcctggccgtggtggtgttgtggcgtggcgacgtcgtgcgcgtcgcgacagctgtcttgaccgtgaagcagtccgcgccatagagttcgctcggccacggtctcgttaaactacgaagcttcctcgccatgcgctctggcatcggctgccgccgattccgtcataaagttcacgagcgctccttgctcagtttctttcacagtgggcaatttctccacgtttcaatttcgtgctgcttgccccgtgtgtgctcgctcctcatccatcgggtttcagcgtgttcgcgtttaccgtcgagtcgtcgaacctgtcatcccaagctcgacccccacctctgatatagctgaggtgcccgatctttc

SEQ ID NO: 24376 - DNA, 1633 bp, Zea Mays
cgcagccccctatgcagcccctccccttgcatgccgtcttacgagggagcggtgaaggaggacggcagagggaaaaccatctgggacaagttcgcgcacacgtttgggaaggttgcagacctgagtaacgccgatgtcgcggtcgatcagtaccaccggttcgaggaggatatacagctcatggcggacatggggatggacgcgtaccgcttttcgattgcctggtcgaggattctgcccaatggtaccggccaagtcaaccaggccggcgtcgaccactacaacaggtttatcgatgcactgctatcgaaagggattgagccatacgtgaccctgtaccactgggacctcccccaggccctggaagacaggtacaacggatggctggacaggcagatagtgtacgacttcgccgagtacgccgagacatgcttcgaggccttcggagaccgcgtgaggcactgggtcacgctcaacgagccgcacacggtcgccgtccagggctacgacgccgggctccaggcgccgggccgctgctccctgctgctccacctctactgcaggtcgggggactcggccaccgagccctacgtcgtcgcccacaacttcatcctggcacacgccaaggtctccgacgtgtacaggaaaaagtacaaggcggctcagaacggagagcttgggatagcgttcgacgtcatgtggttcgagccgatgaccaacactaccgccgacatcgaggctgccaagagagggcaggagttccagctcggatggttcgcggaccccttcttcttcggcgactacccggcgtcgatgaggtcgcgggtcggcgacaggctgcccaggttcacggcggccgaggccgcgctcgtcaagggggcgctcgacttcgtcggcataaaccactacaccacctactacaccaagcacaacagcaccgacctcgtgggccgactgctgcacaacaccctggcggacaccggaaccatcagcctcccgttcaggaacgggaaagccatcggtgacagggccaactcgatctggctgtacatcgtgcccagcgggatgaggagcctgatgaactacgtcaaggaaaggtacaacagcccgccgatttacgtcaccgaaaacgggatggacgacggcaacagccccttcacctccatcaaggacgccctcaaggacagcaagagggtcaagtaccacaacgactacctcaccaacctggctgcctctataaaggatgacgcctgcgacgtgcgtggctacttcgcctggtcgctgctggacaactgggagtggacggccggctactcctccaggttcgggctctacttcgtcgactacaaggacaaccttaagagataccccaagagctcggtgcagtggttcaagaacctgctggcctctagctgaagcctcgatggatatatatatactgcattgtcatttccttctttaatcttcatggcctgcccaagtggccatctgaaaccatgcatgcatgtacgctgtggcgtccccttctggatgccttctcctttcatctatatagccacgatacaatacaagttgcctggaagaaaactatcgaggcgaaataaagtcaaggcaatacttaaaatcgatgcac

SEQ ID NO: 24377 - DNA, 3027 bp, Zea Mays
gccggctccactccactccgatcgactcgcctgagattctcgcagggactagtttgtggcggaatctcaaacccaggaacctgtgaatcctcgacacttgtgaaacatgagaaggttctttttcttcgggtcccctgctgcaaacgctggtgagggagccgggcaaccggtcaatgatagcaggactggacatagaaagacagatgagggaaaggacatctccaccgcgagattgtcgagatccagaagccgtcgtcagaagcggaataaggaggaaccggctaaccccaaacaactcaggaggtccatgtccttctcatccccggccagaagcagctgtgtggaggaacgatgctttagcttctcgggtgatgttccgtgctctttgtacgatgaatctgatgcaccccaccatgccaaagatgtcgctcccgacatgtggtctccagaagggaatccgttctctagagaatatgcaataagaaccccgaaagatcattctgccatggaaaatgattctcctcgttcaaaatactgttcttgctcagcagggcactctcctgttagctctcctgtcgctatacagtgcagatcaacaagactaggcaatttattaaacaggaacgaagtactagatcgttacattgatagagggcatggagatgcaatcgtagatgagaaacagaagcagtgcgtacctacggtttctaatttgggaaggccacctcgaccccactctacagtaccatccataccgagaccattcaaagagacaacggaaagctacccagatgtggacttaaacgacgccttcctttggcgacttgctcaagagggtataggagatacccacaagattacaactatgtgcagtgcatctagacgccacataaacatgtcagatgcttctgaaagagaaagtgcaacaactgttgaagatatttatgaagatttgcaagatgtgagacttccaaatgttatctgcccctccacttgtcctaactcagcggtagaagaaactgatgacatgttgcttcaaagagttaaggaagttgagtcaaggtttactattccttgtggagatgaatatgaatttagcatgctcaggtataaatcatcaacctcaaatgacatgtttcagttgatccagcaattgactgaagataggaaacagttagcatatgaattgtcttcagagatcaaagcacgtgttacagaaagatttgctgccaaagagcaatacaaacaattaaagaaagaattggacaacagaactagaaggctggagaaggagaagagtgaagtacaaactacactggaaggagagatggatagaaggtcagatgattggtctatcaggctatcaagatttcaatctgaagaagagagactacatgaacgggtgagagaacttgcagagcagaatgtgtcatttcagagagaagttacttctcttggagcaactaaggctgaagctttaatgaaagctgcgagtttggaaacgcaaaatagcaaactaaatgacgatctagagaaactaaaaaatgagcatgagaaactgcattattcctcaacagatttgcaggctcgctttgctgagattgtagaggaaagggaccacatccgagaatatttgaaggccaaggagggagagaacaaagcattgcacaaagtaattgcaagactacaaacaacatgtaatgagcaggaaagaacaatcacaggcatgagacaaggatgcatagacgaattaggtaggaaatttgttgagtacagcaccaatgataaaacgagaaaattacaaatggaacttattagactgactggggtggagcaaaagttgagaggtgaaattcgatcttgtaatcttgaagtaaaatctctcagacaagagaacattgcactcttaaatcgtttacaaggtgctggaaatggagcaagcttctcctcgattcgacttgatcaggagcttcaagctagggtggacaacctgcaaatgcaaggcttgtcactacttgataagattagccaactttgtaccaaattgctggatctgatgaaacataagagacatgaaaatgaatatttgtgtggcaatgatgtgtcaacattcagtgattacatatttgagtaccagagcatcaaaggaggaattgaaggtctgaagctaagtttgaaagcaataaattctatactagctgaaaagcaaaatgctaaagaaaaatctggtgaaattgtagctgaaggtagtccttccaaagatcaaacgctgaaagaagaggctatgctgaatagagtactgaaggaggcagtcttgtcaaaagaagttgccattgaacaattgcaatctgatctggcatcttcacttcgcatccaagacgttatgagaaacgagatccagagggttcaggatgagctttcttgcataacccacaaagctaagcagttggagcttcaggtatccaagaaggatgagtcaatcgatgagatccaacaggatttccaggaatctgcaaaggagctggctgctcttcgtggaacactgaaaacagtgacggaggagagggacctgtcgtggcaggaggcgaagcagctgagacgaaacatcagcatcatgcaggacgaggttgtatcgctgaagaagaagatcgaagccctggacgaagacatacttgtgaaggaggggcagatcacaatattgcaggacagcatcgacaagccgttcgacatcatctgcagcccaagatcgatgagggagttcgatatggcgtgaagacggctgctgttttgtaggtgagtcggtggatgaaaaatcaagttattgtagaagaccacacatttcttggcttattacagcctgctctgctgttttgaactatgactgatgccactttttgtggctttggggattggaagcgtatgcatgaaggattttttgcatcaagggcaagatgcatggagtataatgtgttggaagttgacagtagacccaacaacacattgcattctggtcaattgtttctgtct

SEQ ID NO: 24378 - DNA, 1197 bp, Zea Mays
tacaatgtcgcagtaagtcatggtggacgaccatttgccgccctgggtctttacctcagtgagcgccacgaaagtcgagctcctgtgactcaccctttcatcaacatgagctcccattcatccaaatttggagcaaccatacccggcctttataaattgagcattccccttgctccgtatctcagttatgaacccagcgcaccactcctcgcctcagatcatccaccatagctcgcgaattccaaattttccccaaatcgaccggaacaccgccgtgaggcatcgcgccgtgtccagccgttctcagaacacgaagaagaaaccgaagtagaggaagaagtagtctcccaaactgagaaccctccaatggacaacaacttttacttcgacatctgcagtgtggaaacataacctcatgcaacacaaggcaagccccagtgcattatcccttttttccttattgttttaaaatctttatcaccttatatgatgcattaggtgatagaaattgtatgataaacagttgatgcatttccttccttggaagattggttaacattccttgtttgcatgttttatttaaacaagttttcgaatgcttagtcttgctattggaaacaaaaggttttgttttgaaaaaaggtgatgcttcacatgggatgggaatttttacaaagaaaaggctgatgatggtgaatccatcatggccatgatggattcaacatctggaaagaagtacctctatcaggtaccaaactttggggttaaatgataaagacgagatcgggcgggtcacttgcacgagaaggaagtctcaatgtagtgtgcttgtctgagtcgtttaaggaccgagctgatgtagtcctgctgatcgaggactttttaactggccatatgcctcgtcaagggtaagctttacctcggtcggaccagtactagaaaggctaccacacaacgagagtggagagatggcgagagtagagtgtaccgtccgtggcaagaggctggacaatggagtatttgtgctatcggttggcgtgaacccattctggtcttaagaaacccgggtgcgagttgacatatggaagggttaagtgctacatatgtcgtgtgctggagatctccagctaggtattaatcgattctcatcaccgttaattcttgatatgaggacttggtcactgacctacacatagc

SEQ ID NO: 24379 - DNA, 1145 bp, Zea Mays
atccaccaccacccctatccccatcaacaacgcaaaaacctaaaccgctcgctctggtccatccagatccacagtcgccatcgcccccacctctcgtcgtcgtctccgtgcaccactcggcccccactgtcggccgcgcctcccagccacctcgtgccgctctgccaccccgcccgtcctccactgcccctatggctgccatgggcgagcgctgcccgagtagccgaccgccctttccccgccgtcttcagctgccgcgcgctgccccgcctccccgccaggcctccactgcccacttctccggcggctacagcggaaggcaaggagaaggacagcgggcagcggtagctggatctagcaagcacagggcgtcttctccatccgccacctctcggcgcatcatcagctgagagtttcaggcatttgctcaggtgttttcatttcataatatagctactactattttaatgatgggtaagagattaggtggttgtactgtacaaaatattcatgtgttttactggccatcaagtttcccttaaattaatgcctaattgcatttgttggggttacgtactaatgccttgaaaggactgtgtaatattccagaatattgtgttcattttcataagtaaaatttgtttgggtgaagttgatttttcacatatatttgagatctgtttagacaagccttgatgaacttggttgtttagcatagttcggctttcacaaatcacaatgtttagaatctttttatacgcatggggcttatatgatgaagcttcactgctccactactatttgacatacaatatgtttagaatgttttttataattgagctttcacaatgtttagaatcttttattcttataatgtatgtttttatgccacgtactcatagtttttacaatcagttgcttatgatccttcagttcattaacgaacttttaggtggttgtgcttgatcggtggtgttctcatgccttctgttttgtggctgtaggatatcaagaggagggaagaggcgctgaagaatggtgcagatacacatttgtttttgcataattgctgccatagctccaccaattgtatttcatgggaaatcattaacatagccagtgatgttgtctgctggaaaaggaga

SEQ ID NO: 24380 - DNA, 2305 bp, Zea Mays
cggcagtcggcagacttgccccgtaccacttgatttcactgcagatccatacctcaacatcgatgccggaaccatgtctccgctcgagcatggcgaagtgtttgttttggacgacggcggtgaggtggacttggaccttggaaactacgaacgatttctggacatcaagctgactcgtgacaacaacataaccacggggaagatctaccagtctgttattgacaaggaacgtagaggggattacctaggaaaaactgttcaggttgtgccgcacatcacagatgaaatacaagagtggattgaacgtgtggcaatgaatccagttgatggcacagaagagccagctgatgtttgtgtcatagaacttggtggcactataggggacattgaatcaatgcctttcattgaagcattaggtcaattttcataccgtgtagggcctggaaacttctgcttggtgcatgtcagtcttgtaccagttttaaatgtggttggtgagcagaaaacaaagcccacccaacatagtgttcgcggacttagaggacttggactcatgcctgatattttggcatgccgtagtacacagccacttgaagaacatgtgaaagtgaagctcgcacaattttgtcatgttccgatatcaaatatcattaatctccgtgatgtaacgaacatttggcacatccctttgttgctcagagaccagaaggcccatgaagctattttgaaagtgttagacattcagtgtgtgggtaaagttgctcgagaaccccagttgtctgaatggactgaaagagccagcagatgtgacagattgaaatctccggttaggattgctatggttggaaagtatactggcctgtcagattcctacctatctgttatcaaggctcttttgcatgcgtcggttgctttggacaggaaacttgtggtagactgggttccttcctgtgatcttgaagattctgcagcagaagagaatcttgatgcctacgaaaaagcatgggaattgttaaagggtgcagatggtgtgttggtgccagggggttttggagacagaggagttcaagggaaaattctggctgcaaaatatgcgcgagaaaacaacattccatatcttggcatttgcttgggcatgcaaattgcagtgattgagtttgcacgttctatcatgaagttgcacggtgcaaacagcacagagttcgatccaaccacaaaaaccccatgtgttattttcatgccagaggggtcaaaaacccatatgggggcaacaatgcgccttggatcaaggaggacctttttccaggtcactaactgcaaatctgctaaactgtatgggaatgctagctacgttgatgaacggcaccgccacagatacgaggtgaatcctgatatggtcccagaatttgagaaggcagggctttctttcgttggcagggatgaaagtggtaaacgcatggagattatcgaactgccaactcataggtttttcgtcggtgcacaatttcatcctgaattcaagtcaaggcccggcaagccatctccgcttttcttaggattggtagcagcgtcatcaggtcagcttgatcacctgctccaacctggtcttatcagttcgactggcagacacacctgcagcaaaggaggagcgcaaaaattaaaggctgggcacgtcatgaagccactgaatggcctggtgaacgcacactattcagcaaccggcaatggcgccattcccatctagcagcgcagagctgcgacgcgtcgcgtgcttgtttgggatttctcttctaccgttactgcttgttctttttttttccctttccttcgagggtgttcttccgtacgttctgccaggccaactgagaagaagagaagggctgtttgctctagcgacacgggcagccgcgtttccgatgttttaacgtggaagcatttggcatggaagctgtcgcatgcatcaagaggcaaatctagcaggttagctagagtttgattagtagtggtaatccgatatatatgctggttgatttgttcgtttgtttgctaagattacaagggccggtgatgtgcagctagctggtagtgtagcctgccgtctcgcctcatttgtacattgtaaaacaactgctactctccattgactgactgaatggacgagtataaacgtattggaccaacatgctgcgtgtgtgtttagtttatcactggtagaaaagctactatcgaatgccagttttatatacaggcgaggccgatacagaagggattttcagtctaaatttgaattgcattttatttaaat

SEQ ID NO: 24381 - DNA, 708 bp, Zea Mays
tgtctgcaagccttgttggcggcggtctgaccagtgaaagggaaagaatggcagcgcaagtttttcagcccagttacaggatgccaacaatgagcatagaagaggctggcttgcgcgagatgaagatgatggagaggtggcaagagaggaccgccgagatgatgagagaagcaaactccgcgtggcacaagggcggcgacagcagcagcagctcgatgccgcaaggggagggcggggacgaggatgccgaggaggccaaggcacgagcgtgggacgactggaaggacgacaaccctcgcggcgctggcaacaagaagctcacgccctgtggctagactgcaaatcgaagcacgctcgctgtgtgatcgtacggtgtttgactcgaccagtatttagtttgtatctgacgatcagtgtatttattatataggctgcttctgtaacagtgtgtttatacaccatccactgcagcttcttcacacaggtgtttccgaagttaactgggttagacaaactgtgttgtccaagcaagagtatctaacaaatagctacgtaactacttcatccgtttctttttagttgtcgttgatagttcaaaccgtttctttttagttgtcgttggatagttcaattttgcactatccagagacaactaaaacgaaacagagggagtattaactaatttactaaaaatagataatagttaaa

SEQ ID NO: 24382 - DNA, 634 bp, Zea Mays
atccttcagttaagggtgccatgctgcatgttcttcctggtcactttgaacctgcaatgccaagttcttcaaaattcaaatgcttgcattcatgtcccatcatttgcaactttacctccacagtacagacaatttcggcaaacaagacaatgtcattacagtgcccctacttcctcgaccctaaaactgttcaagaaattttacagccttctatttaatattttgatggtttgcctcttctggtacattctccgctatctccttgggttcttccaaagtaatgtgaagactcttttccaagaggggaactaccttgggcaaggcagtacataaccattgtcaaacaagatctgcttatgatcatttgccccatgtaattccatgtgtttaattagttgttaactacttaactgaggagctgagaagaagtaatttaagcaagtgttacagtgtagccatcgtctgtatcttccctggaagccaatagtctctagtgttaatttcaatggaataaaaaaaatacgttgtgcaagttttgattaatttttttttttggttagttgtttccttgctttgctggcctgcggactttacttgtaccatctgttgagttgatcactgaagtacgaatcag

SEQ ID NO: 24383 - DNA, 1240 bp, Zea Mays
atggactcccaagtttttagcaaaatcaagcccggaccaaaccagaccgaacacctgagactcctccaactcggcccgggcccaaatgatagcaatcgtattccatggctaaagggcaccaaacttccactggacgcggacagacaaactagttcagcaccaggcgaatctgcgtgcaagtgcaaccacaccaactactcagctggggctgtgtcggctttggtttcagtcactttgccagaatcagtggactcagacttgccacttccctcagatttgccctcgctcacagtgagcttcgccagcaatccagccgtggaaccaccatcttcaccttccttgccctcgttctttgtaagcgactcagctatctcctcaaccaactccttgaacttcttgcagtttttggatttggttggaagcttcccaggcagcaatgtcaaccccaggccaccaaaattggatgcctgggctcaaacaaaaaaggcccttgaaattttattttagaacactgagattatgaagttgaaccatttggtatcagacagatacttcgggcttaacaaccgggtaaacgaggtagaggactcactttctaccgaaccaaacctgatggcaaacatctcctccttaagttcgccatcggcaaagtcagcagcgtgccaaacacacgacttgtcgctgcccgcatgctcctgcatcttcgtggaagggataccgaggtggttcgcgcagatcttaagcgttttagcctggcgcatgactaggcggaccttgccggtctgcttgtgcttgagaagcttgacagcgcccgtgccccgttccttccattggttaccgtctttgtcgaatcggtacagcttcgccttcctgcaaaacccgaatcagcactaaatcgagcgggggcggccaaccgcgcgcagcaatgaacaagtacatggggagggagggcgcctcacatgtcgagcaggacgtcctcgtcctcctcgccggtggtgacggctacctcctcaagccgcacgatgggagccacctgggcgcccgtgtcctcctcctcccccgcggcggcggcggctgaggcgtcctcctcctcctcacccgcctctggccgctccacgacaggctccttgtccgccatgaggtgggtgatcgcggcgcgattcgattcgaacttcgaagaggatgcgacggcggggcaagggaggaattctccggaagctttgggtgcaggcctggctgc

SEQ ID NO: 24384 - DNA, 7122 bp, Zea Mays
gttcgtcgcgtgtgtcgcgtcgcgttgcgttgcgccacccactaattcgaacggacgggactgggattcgaaatttcgaacacgcgccgcctgagagagagagagagagtgagagaaagagagagagagagcaggagagatggtcaggcctttgtgatctcccgcggggctggaggtgtgcggggatggatctcgcggggatgaagcggcgggagctccaggcgctctgcaagcggcacggcctccccgccgggggcaccaacgccgacctcgtcggacgtctcgacgccgtgctttcggggcccgctgttgtggaggaggaggttgccggagtgccggcgaggaaggggtgtctgaagcaaacgggcggaggtgccaccgaggccaagaaggttacttttggggcggaggtagggaaggccaggagactgaggtctcgggtcatatggtcgccggtcgttgccaagacaagggggaagtctgctcgagccggtactgattctgctgctgaagacggtatttctgcagatgtgggcgctgatgtcccagtgaggcggtccaggaggaattcgttcaatcctgccgaggctgaggaagcaggagaggctgttgctgttgacaggaagcccaagcgcaagaatcaggagaatgacgagggcgttgctgttatcgctcaggctagagttacgagaaggtcaaatttggagtggtctgctactgtattgcctcctgctgttgagaagaagagagggaggcagaatgcagctgagtctgatgtgcagaagtccgctctggtggaagtaacagctaggactacaaggtctcgctcaatcgtacctgttgtggtgccacccactgtggttgagaacaagaggaggaagactggagatccacaaacaactgtagagttgactatgctttcagatgtgcccagaagtgattttcctgccaccaggtctttaaggaacaaaattgtccacgttaacaacagcgtcgtggacgaaactcacactaccaggcagttggaaaacaagatgcgtccgtctactcgtaggcatcaacaggttgcatcttctccggaggataaaggtcaaaaaattcctgctaccagtaagtcccctctactgaggtggtcacggagaaactattctgaggccaatagtgcaaattcagtaaacatcaaattggccaaagactcgagcacagctcagccattggcacaccataattctcattctgaagatttggagaaacaaccagcagttaaagaaccaattaaacggtcaacacgtaaatctattgctttggctgcacttgagaaagagaaggatgtaattgaaggaaagaaccctgaagcacatgttaggcgatcaacgaggaaatcagttgtgcaggttaaagataccaaaagtattgttgaagagactcaatatgctaacagtgaagatgtggcgaagcaaccagcaactaaaggacctgctagggggctgagacgtaaatctgttatcacagaattgcatgagaaagagaagagtctcattgccgaaaagaacatggaaacagatgaagcgatattaacgcggaagcctgtaatcccagttaaaaatattaaagctgttggtgaaggaattcaaattggtaagggcaaagatgtggataaacaatttgttgtgaagcaacctactaggcgatcatcgcgcaaatctgtgctgcctgatatgcttgagaataatagtggacttctagcacccaaaatgaatgctgagatgaatgttaggagatcaacacggaagtctgttcttcctgacatgcataatgagaagcaagatcaccataaaatggctagaaatgagaacttgcaaagtggtaaatatcaagatggtgagaagcaacagaaagtaaaagattctattaggcaatcaaggagatctatcgctacagtgctacttgagggacaaaataatgatgaaggaaaaaagttcaaaaatcctacgaggaggacaacacacaaatctcatgcccttaatgcagttgaagaggtcagcatggatcacattgaagttggtgaagaaggcttgaaattgaggaagcgcagtaggtttttgctggaaatatcatcttcagctaatgtttcctggaagcatcagaatgcacagatctctaatgaaaaagataacacagaaggatcgcagcaggcatcaaattgcacaacttcaaagagaaggtcttcaaagaagagacgaacaactgctccagaagaagtgatgcctttcaaggtggcaaatgatgacatagttatcatggaagaaacaaaggacacacttgaatataataatgagtctagtagtaaagttcaagaaatttgtcaggttaatgctgcaagagaagagttctcttcaggtccattgcttgtaacagtagctcctagtgacgaaatttgcacagtgcagagtgtagctgtggtgatacctgggtcagaatctggtgacgatgcaaatcaaagttctgataagagtaagcaacctcaggaacattctgtcactcaaactgttgatgaccatttatctgaaacaagaagtgggaaattagatcaatcaacatgcatcacaggattagtctctgacaattgtgttgtctcagaggacaaaacattgatgagtgaagaccgtgaagagcaaagccctgtgtccggagaacagagagttagcttggaagcaaatgccaatgagcctgaggaaaagaacctagctaacgtcacatcaactgatctccacaccaaaagtctgcagcatgatattgacagaatagctaaagagactgataaagagcatgaagaaaaatatggagtgagccctatagctgttgaaaagtgcgtctgtcgtgaagcaagtgcatgtgaatctgcacgaaaacccctaaccgttatcttttctaacaatctccacaccaaacatctgcaacatgattgtgatgtgctaattaaggagactggtgaagaagttttagctcaggagaattgtaatgaccagcctgttcctgcccagactgaccaagaaattaagttaaacgatgaacttgctgatccggatgttttagctcaggagaattgtaatgaccagcccgttcctgcccagactgacctagaaattaagttacacgatgaacttgctgatccggaccatgaagagcaaagccctgtatccggagaacggagagttagcttggaagcaaatgccaacgagcctgaggaaaagaacctagctaacgtcatatcaattgatctccacaccaaaagtctgcagcatgataatggcagaatagctgaagagactgataaagagcatgaagaaaaatatgcagtgagccctatagctgttgaaaagagcgtcagtcgggaagccagtgcatgtgaatctgcaggaaaacccctaactgtcatcttttctaacgatctccacaccaaacatctgcaacatgattgtgatgtgctaattaaggagactggtgaagatgttttagctcaggagaattgtaatgaccagcctgttccggcccagactgacctagaaatgaagttaaacgatgaacttgctgatccggaagttttagctcaggagaattgtaatgaccagcctgttcttgctcagactgacctagaaactaagttaaacgatgaacttgctgatctggctatggaatcaggttgtagcattactgaaaggaatgaagggcttgttgctcataatcttgatcaagaaggtttccttgaagcaacaccagagtgcaaacaggaatgtggtttgcctgaggagacagtaatttcctcaaaagaaacaggatctctgctgtgtgcagatcaatcaccaattggtctggaatctttattttcgcaagaaagcatagttgaatcagtggggcattgtgcacttgcttcagcaacaactcataccgaaaatggctttgatgattcaaaagattgccataacaagtctgcacttgaaaatgttcatgtgccagaaccttgttcacacaatgatactaaaggaggcatttttaaaaatgttgattgtatgcatacatcccagcgagatgatagaatggaaggagtaccagaggctaacactgatgaagaacatgttctgtcagcctttttgctggatgcaaatcacctaaacgtagtcattaattctgaagaagtggtttgtgagggtgaagatagtaaggagcttctccattcggaagactgtaaagcttcatccgagaaaacagatgtgaatgatggcaatgtatatggtattagtgatgctgtagtgagatgtgcactgcatgctccagccgatgataattatgagatttttttgggtcccaatactgatgtaccacgtcaggtttataatgacggatgcagtgatgtcaaagaagatcgatttgcttccaaaccctggacaattgatattattgaggatgcctctgtcaaagaaagatcaaatttaaaagattggcaacttgattccaagttggagggcacagaaatagtggaatctggcctttacttcaataaggatattggtaacattttacatagtggatctattggtgaaataactccatctggttctggtttatcaaaagattcatctgtggactatagaggggaggttttagatggcttctcaatggaagcatctcttgaaaggtcttctacacgtggggaacaaaatggttgtagactagatgctattgagaatccttcaattactttagcaacttctggttataagcatgaaggtgctttatctgaggaagcagtgtacacaaagaagaattacgctggaacatgcttgtcaaatcccagggaattaatcatggagctgcaatcccatttctcaaaggaaaacataaatgaatctgatcctcatgacagccttgtattcccaactgctgaaaattcagcagatgaacagctggttaaagtacaccatggttctaatctgtctcagttaggattaactgatctgttggatggaccaattgggtgttccaataccgacgtgttgtgccagtgtgacaatcataaaaatcaatccaatgaggacaaggtagaggaagttgaggcggtgtctgctgctaaatacatagaaagtgaagttgtgctgctcccatctcaagagagatcaaatttgaataatgagcagcttaacaccaagttggaaagcccaaacattatgggatcttgccttaactgtgataacgatgtttgtaatacttcggacaatggatctgtttttgtcattggtaaaagaactccatctgcttctggcttaccagaagattatcctaaggatagtgacttgcaacaaccggttttagatagcttctcagtggtttcatcttttcaagacaatatatctgggaagaaaactgtttctggtgtagcaggcagtgagattctttctttaagtttagcaactcctgattataaacatgaagatggtttctctgaggaagcagtatgcagaacaaagaattatactggaacttcctcggtagatccgaggcatttagacatggaggggcactctatttactctgagggaggtactgaaaaatctaatctgcaagataatcttgcatttctaagcgctgagagtggaaaagatgaacctattatttgccatgttgagaaactggttgacgcacatgcttcttcagatacataccaaggtccttgtcaagatctaggcagacatgaagaacaagagagctgcatgtctattcctatgcaagccaaagaaagtggaggggttttgaggtctagccacacgaaagggtcagttacagcagcccaaattgatttggcaggtgatgcccatcttattgtgagtgataatgctgctgccaagcaagtgtttagtgaggagaaagaggaaacaaaatctatctcttcttcagatattgatatccttcatgaaaaatcatactccagtggacacgatgaccatgctgcttgtgctgccgaaactcagttctaccatccacagaaagcatctatatctgatggactacatttgggtcctagttctttgcaagtagaatcactggatgctttggatagcgatatactgtatgttaacacaggagttctcgagcagcatcataaagagggttactatgaacccagtgtctaccaaatcacttcaggcatttgcacaatgtctgaagctgaaccattcgaagttttagaaactggaaaagatgtaaaaacgccatctaagctagatgagcaacttaatcctgggttggacggagatgaagctgagaaacacagcttagactgtggtacagacaccagtcctgtgatgagcaagagaaccctttcttcaccaggatcaggaccatgccagcagtatgtaaatgaaagcaccaccagtacacagtcgactgataatcacccaaacgacctacccgctccgagatctcctgaacaatccgcgtgttttcagaatgacaacgattcgggttcagtaggcatttgtcaaagcagcaggcgaagaggtatagatgaactttgcggtaagctgcagagtttcaaagtttccagcgccgtaaaaggaagctacgtagctatgggtgcacctcgtccgaagcctggggacagcacgagccgatctgcagccgcgctgctcaggaacatagagaacacaactgctgttaaagctggccgtcctcctgtcaagccaaacgccgatggtaaggactcgtctaggcgagccctgcagcccataagcggaaggcctgacagtaggtagttcggcggttccttaataagtgtgtcgtgtttgtgttcaaccctttgttgaaagccaggtccgtgtatttgtgcagcttgttgtcatgaagctgctgtgtgcgtgtcatttaacataagcgtgcgtgaagttgtgttatggaagtggctaaatatgtgttcgttaggaggtcaattggcttgaactgaccctgctgttccgtgatttctgtctaaatatacttgtgtggctgtgtcactttgattggccttatcgatcacatgcaatgggatcacatctagcgtgctctagggtcctcgtttggtaatcgctg

SEQ ID NO: 24385 - DNA, 1438 bp, Zea Mays
ttaacccctgcaggcatgtggcctgtgctatctaccgttacacggcgagctacagagttgtcgccacaacattgtagtgtccgcagaggatggtgccgacatggcaagataaaatcctggtccagcaagatccgttcttccaaatgggatcaggtgattggctccagctcctcctcccctcagcaccaccagtccccctctgctcctcctttcagtctcagcccaatgacaaagttctaagcagagtagtgcacgggcagcacggcaacggcatagcacctccctccaccgatcatccagttccgcttgcgtaacgacttcccttcgcaagcaagcttcccgttcagcccacccgcaggccgccgtgctcgcgcgaccatggcgttgctctccgccacttcgcccgccaaggcgcacctctcggcgctcctctcctgccacgacgagccgcagcagcaccaacacgcgctcccggtcccgcacccgcgctgcttcggcggcggcaaggccaggcggcgcgcgcggggcaggtgcgcggcgtcaatgcggccgcccgacgcgtccgtcgctcccgcgtccgcgcccgcgggcgaggcgcggcggaagaagaagccccgggtgctggtggccggcggcggcatcggcgggctggtgttcgcgctggcggcgcggcgcaaggggtacgacgtgacggtgttcgagcgcgacatgagcgcggtgcgcggggagggccagtaccgcgggcccatccagatccagagcaacgcgctggccgcgctggaggccatcgacatgtccgtcgccgaggaggtcatgcgcgtcgggtgcgtcaccggcgaccgcatcaacggcctcgtcgacggcatgtccggctcctggtacatcaagtttgatacgtttactcctgcagctgagcgggggctcccggtcacaagggtcattagccgcatgacgctgcaacagatccttgctcgagcagttggcgatgacgctatattgaatggaagccatgtagtcgattttacagatgatggcagtaaggttactgccatattggaggacggtaggatatttgaaggtgaccttttggttggtgccgatggaatatggtcaaaggtgaggaagacactattcgggcactcagatgccacctattcaggttacacctgctacactggaattgcagattttgtgccgcctgatatcgatacggttgggtaccgggtatttctgggccacaaacagtacttcgtctcttcggatgtcggtgccggtaaaatgcaatggtatgcttttcacaaggaagaggctggtggcactgaccctgagaacggtgagtgcttagagaagttttcaagcttaactagtgaaataggcactgcctcattgtaagttgtgatgaaaaatgagaacaaaacttctcaccccacaagttcac

SEQ ID NO: 24386 - DNA, 2638 bp, Zea Mays
aaagcaacaaatctcacaccgtcacacgatcacgtccttgcccctctgagtccttgtccatgtccgttgccaacaattcaccctcatgacctctatggccccacacgtacgaccactagtagtactaggcgtacggagtacctctatttcacgatggcatccatccacaattgcagtaatccctctctccgtccctcccaatgttactccatctctctatttttaaagccggttccactcctcctccctcgctcactctcagtttccgctgtcaccccctctccctctgttcgccactttataccgcccgcccaccactccccgtttctctctgcttcatccttcgctttcccctgcgccaggcccgccccgccccgcccctccagaacgacatcctgcttccccgccccctccgatggggaacccgccggagctgtaccacaagatcctcaacatccccaaggacacctcgccgcacgaaatccgcgccgcgtacaagaacctcgtcaagaagtggcaccccgacaagcacccgccgtcgtccaggccggaggccgaggcgcgcttcaaggccatcagcgaggcctacgaggcgctcctggaccagcaggagaacaggggcgtgttcgagctgtgcaacgacggccgggcgggtgagaggacgcgcggcgccttcggcggcgccggcggcggcggtggcggaggcctcggcgccggcgtcggggcgcgcatggagaggacgcgcagcgacgggttctgcacgaggagcgcgcccggcacaccggcgagggagttcaagaaggtgtacagctccggcgaccccggcgggcgccgcgccttcgccgagttctccagctccatcgtgcgcaaggcgccgccgctggagcgcaagctcgagtgcaccctcgaggagctctgccgcggctgcaagaaggaggtcagcttcacccgcgacgtcgtcaccaagaacgggtatctgctcatctgcgctgttttgctctgcctaactgaacaaggttgacgcgaaaccttgctagaaatgaagaaatccggtgagctatcgcttgtcggtagattattattatttttgtttccaagacaacgaacggagcggagaattttaatcgaggaagggctttgtgtgccgacgtgggttcagattttaacagtgaatcaatcgatgcttggaaaactaaactcgaggttaggcaagaattcagaaccggctctgatggcgacagacattccactcggtgtagtggttgtggcacccccccccccccccccaattcgccgcactgttcggtagctcctgatgaacagtgcaccatcacaatcagtttctgttttttttcttcttcttttcaacaacaaggtcatggcgcgagcacttgtgttgtgtttttacagtggggggggaggggggggggggggggtcgggtcactgcttttgtaccaccaccttgcatttgccagtggaatatttagctacctttgcaacgtcatagtaggccgtagacgtgaagcctttttacaccagtgggctttggtgcgagactccttttcccccccctgcaggtatctatgctattcttgcaagattatcctacctaacacaaggtcacgataacaatgtttcccaacgtggttagtatagtacagctagcttgggatcctatctccactacataatcctaacacaaggcccaagatgcttctttcgccacatatgcgttttagtacacgcgttttggatgtattcatatttgtttccttttttttacacgtgagggtgacagtgactcctgagcaagagcatccctcccttcctccttgttcctatggagggagactaatcgcaactagcctaatggctcgaagtacgtgctttttgtttgtgcaggtcaaccgtgaagaaggaggtgacacagacggtggtggtgaagccagggtggaggaaagggaagcaggtggtgctggaaggcatgggggacgagcggccggggtgcctgcccggcgacgccatcctcacggtgtccgagaagaggcacccggcgttcaagcgggtgggcgacgacctggtgctcaaggcggaggtgccgctggtgggcgcgctcaccggctggtccttctcgttccgcctcctcggcggcaggaaggtgagctgctcgttccaggacgaggtcgtccgccccggctacgagaaggtgatcgccggcgagggcatgccggtccccgggcagaagggcgcgcgcggcgacctgagggtcaagttggacgtcgtcttccccaaggagctcacccccgagcagcgcgccggcctcgccgagatcctcagagggtcctgctgatccatcggccccagttccaagcgtatcaagttttcttggccgtgtccgtgtgttaaattttaatatgtatactcatagcgcgtgtgatgagtatataagtacataaagagagaggggagggggcgtcgttgtacatacaggtcgtttatatattatatatgtaaggataaaaagaaatatgaaacgtgagccaaagccaagccttgtgtagctgtatcgcggcatgagctcgtggcatgagctggacgtgtttgttctgatggcaaatcagatcttctcgccccgcg

SEQ ID NO: 24387 - DNA, 2871 bp, Zea Mays
cgagcgaccctctgcgctcgcgcgaatcccgcccgagatcgccgccgatccgaagcaacggcaccgtgcccctccccctcgcgagatccgcgaccgccccatcccggcgccgcgggatccacgcctccgccctcgcccttccccacccccacccgctaatctcgcggtcgatccgcgcccggtcctgaccccgcctccgtcctcagcaccgccactccgtcccccatcttcggcgccgccgtctcccgctcccctggcacgcattcggggtccttgcgggcgacaagcacctccgtcccggaggcatctgccgctgcagcatagaccaccatgtcctcgctcggcagcaccgatgttgacgatggcaacgaggaggaggacggctccgcgagcacccccgagatctactgctgccactcccacgcagttcttgctcacgagatctgtgtgcaggttgatgtcctcgtggtgccacgccgacctcgccgccaccaagcgcgccacccatgtcctcaccgacctcgccaaaattctttcctccgcgcctcgggcggccgcggcacaggcgccgccgcgcccgctcgccgcgaagcacaaggacgagccggaccccgacgacggcaggcagagggtcactgtcttcttcggcacgcaaaccggcaccgctgagggctttgccaagtgcatgactcgtgcccgcgccaggactcgttgccaatattgcactcttagtgcaaagaatagctgagcttgttacagataatatgggtggacctgtcaaagatgctaacgacatgctcacaaggtggctggagaagagtactgagctgagaacatcgctacaaacaagtttgttgcctattggttgcatcaagatagggttatcacatcaccgtgccctacttttcaagatccttgcctatagtgttgggattccatgcaaacttgtcaaagggagcaattatactggtggtgatgacgacgatgctataaacataattaagatggacaatgaaagggagtttttggttgatctgatggctgctcctggtgctcttattccagcagatatcttaagttggaaaggcaattcgttaaattctaatcgaaaactcggcctgaatcgaacagctggatcatcaagtactgttgatgctaatgtggatcctactgtattgccacttgaacctaaaggtggccaactgcctttgttcagcagtggtgattggatgtcagacattgattctggatatgaggcagcagaaattgcagcttctactcaaacctcttcgggtgtcacaccatatctgtgttctgctggaagtgtttttggcagttcatggatgctggttaatcatgaccaatcagatggaccatcaacttctgctggtacatcatcgcagcagaaagttgtacctcaaagcgagcatcagcggaatttaaaccgccttccagatctgcaggaaattccagagtcaaaaaacctttttgctgaccttgttccttctggggataataagtccaagaaaacttcagtaccattcaaaggaccagatcataggaacaatgagttgcaaaagcgcagagagaacattgtccctaatgctggaagaccacatcagcggttagttatgaagaattggtctccttacaatgatgtttccaacaacaaacagtacaattatgtcgaggattcgtttgctcgtagaaatgttggtaataatgctgcaccatcatcatcccagatgccacgaccagccgcaagatctaaccttaattctagattgcataatgatgcatcatatcataattatgatagcattatggctggtacctctgccatgaacattacatctacagctgagaccgggaaggttcctgaaagggttatgcgtggtgatttggacaaaggccaaacaaattatagattggaggatcaacatgtcatagttcaaccaccacagggaagacttccatggggtattcctgcagaaggaagcgttccaatgaatagagttcagagtcaagcaaaacaacacttggaaaacatggatgcaaagcaagaccataagaaattgctccctgatccaaaaaaatctccccttgacaaattcatggacacatcattgccttcaagaaacatggacatgaggtcacagaggcttgacttcgatgatgtctctgagtgcgaaattccttgggaagatcttgtgattggtgaaaggattggcttaggttcatatggagagatttactgtgctgactggaatggaaccgaagtagctgtaaaaaaattcttggatcaagatttttatggcgatgctctggatgagtttaggagtgaagcggcgaccagaatatgcatcaggcgggaggaatggggcggtcgctggagctgctgctgatccagtttttgatgccggataacgacacacgtcggcaggcggaggagcagatccgacggctggcccgtgacccgcaggtggtccctgcgctcgtccaccatctccgtacggccaagacccccaacgtccgccagctcgccgcggtgctactccgcaagaagatcacctcccactggcccaagcttccccctgactccaaggcatcacttaaacaagcccttatcgattcaatcacactcgaccacaggttctttgctaaatacctatcaccaatccttctacgcatgtctgccttagaatctgcacgctttcaattcactcaaattgtgcatttggccatttgcctaaggaacactttgagtgtattctcaacttattagtttgtgctgatcagaattgaactgagaggtccagctttagtgaaccttcctgtttgcgccccaaacaacatagaattttgatgctc

SEQ ID NO: 24388 - DNA, 1546 bp, Zea Mays
cgaggagtgctgcacttggaggatgtgggccctggcgagctggagccgaagctgatggagaagcactaccaaacactgatatgctgaacttgtcatggcacatcttgttgaagaaattaatgattctgactatttttcagatggcgttccaaaggaaatgatgcgtgttgatgatgtactagtcaggatagcaaacatatcccttattgaggagaagatggctgccacaggaccaggaaaaattacaaacatttttcctaattacttgctctatgagttccaaggcttatctggtggaagaatatggaaagcggagcatgatctactgttactgagaggcatactgaagcatggatatgcaaggtggcagtatatatcagatgacagagagaatgggctttttgaggctgcacgacgagagcttcatctcccttcggttaatgaaataattggtgctcagttgaacgaggcaaatgggaatttggaaggtgcacaggaaggccaagcgaacacaacaagcatgtcgcattacaaggagatccagagaaagatagttgagttcttgagaaagagatatcatcttatggagagagccttgaatatggaatatgctgtgataaagaaaaaaattcctgttcctgatgatattactgaacaaggtgttccagcaggacatgctccttttattccagatatcagtgaactgttgcgggaattgcccaatcttgagccaatttctaccaatgaattggtttctgagggcacagctggtcagttacaagttccccatctctacaataagatgtgtggagtgcttgaagagagtggtgcttatgcgctcagttccttctttggagacaagtccgcatcttctagtttggccaatagccttcgacagtttgaaactgtgtgcgagaatgtcgtcgaggccttgcgaccacaccaaaatggtactggcagtgccatcaaagaggaattggtagatgcagccaccaaagcagcagcagcagcagctcctcaacaagattcaggccatgatgcaccgcatgggcagtcttcgacagccaaggcggacatggaaatcgatggttgatttgtaggttccagagtggtaagaaagggaatccccctctaatcattatgtatactgtggtcagaatgtgcgctatatattgtaacatcaaagaaagcacctccaggcctgagggtgttactgctaatgcgtttggtttacttgttgtccttgtaatatgcatacacatttagaactcatgcagccattttgtgtgctcgaaccggtggatcgctgccctgttgtcttgtactgtgtttagggcctgtttggatacgaatggttaattataagacggggctaaagataagtacggataagtacggattagctatagttggctagcttgttggttaacaattagctaaactttggctagctagatggtaaacaattagttaaaagtttagcaaaagaattagttcacctattaactcagtttgttgcctcctttttattatgccaactaatttg

SEQ ID NO: 24389 - DNA, 2345 bp, Zea Mays
aacgaacgtgccgggtgggaagtgggaactgcgagcggaagcgcggacgtgtgatccgtcttctgagtcctgactgctgtctggcgtccctaagggtagagagaagttatagcctttcctccccgattcaccccccgcgtgttctcgacgaccgggcgactgccgccaccactctacgccaggtgttcgtcggcgatccgtaccaatcaggactgcaggagtcaggacaacaattatggataccgtgatctacaaacatgatgacatttcccaagaaggaaccctgccatttggagagacaatgaacatgggaggaagcaatgtagaaattctcacaagaatagagctcgatattgcatttgcctccgagaaattattaaatttggagatgctggtgatggaaattgctcgtcaggctactgactttgagccttctacgcttgaagatgagtccatttcttctgagatcgcagagaatgctttggaattggacatcttgtatggtattcttgatgcagaagtcaaggagctacataacttgattagttctctccaagctgatattaaaagtatagagcatgaggtttatgaagaagagtctggaggcaaggtaaaaactagaatggatgcagctaaattgtccttgaagcagatgcaagagctaattgctgatattcagaatgaatctgcaaagtttgagaaagtcgttgagttttcccaggataaggaagggaccattgaagctgttggatgtgataatgaccatctgtcatatcaaactggtgcgcagacagaagatcaacacagaaatgttttacatatgttagaacaatccatagcaagtgagatagatcttgaaaagaaactctctgattccatatctgtcatagaagacctcaggctgaagctccatcatcaggaagaggaaatctatttccttgaggaatcaactgaaacagtttcagcccagagaaggtggaaaaaggaagtaacaaagctggagctggatcaccatcattgcaggataaaatacaagagttagaaaaacagttgaatgaatccaatttgcaactgcaattagcactggcttcagcagaaacaaagcaggaggagcaaaatgcattgcaatctgagctgaacacattggaaaacacaattaagaatatcaaagatgatgtctcacgagcagaaagcagagcgcaaaatgcagaaataaggtgtatggagctaactgtagctaatatagagcttaatggggaactaaatgcccttaaaagcgagaagtcagataaggccagtcttttggagaagaagcttacagagtcaaatacccaattagagcatgcaaaggcagcggttgatgccattgttgaacagcaaggtatgctgaaatgtacgatgtctgatatggaacatattattgaagatctgaagggtaaagtttcaaaaactgaaaccagagctgagtgtgctgagtcaaaatgcacactgttaacagacacaaatttagaacttagtgaagagctagcatttctaagaggtcgagtagaaagtctagagaactcgttacgtgaagccaaccatgcgaaggtgtccactgccaaggacattggtgtgaaaactaaaattattactgatttggtcagaaaattggcactggaaagagaacggcttcatctccagattgctacgttgacaaagaagaacaagatgttggttaaaaaacgtgcagagggtattaatggtagcataaaaatgagcaaaaagggtacttccaatcatactgaattccagtcaactcaaaaggctgaggaaatatgtccagattctttgccatcacaaactgtggtggagaaaccatcagatccaattgacaatgatgaatctaagaatcagagtgctgatgtttccacttcagaggatgattccatacgggaggacattcatgagacagtgtgcaccatagagccatcgctgctaaaccggaaatatatttttatggcatttctagtgttgttggctgctgccgttgtattcttgttacatgaagacggcagcccagcatgatagtatgattttgctgatgcagtctacaactctacactgtcacctaaacatctaggtcgtttactcccacttctttgtctgtcagttggggagcaattttgtgtattgtattgtagatttgtgctagactgctcgtgccttcaacttggacccacccggcatttccattgttgctttgcggaggaaataatgttagataacgaaaatgttttgtaactgtgtttacttgtcagagtgaaagaatatgcagcagtctttttttcttgtggaatatttac

SEQ ID NO: 24390 - DNA, 4313 bp, Zea Mays
gccctcattcctgtctacagaagtacagctaacaaaacaaaatacaggtgttggtggcgctgacgggaatgcctccatatggccggtgactgctgcgccatgcttcgatgggtcgctattagctgtggttacggtctctgaatacctcgcgctgcgacgagatttcagcggcggcggcgtctaccagtccatgtccatccagcagggttcagtctgtgtgagcaaggacgcttcactttcagtgctctctgtctgtaagttgtcacaacctactcgcatatccatgcgcgtcggcgttgcacgcatacagccatacaggggaaaaaagaggagaggagaaatcggcccagttgcacgcagcgaaggtagccgaagaaaaaaaaaattctcccgttcacctcgcctgcgggacaactggggcaacagccgccggccggtgccccctcccccctacgcccagctgcccagatccgagccctttgcccggcgattacaccaggcctgcccagctgacctcacctggacaatcaagctgaagagaaatatcatagtgtgcatggtttttcaggaatgaagcgttttgtctacataaatgatgagtcttatcagaacgactactgtgataaccgggtttctaatacaaagtataccttattgaacttcgtgccaaaaaacctatgggaacagttcaggcgcttcatgaatcaatatttcttgttgatagcttgtctgcaactatggtcacttatcactcctgtaaatcctgcaagtacctggggcccacttatatttatctttgctgtttctgcaaccaaagaggcatgggatgactacaacaggtatatttcagataaacaagcgaatgataaggaagtgtggattgttaagaatggtgcccggaaacacattcaagctcaagatatccgtgtcggtaacatagtttggattcgagagaatgaagaagtaccatgtgatcttgttttgttgggaacttctgaaccacaaggcatctgtcatgttgagctgctcttgatggggaaattgatttgaagacaagagcaagcccaccaccatgcgtagggctggagtttgaacagctgcacaaaataaagggtgtgatcgagtgcccaataccagataaagacatacgaagatttgatgcaaacatccgcctgtttcctccattcattgataatgacatttgcccattgactattaataacacattgctgcagtcatgctacttgagaaatacagaatgggcttgtggtgtagcagtttatacaggcaatgaaactaagttgggaatgagtaggggtgtcccagaacccaagctaactgctatggatgcaatgattgataagcttactggtgccatattcttatttcaacttacagtcgttgtcgttcttggggctgcaggcaatatttggaaggatatggaagctcgcaagcaatggtatgttaagtatgatgacaatgaaccatggtatcagattctggttatacctctgcggtttgaactattgtgctctattatgattcccatttcgataaaggtttctttggactttgttaaaagtctctatgcaaagttcatagattgggatgatgatatttatgacctggaaaatgacacacctgcccgtgcagcaaacacagcaattagtgaggacttgggacaggttgaatatattttgacagataaaactgggacattgactgagaacaagatgatcttcagaaggtgctgtattgggggtaccttttatgggaatgaatctggagatgcgctcagagacgttgaattactgaacgctgtcgccaataattctcctaatgtcatcaagtttttgacagtcatgacactctgcaatacagtaattcctataaaaagtcctactggaccaattttgtataaagcccagtcccaggatgaggatgccctggttaatgcagctgcaaatttgcatatggttcttgtcagcaagaatggaagcaatgcagaaattcacttcaaccggcgagtgatgcaatatgagatacttgacattcttgagttcacatctgaccggaaaagaatgtctattgttattttggattgtcagagtggcaagttttttctcttgtccaaaggagctgatgaggcaatgcttccttgtgcttattctggacaaaagacaaagacatttgttgatgcagttgacaaatatgctcagctggggttgcgcacactctgcttgggatggcgtgagctggaaccagaggaatacactaaatggtctcaatcatttaaggaggccaatagctcattgaatgacagggagtggaaagttgctgaggtttgccaaaagctagaacatagcttggagattctaggtgtcagtgcaatagaagatcgcctccaggatggggtaccagaaactatcgaaatactgaggcagtcaggaatcaacttctggatgttaactggtgataaacaaagtactgccattcaaattgctcttttgtgcaacttgatttcttcagaacctaaaggacagctcttgcatatcaatgggaaaactcaagatgaagttgctagaagcttggaaagagttcttcttaccatgaggattacgtcatcagagcctaaggagctggcttttgtagtggatggctgggcactagagattattctatcacgctatactgaagcttttactgaactagcagttctttcaaaaactgcattatgctgccgtgttacaccttcacaaaaagcacagctagtgaagcttctgaagtcatgtgactatcgaactttggcaatcggtgatggtgggaatgatgtaaggatgatacaacaggctgacattggtgtaggaattagtggtagggaaggtcttcaagctgcaagggctgctgactatagcattggcaaattcaggttcctgaaaaggttgattcttgttcatgggcggtactcctacaatcgcactgccttcctgtcgcagtactctttctacaagtcattgttaatttgctttattcagatacttttttcttttctttcaggcattgctggaacaagcttattcaactcagttagtttgatggcttataatgttttctacacaagcattcctgttttaactactgtactggacaaggatttatctgaaaagacagtgatgcaaaatccagagatattactttactgccaagctggaaggcttctcaatccaagtacctttgctggttggtttggtcgatcattgtatcatgcaatcattattttcttaataaccatccatgcatatgctaatgagaaaagcgagatggaggagctctcaatggttgcactctcaggaagcatttggttgcaggcatttgttgtgacgttggagatgaattccttcacatctgtgcaacttctggccatatggggaaacctcattgccttctatgtcctcaatttctttatcagcagtatacccacttctggaatgtacactatcatgttcggcctttgcagacaaccgtcatactggataacgctggtgttgatcagtggagttggaatgggtcctgtattggctctgaaatatttcagatatacatacagacctagcgtgatcaacattcttcagaaggccgagcgttcacgggggccaatgtacaccctgctgaatctagagtctcagttgagatcagacaaagatagtatgatggtagccggttccacagcgccagccaagaataagagctctgtttacgagccgttgctttctgactccccgatggcatccaggagatctcttgcaccagcatcttcatttgatatcttccagccagcacattctagaacatctcacccaagaaacataaaagccaattaattttttggaacaacagttaactcgtaacagtatggcataccagaatgacaaaaaaaaaagatgtcagtcgaattagatatgttgcatatttctgttaatgatttagtagatattgcccaaaaagatataacgaaaagtcatacttaatcctttatagctgttagcaaaaatgggtagtgaccatttatgttctctatggggaataaattaatttctccaatccaccagatgcaaaaaaataaacttatgtcccagtcataccaaaaagacttgcgttgtctccggacccatccaattttaaattgcgatgtgctgtcgggcccaaattatgtgttgctgctgcgttttccctttcgctttccccagtttcactcactttttgcccatcatgtggttgtcatgcaaattggaatgtttgcactaatatctcag

SEQ ID NO: 24391 - DNA, 1472 bp, Zea Mays
cacccgccgctctagtcccactccccgccgccgccgccacttgctcgcctttgccccttctgtctcccttcgtccgtagcagaccaggaacgcccaaggcgctagcgtctccaagatggtgctgcaaaacgacattgacttactcaatccaccggcagagcttgagaagctaaagcacaagaagaagcggctagtccagtcccccaactccttcttcatggtattcctcttcatgcccttttctaattctgcgtggcgaggtgttgcaaatcgtgccgaaaagagacccaacgaatgtaccatttgaatttagtttttttgaaaaatgttgatttggtttggaagagagtattagaaactggattcagtatcaaaaactacataaaaaatagttgcaacaaagcacgttgagctagattctgcagggtatgtataattcatcaaccaagttgtgttcaagtagagctaaaatctgaaaacataaatgaattttgatattgtgtttattaacttgtattaatattaatatctgctcttatgcctgtttggagactgactctaatcatctacttttttcgtttttcttctccctttgtgtccaggatgtcaagtgccagggctgtttcagcataaccactgtgttcagccactcccagactgtggttgtgtgcccaggctgccaaactgttctgtgccaacctaccggtgggaaggccaggctcaccgaggggtgctccttccgtcgcaagggcgattaggtcctgcttctcttaacgtgagaagagataaatttggtgttttgcaactttctcaggatatgtactcggtgaggattttgttaattattatggctgttagcgtggcctgacaatgcttgtgtaaacctgcactttgtttgagcgtagtgacagctaatatggtgctgtttggcttttgctgagggagtggcaatgcaaatgaaatcaactggtggcgttatttgtcagggtttaactgaaagtgccatttgtttggttagcttggataatgctctttccatttaggtgatgtttggtttaaggatgtaaatggtcggtaaaattcggtaaatttctggtaccgtttaccagatttttccgaccgttttcagatttttcgggatatacggaaaacgggacggaaacaggatgtgttattacgaaaacggtacggtaaatggtgagacatatttaccgtccgttttcggaagttttgggaaaatccggtattttcccgtattttaaccgtattttcccggtcaaaagaaaacaagagaggcaagaactatacccgttagggtttagagattagggttttagatgtcatagaagatatatcaagtgatccagacgacatgccacatgatttttagtttatgtatcgtgtgtttaagacttatatactatgtggataaaactttagtgaacatgtatgattatttatgtgtggtcatg

SEQ ID NO: 24392 - DNA, 491 bp, Zea Mays
agcacctccaggagagatctcaaggttgctgtcatctatgcggtcctgttttgttttctcatggtgtcctgctatgccgccctttacttgaaatggttcagactttcagccatgtttgtaaccttcgggatcctccttccagtgagtctcaaaatctctaggcatagaaggctgaagaggaaaagagaaaggagactgttgttgccactgtccatgtgaatacattttttttgatacaccctgtaacattctagtggagttggccagctacagaagatagggaaatcctcggcagacgaactcaactttacggccccagcctacgctttggaaaatgttgtatgcatcacctgttgtgcttctgtcctccacatgtgtacacacacacatacgtgccgaacactttgcgttgttttgccccccgcccctgtgtttgcatcaaacttcgtccgttgaaagttgatgcatgttgctggagtttctgacggcaa

SEQ ID NO: 24393 - DNA, 1162 bp, Zea Mays
gagctgccatgaggcccgaacagttgaagctactagcgtgtagctagggaagagaagcgcgcgagtagctagcagacgtacgtaggcagaagcctagctgggtttgaagggccccgatcgatgatcccctacgcgactgcggcggaggcggagggagcactggggcgcaccatgacgtgggctgagacagcatgcatcgccccgctgcccctgctactcctagagcagttcgctccgtccgtcgtgctgccgtacaagctgcagccccgggtacggctgcccccggcagcctccctcagctgctacatggacgcggcctgcatctttccgctcgccgttggccttcagttcgtctcctatcctgcggtcgccaagatactaaggacccgaatgggactgccgttgccgtcggtgagggagaccatcgcgcagctagtcgtatactctctagtggaggattacctcagctactggatgcaccgtctgctgcacacccagtggtgctacgagaagatccaccgcgtccaccacgagttcacggctcctacaggcttcgccatgtcgtacagccactgggccgagaacgtcgtcctttctatcccggccttggccggcccagtgctcgtgccatgccatgtcaccacgcagtggctatggttctccatccgcctaattgagggcattaacacgcacagcggttaccatttcccgttcagcccttgcaggctgattccattctacggaggggctgcataccatgactaccatcactatgcaggaggccgtagccaaagcaactttgcacccctgttcacctactgtgattatttatataggacagacaaaggctacagataccacaagctaaagcaagagaagctgaagagtctagcagaaaatagtgcggataaaggaggcaactactcattcgacgaagggaaaaagaacagatatttttgtgcctgagcgtacgaagaataatcaaggctattacttcgtcctgttcgaagggaagatttgcaaataaataattcgaatttactgcagaagctcttgattggtcgacgaacaaatatattgttgcaatccgtttcgtgtattctatatatctaatatgaaacttttttgtcggaatatatggatcatcccgatacattacttt

SEQ ID NO: 24394 - DNA, 808 bp, Zea Mays
gaattgcttcacatcatctcaatagaactcaatggcagttggcgttcaatttggactatggaattcaattatgagttgcagtttgttgatattaaaggaaatatacagatgctcactattttgaagagggaaatgtccagctggatactaacattgatcgcaaggactccaccataatgcagtcacctgacgactgtgcagtttcaataactagcatcattcgacatcacgagtctgaatatttgtcatctctcgaggaatcttacttaaatttgtctgatgcaactttcaaggatcttcggagaaaacttccagtgacccgtactcttttcccatggcataacacactggcagtcagtcttacgagagaccttgccaaacaattagcgcttggaaaatgaagtctttgcaggccatgtcaccggatggcttcaagtgtttttttaatatccatgtgctgttctgtagtaatcagcattcttcatctctgagcttcccaatcccattgtaaatcaagaacacacttttttttttgtggagatgtaaaagatttcgccttccctagggtttctttggatgccgttaggaaccaaacagcctcttactgacgggtgtgaatcatatgtttcttcatcaatgctccaatctgatggattattgtaggtgttctgtatgagtttaaaaacaaggaccattcaaaaggaatgtgtgcgaaactatcctttggatagagattgatctttgagctcagacgaaggatgcacatatgtggtaacaattaggaaatgcttcgagggtggtgtttgtg

SEQ ID NO: 24395 - DNA, 3045 bp, Zea Mays
tttctcccctcaccctttctctttctccctcgaccgccccggatctatctcgccgcgccggcgcgcagctgagccgccgaagcgaggaggcaatcgaggcggacgaagcgccgcaccaaattcgacgggggatcgagcaccagaggcgtagcgcaaaatgttcaagttcctcaaggaggtggtcgcgggatccggatcgggactcaaggacttcccctacaccatcggcgagccctacgcatcggcttggggctcatggaaacaccaccgcggtacctccaaggatgatgggtcgcctgtgtcaattttttctctgtcagggagcaaccctcaggacagacacatggttgctggtcgcaacggtgttaagagattacgaacagtgcggcatccaaatatcttatcctttttacacagtactgaagcagaagctgcggatggacctgccatgaaatacacaatttatattgtaacagagcctgttatgccactttctgaaaagctcaaggaactgaatcttggtggtacacagagagatgagtactttgcatgggggcttcatcagatatccaaagctgtgagctttctcaataatgactgcaaacttgttcatggtaatgtatgcttggccagtgttgttgttacacaaaccctggattggaagcttcatgcttttgatgttctgtcagaatttgatgctaataatgaagcctctggtagccccatgttgcaatttgaatggttagttggaacacagtacaagccaatggagctgtcaaagtcagattgggcttcaattagaaaatcacccccatgggccattgattcttggggactagggtgtttaatttatgaactattttctggtgcaaagctggctagaacagaggaccttcgaaatactgcttcaatcccaaagattaccagaggctcttgaattccacaccttctcgtagactaaatccttcaaaacttattgacaacagcgagtttttccagaacaagttagtagagaccatccagttcatggaaattcttaatttgaaagacacctttgagaaagacagtttttttcgtaaactccccaatatagctgaacagcttcctcgtgaaatagttctgaaaaagctgctccctgtattggcttcttctcttgaatttggttcagctgccgctccagccttaactgttttgttaaagatgggttcctggcttcctgctgaccaatttaatatcaaggtcttgccaactattgtcaagctttttgcctccaatgaccgagctatccgagcatgtcttttgcatcacataaatcagtttggggaatcaatgtcagctcaaattgttgacgaacaagtttttcctcatgtagccactggcttctctgatactgatggtactattcgtgaactgacattgaagtcgatgctcgtattagcaccaaaaatgcaggagcgtgcacatacgcacaacaatttgccatggcatgctttgatggaatatttctgggattttagatcctcaatccctcatgcactgatttctatttcctgccaaaagctatacttgcagatgactgattgtctggtccgttattgcagttatctcagcgtacaatctcaggatctctcttaaaatatctctctaagctacaggtggacgaagaacctggtatcaggacaaacacaacaattcttcttggcaatattgcaggctacatgaacgatgggacaaggaagagagtactgatcaatgcattcacagttcgtgcattacgtgataccttccctccggccagagcagctggaatcatggcactgagtgtcactagttcatactatgaaatgacagagattgcaactcgcatcctgcctaacattgttgtgctcacatttgacccaaatagtgatgtccgaacgaaggcttttcaggctaccgatcagttcttgcaaatagcaaaacaacaccatgaaaagcttaatacaggagacaacagtgtggctgaaagtactggtgttaagttaaagcctggaaatgcaggtttacttgggtgggccatgagttctgttacacaaaagggtaaaccttttgaccatgccccaatatctactgcaaatgccaataattctcaagcatcaacaacctcgactgccactccagacactcaggcttccacactagcgtatgcaccatccacatccacctcgcttgatcaagctgcatcagcatcagcaaggtcgtcagtagatgggtggggtgagcttgaggatggtaatatccatgaggagaatagtagcgataaagatggatgggatgatgtagacccatttgaggacaagccatccccatctcttctatccaacatacaggctgctcaaaaacgtccagtggtgcaaccaaagcaaccggttgcaaactcatctaaaccaaacccactgaaagcgccaaagtcagaagacgatcctttgtggggtcctatagctgctgcaccacctaaaagtgcagtaaaatctgcagacatcaagccatcaacatcacataatgatgaggatgacctctggggttcaatagcagcacctccaaaatcatctgggaagcctttgaagccagctgtagcgaatagtgacgacttatggggtgccatcgcagcacctccaccagcaaccaaagccagacccttagcctcgtcaggtaggggccgaggaacaaagccagcgcaaccaaaacttggtgctcaaagaataggaagaacatcttcaactggaatgtgacgtcttatgatatcaagtgttgtacaagaatgcaaagttttcctttttttttcccctgccttgcgttgagtctgtccaggatgacattctttgtaaactagtaaaaagatttatgtatatgagcacagttttgaccaatgtattagtattattttaccattgtgtattaaaatagatccagaagatttttgcacatcacagctgcaatcatcttaagtccatattattaatatattgctatgtcttattttggcgtgataagagcaacttaatg

SEQ ID NO: 24396 - DNA, 3550 bp, Zea Mays
aggtaggcgtcgatgagtagtactcagacgccgccggcctcacgctgctgctccaggtcagcgccgtcccgaggctgcagatcaggaggtgcggtgcgtggatcagcgtcgaccccatccccgcgtgtttcgtaatagcaaaaatctccgtccatcagggaggtcggtcttgcagttggagttgggcacattcgcctctatcgggcgggcacattccctccgtcccgtgacttccaccttccttacccttcgtatggtgggggcccacctcgccgcccccaccccccgctgcccttctctcttccccgtctccgactccacacacctcccctttccactcgccgccggcgatcccgaaccgggagcagcgcacatggcaggccgggacgagaggtggggggcgcggggcggcccgggggacacgcacgcgtcgacgagccgcgcacccgcgggcaccgccggggagtcggagggcgcgtcgccggactcgctgcggaacacgccctccaacatcgcgcggctggaggacgcgatcgggcactgcgcggcgcggcgcaaataccttgcgcacaccaagagcccctccgacggcaaggacgtccgctggtacttctgcaatctccccctcgccgacaaagtgctctcttcgtccgtaccgcggacagagatagtggggaaaggagactatttccggttcagcgagagggactctctggcactggaggcgtctttcttggagagggaggaagtgctgcttgcatactggtggcgtgagtatgctgaatgcagtgcaggaccgagaggatccttggttgaaagtgatgattctgcatatctttataaggtggaggaagaacgggttggggttcctgtgaaaggtggactatatgaggttgatttgatgaggcggcattgcttccctgtgtactggaacggtgaaaacaggcgtgtcttgagaggccactggttcgctcgcaaaggtggtgttgattggattcccttgcgagaggatgtttctgaacaacttgagttagcatataattgtcaggtctggcatcgtcgaaaatttcaaccttcaggcctatttgcagcaagggttgacctccaaggaagtacactggatttgcatgctctttttactggagaggatgatacttgggaagcttggcttgtctttgatacgggtcctaagcttggtagtaacacaatcaaattaaggcgcggattttctccttctgaatctgcaagtacaaagccttcacaggatgagttgcgtcagacaaaagaagaggaaatggatgattactgctctcaggttccagttggtcatctggtattcatggttcatggcattggacagaggctggagaaagctaatcttgttgatgatgttgttgatttccgccgagtaactgctaacctagctgaaagatacttaacttcttatcaaagaagtacccagagggttctatttattccctgtcagtggaggaagggcttgaaactcagtggtgaaagtacggttgagaaactcactttggatggagttaaaggtcttcgagtcgcattaggtgccacagttcatgatgtcctatattatatgagtcctatctactgtcagcatattattgactcggtctctaaccagttgaacaagctgtacatgaaatttctgaagagaaatcctggttacagtggaaaggtttcattgtatggccactcattaggaagtgttctgtcgtatgatatactttgtcatcaagaatcccttttggccccatttccaacagagtatctgaacatggaaacatctgatcgaagtcaaggagcaaagtcagccaatgaagttgctctgcatgattcaggtagcaccagaactgacatgtcacatatggacagcattgtcccatcatgtgtgctcgaggattcattaaataacccagaaactggtgtgccacgtggggcagttgttgctgagcaaaatgaaaaagaaaataggattgagaatcatcagacggtgtatactgaggaaggaacaacttcaggtgtaagcacaaaagatgctgaagcatcacacatttcaagatctgctgaggatgtccatgaagaggtccttgacaaagaaaaaatgatcatttcactagaagaagaggtgaaacgtcttaaagctaaactagatcagcttgaacagcataagcatctagtgactgagagcaccagtggtgttgagtatcatggaggcaaaaatggcaatcatgccttgaactttggcgaacttttcactgcacaaggaagtataaaccagccctactcaccacaaatcaaatacacaaaactaaactttaaggttgacacattctttgctgttggatctcccctgggtgtcttcctttccctgcgtaatgtccgtattggtattggcaaagggcgagattattggaaagataagaacataattgaagagatgccatgctgccggcagatgttcaatatttttcatccttttgatcctgtagcatacagagttgaaccacttgtatgtgaagattatcaaaagaagcgtcctgtaattgttccctaccatagaggcggaaagaggatacatgttggagtgcaggagttcacagaagatatttctgcacgttctcaagccattgcctgtcaattgaagtcactgaaggtcaaagcagtagctgctttgctagcattgagcagaaatgacacagaaggatggtgagagtgctaatgaggaaggaagatcgtatggttccattatgatggaaaggttgaccggctcaccagatggtcgaattgatcatgtgcttcaggagaaaacatttcagcattcatacctatctgctctgggagctcataccaactattggcgagatcatgacactgctctcttcattctcaaacatttgtatcgtgatatacctgaggatcctccaagcgatgtcgttgaaaggatgcatattaaactgttttatgagagagatccggttgaggaagaaacgcccgtgacattttcggaccatgcagcaattaaggagttctgcagaaaggtgagagcctactcaacaaaaatggaggatgatgccaactgctaagcctcttgatggtgtcatttcctgatggaaaccatgttacatccccacgttcctcgccaagaaggaagatgcaggcatgggaagggagaacgattccacaaaatcgtgatcccaggataagaatcctaagaaatgtagttccacgcttgacaccagaatcaggacacttgagaaacgttgtacagagtcggttccccatgttgcttcacttgttcccgtcgtcaatgcagtgctgtacagagaacgtcctgctgtacctttctgtatatgtaatcttgcgtgctgtgcatacagaatatgatggatttagtttcaaacgacagcttacagcgacaccaggctgaaacgaagggactcgtgagagaaaatccataataatttagagacattaataacacagaacacctagctttcaaatgttgtgatgtcacaaagcttcg

SEQ ID NO: 24397 - DNA, 1256 bp, Zea Mays
atccaattttgggtccgcagaacctcctcctctcgctccgccgccgccttcccctcgcccaccacgctttggtcccaaacccacggtcgctcatcctggacctccacgccatcgaggcagtgaagctgggctcattcgtgcaatcgtgctcaagtctggcatcaactcccccatctaccgggacctccacgcgctcgtctcccacccacgcctgctctccgttgttgcctcgctcctccatatgcccggcctcgtctgcaacgtcccctacacagcgctcccgtcgtcgtcctctgcgtcgaccgctccatccccatgctcatgcgccgcaaggaggccaagccttacgacatgattgaggataggcactggagagtttgacttgcgatatttgagtacatcccattgctggcgctccgagtatctgctgtttctgcaaagaggtcgtcttgactgatcgcaatgatgaagttctggagtgttgttgttatgatgaaggcagacccaagtattgaaagggatgatctgattttgctctaggagattgccatgtacatgcttcttgcatgtggagctgtctatgtgatcttgataagaaagatttgtggatgttgacccaacaggaaattgctactgaggtgcaaagtgaatccaagtgaaagtaattaggggagttagctatgtcaaatggaaagagagtggttgctaaaggataggaagctgaagctggatgaaggaagcaactacatgcaaccgatggcaataatgcattgcagggttgaggctcgttagaaatgtcaagttggtcccggacgtgggtatggtgcccgcaaggccgacagagctgagatcaagcactgagatcgtgccctcgtgcctacggctgcatgtcacacctggccagaggcataggctaccactactgttctaagaggacaacctgctcgatagctagcctaggatggccttcagttccagcaaggcttgtcggctcgtctcactgcagaacgctattgttggcgcctaattgaacgaagttgataccggtaggatcccatgaagcaacataagcagcagaagtctgacgaggaatgacatagatgcagtgctttcgtttgttgctactgaaaaaagatctgaaccaagtatttctgtaagtataccaacaagttagttgctactactttgtatattgatcttcgttggccgaatgtttgagtttttttcaaggcacaaacactttattttgagatcta

SEQ ID NO: 24398 - DNA, 225 bp, Zea Mays
acctgatccattgcccggtcagacctctcctggacagtctctcagccatgcgggccccacatcctatcaaagagcgcccccgccgactgcttcagcaccgggtccttgacctggaagatttcgcgtttgaagtttttgtccgattgatcaaagacatcaaaatgcccgcacccctcgagggacaaagcattcacggccccctcgcatgtgacgagggaggcaaag

SEQ ID NO: 24399 - DNA, 2760 bp, Zea Mays
ggaatttccgggggcggatgggcgctggtccccgcaatgcagcgcccgaattctggggttcgaggttctggctaaattattttaatgtctttattatcagagattccagtaatgtgccttgcctcttttatgtgattgtacaaatcaatgaacggaactcatccctggacctccatgtccgggggtgcatgttctaaccttggatatgccagagacatgaatgttacagccaagtactagcatgaatggtgattcattgatgcgtgttcctgcatcaccaatgtcattttcatccaataacatctctggctcttcagtcattgatggttccatcatgcagcaaagtccaccccaagaacagatgcagaaaaggaggtcttcaagtgtaacatcacaacatgtgatcgatgctggtggtgcattgcatgctcagaagaaatcaaggactgatgttagtcagggtgatatcatgcaacatcagctgattcagcatctgatccatggtcagaattctcttcatttccaggggcaacagaacccacagcttcaagcttttatccagcagcataaactagcacaacttcagcaacggcagcagcagcatttgttgcaaccattttctcagatgcaacaaccccaagttggtattcctcggcagccgcaacttaggccgccattggcacagactggaatgcagttaggtggtcctgttaggactcctatcgagaggggtgtttgttctcgcaggatactgcagtatctatttcacaagcgtcatcgcccagagaataactctataacatactggaggaagattgttgaagagtactttgcacctcgagcaagagaaaggtggtgtgtctcttcttatgaaaacagagggaattcttcagctgctgctccacagaaagctctggatacatggcgatgtggcatttgcaatacacatgctgggaaaggatatgaagctacctatgaaatacttcctaggctctgccaaattagatttgaccatggtgttattgatgaatacttatactttgactcacccaacgaatttgggttgcctaatggacaaatggtgctggagcatgcaaaagttgttcaaaaaagtgtttatgaacatctacatgttatacacgagggacatctgagaatcattttcacaccagaactgaagataatatcgtgggaattttgttcaagacgtcatgaggaatacaccactcgtaagactatagcaccacaggttaataatcttctgcaagttgtccagaaataccaagctgttgtcactgaaagtggatcagccgggatatcaaataatgatgcacaaaccatctgcaacatgtttgtcactgcatcacaacaactggcaaaaaatctagagcatcacaccttaaatgaacatgggctctctaaaagatatgtacgctccctgcagatatcggaggtggtgaatcacatgaaggacttgattgagttcagccacaagaacggccttggtcctaaagagagcctgaacagctattctaaaaccatggcgaagtttcagaatatgcatgattcaagacagctcatggctgctgctaaccttgccaataaccagagcaacaccaaactaatggggaccaaagaagaagcaagtgcttctgcgaccaaccagactcctggtgtcggagccatcggcaataatgctcttcagcatgccacacctctaaacagctaccagaatatgctcagaagctccagtgcaaatccagtcttgctgcagcaggaggcatcgagtgtcttcaaaggtcctacagcaatgcacagtggcatacagctggaagcagccagatccttccgtggacctaaccaagtgcagttccaacaccctgcggcgattcagcagcagcagcctatgccgcagcagagcaatttccagggctttggtggtgttaacccacagtaccagcaccatgtgcttaatcagcttctgcaggaagttaagaacaataaccacgtgaaagcacagcaactgcctccagatgcacctaaagcgagcggcggtcttgcaccaggagttgctattcccaacgttgctgctgctggggagcagggacagcatatcaacagtaatacccgtgaccataacggcgcggtgaagggtgctgctccagctggtactggcccaagcaatgtgatcaacaacacagccagcatgccccccggcagaaacaacagcttcaagtcggtgagcagcagtccagctgctgctaccggtggcattgcggtgaactcgaaggtcgacgactccttccatcaactggaggacctcgacctcgacggcttgatcacaaacgaactgatggagagcgggttgttcggcgccggacaagggtggtgagcatgtcccaccacgcctcacactactatcgagttccttcaccgaaagcgccaagcaacaatataagctttgccacccttctctttctggagtttttgtgttgacagtttcagatgatcgtgccatatacaattatgtaaggtagcgagttggatttggcttgggagtcgggaacggcgcaatctatagagctgttagcgtgtgcgtatgacatgttgctgtggttatcattttcatgctatggaggagtgtcgattatagtctcctgttgtctggcacggcgtgagtgtgtgtttcccatggttctatgaaatcaaattatagaagaaacaagatctaatgtttaggaatcgattctctatggttca

SEQ ID NO: 24400 - DNA, 3200 bp, Zea Mays
gtctaaaagctaatcccctacgctatctgtatatacaagacggaagcgcgaccccgaaaaaaaaatgtcctccatctccatcctgcacagatcctgcctccgcctaggtctgctgccgttctcaccactgcgtgctcgcgccaccactctacgccttccccttcctcttcctcagccgcggcggcatctccacctgccccgccggagcgccatgagctctgccgcgtccaggctgtcgcacatcgcggctgccaccggcggcgggggcggcgcggccggggagtcgaatgagtcgccgccggccgcatccgccgcgacccaggaagacgatggtctttcatctggggatatgggctaccgccttcctccaaaagaaatacaggacattgttgatgcaccaccacttcctgtcttgtcattctctccaaacaaagataaaattctgtttctgaagcgtcgagcactgccaccactatcagacattgcaaagcctgaggagaagcttgctggtctaaggattgatggaaattctaatactaggagccgaatgtctttctacactggaataagtatccataagctgttagacgatgggactttgggcccagagaaagaggtgcatggatatccagtaggtgcaaggattaattttgtcacctggtcacaagacggccgtcatatatccttcagtattcgagtcgatgaggaagacagcaaaagtggaaagctgagagtgtggattgctgatgtggagtctggagaagcaaggccactttttaaatcgcctgaaatatacctaaatgctatttttgacagctttgtatgggttaatgattgtacactgctagtctgcactattcctgcgacacgtggagatccaccacataagccatcagttccatctggcccgaaaattcaatctaatgagtcaaagaatgtagtccaagcgagaactttccaagatcttctgaaagatgaatatgatgcaaaactatttgattactatgcaacctcacagcttgtgttggcctctttggatggaacagtgaagccaattggccctccagctatatatacatctgttgatccatcaccggatgataaatacataatgctttcttctatccaccgcccatattcctacattgtaccttgtgggaggtttccaaagaaagttgagttgtggactgtagatggaaagtttattagggaactttgtgatttgcccctggctgaggacattccaattacgatgagcagtgtacgcaagggtaagcgctcaattaattggaggccagacaaaccttcgatgctgtactgggtggagacacaagatggtggagatgcaaaagtagaagtctcccctcgtgacatagtttacatggaaaatgctgagcctataaatggtgaacacccagagattctgcataaacttgaccttcgctatgctggcacctcttggtgtgatgaatctcttgctttagtgtatgaatcttggtttaaaactcggaaaatcagaacatgggtgctctctcctgataaaaaagatgtcagcccacgcgttttattcgaccggtcttcagaagatgtatactctgaccctggctcaccaatgatgcgaagaactgtgatgggaacatatgtcatcgcaaagatcaagaaagaagacggaaatatttatgtcttgttgaatgggatgggtgccacaccagaaggaaatattccattcctcgatttgtttgatataaatactgggagtaaagagcgtatatgggagagcgacagggaaaagtactatgaaactgttgttgcactgatgtcagacaaaactgacggggaactgctccttgatcagttaaagatacttacgtcgaaagaatcaaaaacagaaaacacacaatattacttgcagacttggccagaaaagaatcaaggtatgattcatcaaaagatggacctttgccatgtctagtttggtcctaccctggtgaatttaaaagcaaagatgctgctggtcaagttcgtggttcccctaatgaatttccagggattggtgctacatctcctcttctttggttagctagagggtttgtgattctgtctggtccgacaatcccaattatcggtgaaggcgatgaagaggccaatgacagatatgtggaacaactagtaacgagtgcagaggctgcagttgaggaagttgtcaaaagaggggtggctcaccctgataaaattgctgtcggtggtcattcatatggtgcattcatgacagctaatctgctggctcacgctcctcatcttttctgctgtggaatcgctcgctctggagcttacaacaggactctaactccatttggttttcagaacgaggatagaacactctgggaggcaacaaacacatatgtcgagatgagccctttcatgtctgcaaacaaaatcaagaaaccaattttacttatccatggagagcaggacaacaattctgggacattgacaatgcagtcagaccgattcttcaatgccttgaaaggtcatggtgcactgtctcgtttggtaatacttccttttgagagccatgggtactctgccagggagagtatcatgcacgtcctctgggagaccgatagctagtggtggcagtgcagcccgtgaaggtctaaaccctgaggaactctcatcattaccaagatcgcttctgtgatcaacttcagttggtgttcatgaaacattccctggacagcaagcctaaagggaaaaaatagtgtatcgttgcacttctaccttaaccgactaccagggatgccttgattggcctcatatttgtttcgattgctgcagggtgggctgaacaagttccatggccagcatgcgctcagggagcgagcgaggaagctcgaccagggcatcctgattataagaatgcatatggtctgcaaatggagaatttgctattgctcaatgaagtggcggcatgctccaaaatcctagtgagacctctgcacctttggtcagatcccaggcctaggatgtccatgttgtgtgtatgtaccaacagctaaaatgtaaacacgacattatcatagttgagtacatgaataattatctattatatcttattgcaaaatttgaaacagttcttctgtagatggttaccttgcatcttacgctacaattagctcagatcacttcttgttgtatct

SEQ ID NO: 24401 - DNA, 1216 bp, Zea Mays
cacacacacacacaacagatctgctacagggacaatctgatggtcggcgcatcgcctagaggccggtggtggcgagtcacgcctcctcagccctcatcctcacgtcgtcgccaccgcagatccgcccaacggcccctgacccgacaatgacgattatcttattgctagcaccgatggggtggggacaaagctgaagcttgctttcgaaactggtattcatgatacaatcgacattgacctggtggcaatgagcgtcaatgacattgtaactctaggtgcaaaaccattgttcttcctagattactatgcaacgagcaagcttgatgttgatcttgcagagaaggttatcaaggggattagggatggctgcgaacaatcagattgtgctctcctaggaggggagacagcagaaatgcctggtttctatgcagagggtgaatatgatctaagtggttttgctctcccaagaaatgatggcataacaactacagttggtgaagctctaatggcaccaaccttcatctatgttaagcaggtgcttgagattattagcaaaggtggtgtgaaaggactagcccacatcactggtggtggctttactagcaatatcccaagagtattcccctctggatgcggggcaaaaaatttactgggtcatgggaaatacctccaatcttcagttggcttcaacaggcaagaacaaatgatcttcaaacttcgcctttgattttcagtagcaactattctgagaaacatcaggcactgcattggcgtactggtcataaaaatgattgcctccagataataagttctgctgcttcaaattcagttctgccagctgtaggaatagggtttgtccgctggtttgctaaggcaagcaacgtacatagactgctcgtcttggatcctttaggaatcataaaagcatatagaggaactatgtataggctacaaagaagcataagaagcatttttatagcagaagccaagtgttctgatgattttgttttttcaattgtgttttctgttattggttcagtatgcacatatattgacatgatttatggcatggcatctgccatctttgttatatttatgacatcgttcttgattgatgtgtgcgacatgaatgatagatctttttaacatcctgagcatcattgtgtcactcattatcgtattttgtatatcatttatgggttcacggatatgaaat

SEQ ID NO: 24402 - DNA, 114 bp, Zea Mays
gtgcaccggacatgttcggtgcgccaacggctctctggctgccaacggtcgactatgccatttatggaaagaaatcgggcattggactgtccggtgcgccagtcgacagaaggc

SEQ ID NO: 24403 - DNA, 1421 bp, Zea Mays
tcctatctgcggcgagctctttttttgagacaaattctgttctaatatagcagtttgatagttgatgaagtaggtcttgagcaggtacctgatgttattcacagctatcatatatgtgtagtaaaaaataagcgtatagattcagatattattgccaaggcaactcagatgaagattataatgcagtatggtgttgggttagaaggtgttgatgtaaatgctgctacagaacacaaaatcaaagttgcacgaatacctggaagtacgacaggaaatgctgtctcttgcgcagaaatggcaatctatcttactctaggcattctgcgtaagcaaaaggagatggatactgctgtgaaccggaaagaccttggtgttccagttggagatacattatttggcaaaacaatccttatccttggatttggggccattggcatcgaggttgccaagaggctaagaccctttggggtaaaaattcttgctaccaaaagaaattggtcatcggacacattgccatcttatgttgatgagctagttgacaagaaaggtgggccggaagatatgtatgagtttgctggtgaagctaacattgttatagcatgcatgaccttaaccagcgagacaattggaattgtggatcataagtttgtttcatcaatgaaaaaggggtcatatctggtcaacattgctcggggacgcctgctggactacaaggctgtgtttgatcacctggaatcgggccatctagctggtctggggattgatgttgcttggatggagccatttgatcctgaggaccctgttctgaaattcccaaacgtcattctaacgccccatgtggccggcgtcaccgagtattcctacagaactatggcaaagtctgttggtgacaccgcccttcagcttcatttaggcgaggcgttcacggaggtagagttcgtcaactaaaaaaccgtccaggcggcagccgtagacgcatgccattcgtgggctatcggaaccgctgatgcgatcatttgtagagaataatggatccgcgacttgtaagaataaacatgtagccagatgtttgatggtgatctccatgagaactctgccactggctgccttagctggtagtggtagcaagtcattttctcaaacattgccttctctttctctgtatcactgttgtcgtcatgatcacaactttctttgttagccgggttggttaggtgctctaggtaacactccttaagtttgagttcagttcaattcttaattcgactgaatttcaggctgagttttaaaaataatacctttttttttggtgttgttcacgcactagcctcagctagccgtcgtagtctcggacggcgattaggaggtcagatcgtgaacactgtcatttccatcatgtacgacgaatgaggttttcgcga

SEQ ID NO: 24404 - DNA, 1558 bp, Zea Mays
ggctactgctactgggctcgccgcgctcatcagggcaaacgcatactacgctacaagtgaagtgagtgatcgatgacgacggtagctagctagtttggtgcggttctcgtcggactatgggctgtttggttcagctctgtcgtctgtcgagctaacctatcatatcagcgccatgcgccccggccggtcgtaacctagctaggagtagctagctaggactagctagctaggagcctaagcgcccagcccagtgggtggtagcctaccaagggtgaggaagaggagctgagctaggaccgcgaggcgagcgagatccaatctgcaccccacgaacgaaaagattcttccccgccggcgtcgctctctcatccgtcgacgtctcgctccttccttcctctctctctctctctctctctctctctctctctctctctttctctctctcagccagcagcaagcatatagcccagcaccaccacatgcccaagggccctccctctccctcgtcgtcgggccaattgagtgtgagagctcgaaaaaacccaggggatcggccggaccagcagcgagcgagcgcgagctctgcgtgcgtgtgtgtgtctgcgcgctagattagatcacctccatcgtcaataattgcaggcagatccatatagtctgctggtggcgagacaaagcaacggatcgtcgtcgatccggagagcggaaagcgcgcagatcgcggcggccatggggcgcgggaaggtggtgctgcagcggatcgagaacaagatcagccgccaggtcaccttcgccaagcgccggaacggcctgctcaagaaggcgtacgagctctccatcctctgcgacgccgaggtcgcgctcgtcctcttctcccacgccggccgcctctaccagttctcatcctcctccgatctgcttaagactctagagcggtaccagaggcacatctatgcttcagctgatgctgcagtgccatctagcgatgagatgcagcatagatggccaatgccgtgatgctatcaacaagccagtgacatgcaattgtcggagttacagtacttgctttatgatctactagaccttactgcatgtatttaaccaataagaacaatatatggtactagattaataaaatctacatattttaatgacaatattacagactgtgcatttttatatacaagtaaacatcatcattacatgcatgcaatccatttgttaaaacactaaccactatgttttataaaaatgatttttatcatcaatattgcataacaaaaactattaggacatcttggcaatgcagaaattcacatgaatcagtttattttcatagaaaaaatacaggtaacaaaggggaaaaatcctacaatccaaatgagaccttatatgttctcatgcataagtttgctatcatacactataaccataaaaggatcatggtagaatatgttctcatgcatatgttcacatgaaaggattgttataaattaaagagagtagatgtggagacttttgggacctctccatccaatacctgatatctgaaaatgca

SEQ ID NO: 24405 - DNA, 3663 bp, Zea Mays
cgcgacgtcgccgcctgtcatgcacagccagtccgcacccggcccgagggtgggatgccgcgcccacctccaccttccgtccttcccccacaccttcaccacggctccactccactctccagttctccactccccccgcccccatctcggcctcctctccaccccccttggcctgtcgcgaaacgattgcccgacacgggtccccaaccaagatggcctagccggagaggttgaaccagcgcaatgccggcgccagcgagcggcggcggtggcggggaccacctccgcggccacgcgcacctgaccaactgcatccacctgcgccaccaccacgcccacgcccacgcccacggcgcgtccgggcggaggcgcagccccacggggtcctcggcgtcggcgtcggccgcgctgatgcgggacctcctggccctgcagcgctcgcgctcgctgcgggacccatccacccgccgctccgtcgacgactccgcttccaacaaccgggtcgccgccgacccggacgacgccgaccactcccgcgccggcgcgatcaagacgctcctcgaccagctcacggagaacccgcaccccaagcccggccgccggccccggcgccggttcaggcgaagcgctacccgtcgcgtcgcccagcccgctgccgccccccgcgtctccgtcaactccagctcccaggaggccgtctgcggcaacaggtacctcttcggcggcaccggcggagccgacggcggtgtcgagctgatgcagcagcagcagcaggtgtcgcacgagtcgcacaacgtgtgcggcatcccgtggaactggtcgcgcatccaccaccgcggcaagtccatcctcgacatggccggccggagcctctcgtgcggcctgtccgaccccaagtcgacgtcggcggcgcggaggtccgaacccgccacctccgccgcctcgtgcggccacgtcaacgggtcacgctcgcacccgcatttcccggtcaccgcgaggctgacgtcctcgagcagttcagactccgactctctgcctctgcttgtcgacggcgtgcgcaacgccgtcggtggcatttccagcagcttctccggggagctcgggattttctccaagagcagcgagctggactccgacctcgcgtccgaggcacggtctgggcagaagtcgcggggctcgcaccgtgcccgacaccggagctttacgcagaagtatgctccaaggactttcaaagacgtcgtcggccagagcttggtggtgcaggcgctgtccaatgccattctgaagaagaagatcggactggtgtatgtcttctatgggccacatggcacgggcaagacctcgtgcgccagggtgttcgcaaaggctttgaattgccattccccggagcacccgaggccctgtgattcatgtgcctcttgtattgcacacaatctgggcaagagcaggagcttgctggagattggaccggttggtaatatagatctggatggcattgtggatatccttgacaatgtgatgctctcgccggtgaaatcccagcacagggtgtttataattgatgactgcaacacattgccgcctgatacatggagtgtcatatccaaggtcgtcgaacgtgcacctaggcgtgtggtttttattctcatcagccctaatcttgatctccctcatataatcgtgtcgaggtgccaaaagttctttttccccaaactgaaggagtgcgacattatcagcactttgcagtggatttctaccagcgaaggcctggatgttgatagagatgccttgaaacttattgcttcccggtcagacgggtcactgagggatgccgagatgactctggatcaactcagtctgcttgggcagacaatttcgatgtcccttgttcaagaacttgttggcttggtttctgatgataaattggttgatttgcttgatttagcactatctgctgatacagtgaacacagtgaaaaccttgcgagatatcacagaaacaggtgttgagccactggccctgatgtctcaacttgctacaataatcactgacatccttgctggcacctatacattaacacgagaaagagttcggaggaaattcttcaaacgtccaaccttatcaaaggatgatatggaaaagctgcgccaagccttgaaaacactctctgaagctgaaaaacagttgagggtctctaatgacaagatgacatggcttacagctgctcttcttcagcttgcacctgataaacaatacgtattaccgagttcatccccgagcacaagtcttattcaaggtctgtttacctgccccgagggagacatagcaaggaactctgttatggatcatagtgatatatatgctggtgcccgtagcttggcaagagcatctgaccttggaaatcaataccatagagatgctaatccagtgtctggttccagcaacaacatggcaaacaattaccatgttggaaggagacctggggaacataccccagacagccatgtgttgccaaccggtgctacaagagtgaatgaaggatctaggtatggcaaaactgacagtgaaatgatttggcaggctgtgctagagaatgttcagtcagactcattaagaagattgttagccagagagggtcgactgatatccgtcagcctaggcacagctccaactgtacaattaatattcaactctcgagtaaataaatctaaagctgagaagtataggggccaaattctgcaggcatttgaatctgttctttcttctaccataatacttgaaattcgatatgaatctaaggatgatctggcagcaggccatgctccagttatttctgcctaccctgaggatggctcctcaaatctggtgaaattattgaagttggatctcaaatggattggcgtgctgaacaagatagtggcattgttatggcaaacagaagacaagaggctgtctcgggagaaggtttgtcatcacagaatcaagaaatttctcagggaggaaaaattgtgaataatggagatggtcggcaaaagaacattgtgagaggcaaggtatctcttgctaatgttattaaccaggcggaatcttgttcccaacaaggtggctggtctagacacaaagctgtatcaattgcagaaaagctagagcaagataatttgagattggagcctagatccagtttgctttgttggaaagcttcaagcacctctagacggaagctgtctgcactgaagatcaggacacgaagatcacgagctttatcaaggctcgccttgtgcggaaggtgtatttcagtgagatctccaagatgaagcattagggggtcaatcgccccagattttacatgtagctaacttagcagggcacccataatccataatttattctctgtagttgtagcagcgacctagaggtgtcattctgtagcacattgtgtaacatgtaggagagagataaacacatatccccattctttctattgaaacaccagaaatagttgctcttgctccataattcgttaatctgaacttctgaagccatgccaaggccttatattgatcctctgttgtcatattgataaaaatagggcatgtgaggcttgcggctgcgagcaccagaaagctttccaaggcaccactgtatttcttcggcatagggcga

SEQ ID NO: 24406 - DNA, 277 bp, Zea Mays
caaaagtttaggcccaaagatggaccaaatacaacacctccttatggaggccagtaccaggcatacagaaaaaggtccatcaagaagaaaaaacagttaagcaacctctctcctaaactatggactatggcatctgtggtttcatgccatatttaaagggggcattgtcctttacagtgtatagttgcttctactattcagtggcacaactaaagggctatgtacatgtatttaaaaatggtaaggttaatagcaaaagatgagacactgctgataa

SEQ ID NO: 24407 - DNA, 1583 bp, Zea Mays
ctacacatcccaaatcccccaaccctaactaatccgccgtcacccctcccggatcgccagcaggcctcatcccttccacagttccacggctacgccgccgtcgtcggctcatccctcctccccctcccgcccgcagttccaggtggtgcacccctcgaccccatcagactcgatctgtcgtttcctggctcccttaggtcccctcttcgccaccactccgccgcatgctccccaaatccgccgctctatgggtgcatcaggtctcgctgccagttccaatggagggaataaatgggcaaaggcggccaacgaggaagctacgatgacggtggtggctgtggagtcagatgagcctaggacagaatcgccgttggagcggggaacaatcatctacaacctcctcgtcacgctcccctttccctccggcctgatctcgcgcctccgccgtgcattcctcctctgccgcttcaccaccgacctggtctctagatcctccctccacatgctccaactcctggtacaagagtgcctgaggtccgctatcgacctgagctccgctcaggtcgccgctaccactgataatcggcctccagcccactgctttacttttggcgacgagtcgacgactgggcaactaccgctgcccaaggtcaggtgctcgagtatccgtcgaccccttcgctaggccattcccgttgacagcaagcatcagttcaataattccaataaggatctcaagacctacagctggggaatgttatttgacaatggtttcaagttgaccaaacagagtggatacagtcatgctcaaagttggcaagctgtgtcaacaagcaggccccatctgctactcgcttcatgggcatgcaacaaagccttggtattcagccgacgcagcttgggaaggatgcacctgcagcaggagttgcacgtagagttagtgcttaatgaaagatgatcgaggttgagtctgttgcagctgctgattaacaagagattcgagaagtagtgaagaagtgattctgtgctgaggatgattatgcagcagaaaaacttgatattgagctgagtggaagttacctgttaccaccacgttattctaagggtgcattggcactgcattggcgtactggtcataaaaatgattgactccagataataagttctgctgcttcaaattcagttctgccagctgtaggaataggaatcataaaagcatatggaggaactacgtataggctacaaagaagcataagaagcatgtttatagcagaagcaaagtgttctgatgattttgttttttcaattgtgttttctgttattggttcagtatgcacatatattgacatgatttatggcatgacatctgccatctttgttatatttatgacatcgttcttgattgatgtgtgcagacatgaatgatggatcttttttaacatcctgaccatcattatcgtattttgtatatcatttatgggttcacagatatgaaatgacaggtttcttatttttgagatctgaaccatgtgttgccttttggttgttacataataaatggtcctgtcgatgtgctttacgtt

SEQ ID NO: 24408 - DNA, 407 bp, Zea Mays
acccagataactgatctacacgaaactccgtcaccaaatcacacagttaccacaaagcatataggagtgctttattctgcaagtccatccaatggcaccttaggaaatcctaaggctaccgcatacctagttctccggcgattttccacaaaaaaacaaggaccaccaataatgaaggatcccaaaaaaaatgcaaaagtcatctgctgtcatgggcaggggggcaaagtgggtcgtggccccacctcaaattttttctatccttatatatacgttgaatatactgcaaaattggaaataaaaatagcaagtatatgggaccaaaattgcagtgagcagcccacttccaccgtcctggcccacaatccaactccacggtctgctaaaacagcccacgctcggcccgc

SEQ ID NO: 24409 - DNA, 570 bp, Zea Mays
agaggaagtgcagctcgacttatgagagaccaccaaactggaaggatgaagggatttggttttgtcaaatattcatcgcaagcagaggcagagaaagctgtcaaggcaatggatggcaagattctacgtggaagattgatctttgtggagatggcaaaaggacacgaaagcaagtaggacaccctccccacgagaggatttcactgaacatgaaacatgagagcgccatcagcttatgccagatggcaaatatcccaaattctcaattgatgttgcaacttatatacaaagcacaagttaattttagctagcttatctttgataacactgctaccttgccatctgaaaggttgccgtgcattggtatccgttgacctgtgtaagaaatgttggcagctctgtgccctacgaactagcctggttgattaaccaagatctgttcaaaattaaagccagtaaaacatgaatattgttaaagatttcagcaatgaatcgttgagaaaagattgataaagacgttctaattataatatactcgttagcctttaacgagtgggtctagttagcctt

SEQ ID NO: 24410 - DNA, 1637 bp, Zea Mays
tattccttcctcagccactgggtctgtccctgccactggataactggagatagaacagctgtaaggaaagctctagttgctttgtctagctttcttcaaggtgaccttccaatcggtaactcaacaacttatgttaagaaagaaggttcaatactcccatgggcatcttcagaagtacctgggcctaatatgggggcttcgtgctcagaggcatccacagagtttgcacaaggcagtgttgctaagactcattgtccagaaggtaatacaggagatgctcaaagtaaaactcttcagcaagtttcattcaggcttctcttgcctacctatcttgctggaggtttgattggcaagaagggcttgattatcaaaggcattgaagttgaaactggtgcttgtattgatgttggtgcacctgtcgctggttgcaaggaacgtgtaataacaatttgcgccctagagagcccagactcggaatatcatatagtgcaaagtgcactacttctcatatttgacaggatgatggagatggaaaccaatacacactcaacatttgagaaagcatctcaattcttggtcagagtccttgtgctcaaaaaccagtttggctgtttagttggtttgggtggttctataatcaaggaaatggtgaatacaacaggagcaagaattcaaatattggacgatacagaaattccggcttgtgcctctacctttgaactagttgtacagatcactggggagctaatgaatataaggaatgctttatcccttgttttctggaaacttcgtaaccatattttctccaatgaaaccgactacaacaattcccatatttcctcttcagaaattgctgaatcaaatgcaaccagccaggcgaatatttattcaacaatccaatattcagtggacaatggccataaggttgatcatagatcccctctcagttatggagtggactctgtggaaaagtctttcagtgatttagagctcagttcttcagaaattcagaaacctgataacgggaatggtgtcaggatcaacaattcagatagcgggattcagaaccctagtgactggaatggcattgtaaccaataacttaaatgatggaattatttcttcagatgaaaacaatcttgtgaggggagctgagcatgctgcgataacaagaatcacatacgagactgctgtttctgggagtatcctaactcttgtttatggtgataatgggagcaacctggccaagcttacagaggtatctggtgctgacattatcgtctacaatccaccttccgagggcaacgaagctatgatcgtggtttctggaccaccggatcaggcacaatcagctcagcgcctactcgtcgagttgatcctacagggacaccccggcacctgcctttctgcttaatacggcagataaccttgtcgtgaaatatacaacgatggttgacgtgcagactgttagctggggaactgaattttatgactcgaactgcgtggggaatatggagtttgaaccatgtgattgatacgttgtgtacctttatctatacgtagtacttatcctgtgcccaatgtttatcggcatcgcgactaattttgaaactcttgcagccttgcaggaccgattcg

SEQ ID NO: 24411 - DNA, 1911 bp, Zea Mays
atgatggtcctcacctcagttgccaccacctcgttcgccattctacttcttttctctctcccctcatgcctccacctccgcgccaccccattctcggcagagggcgtaggagcatgcgcctcctccccgtattcgttcgacaccagccctgacaccgactcgcgcagtggctattgcacgtccacgaggacgtttcacatcatgcgcgcaccatcgttttcgccgtcgtcggacgtcccgttcgtcttcccggccttcgccacgttcttcctccccaacctgctgcccccacccacggtcgcaaccgcgagccgaccgacgctcgtcgacgcagggaaagtgaaaaatcgctttcgcacaagtcgcggaacagaggcaagcgctgtgccacacagcgggagtcctccccgactccccgagagatttgctgcccagagccttcgaatcgggttcaatcccgtcgatctttctgcccgccgccgccacgggactccagaagttgccttcgattcggccggggccgtggaagcggggatggggctcggagaggcggcggggcggctcctggcggccgtggactgggagcgcgaggcctaccctgcgtacgacgacttcctcgcgctccccgccttcgttctcttcttccctaccgtccgcttcctcctcgaccgcttcgtcttcaagtgggttgcaatgaggcttatacatgggcagggacatcagagagctaataatgacacagaagaggcaaggaagaagataagaaaattcaaggaatcagcttggaaatgtgtttatttcctgtctggagagcttttatctttgtctgtcacatataatgagccttggttcaccaataccagatatttttgggtaggaccaggagaacaggtctggcctgaccaaaagataaaattgaaacttaaggctgtatatatgtatgctgctggattctacacatattccatatttgcacttatgttttgggaaacaaggcgttcagactttggagtgtcaatgtcacatcatgttgctactgttgttctgattgttctatcttacgtgttcagatttgctagagttggctctatagtattggcaattcatgatgcaagtgacgttttcctggaagtagggaagatgtccaagtacagccattgtgattggcttgccaatgtttcgtttctgttttttgttatttcatgggttcttctccgtctcacatattttccgttctggattctgagaagtacaagctatgaggtcttgttgactttggacaaaaagaagcacaactttgatggtcctatatactattatgtgttcaattcccttctattttcactacttgttctccacatatattggtgggttttaatatatcggatgcttgtgagacaaatcaagacaagaaatgttggagatgatgttcgatctgattatgagaggacgagcattgttcctcacgagattcaccgaagccgggctatgggttagttgtgtcttggctgccaatttgtgctgtactaagtatgcattagaaacaacgctgcaatgcattagaaaaaaagctggaactggatgtcgaatataacattcttttcagtgttcacacaaagtgcagcggtaaatgtagcaccaatttaggggccgttcgtctctttcggaatggaggcatggaacaattcctagccggttaagttttgatcagctgaaatgattcctgatctattcctggacaaacgaacaaggccttagcattccggaaacaaaaggaccggttgtaaatcaaagcctttctgccgacataccatgtacattatgtttgccaggatgacaccgcttggagttttgtgaacggtagcgctggccgccggtgaaacgcttctcttgagctcctgttgttccata

SEQ ID NO: 24412 - DNA, 2095 bp, Zea Mays
tttgaacttaagtacctttcaaatgcttttatgtcagtatgagcgaaggtcagttctgaagtttctggagacttttgacagttacagattggaacggtgcttgcatctttgcctagattatggagttacagatgctgctgctttcttgcaagagagggttggtgatgttgggagtgcccttgaccttattctggctggacttgatgagaaaattagcttatttatctcttctgtggaaagtactttctctggcgtcgcatcaaaaagtatcgctgaaattaagcaaccagacatcgttctagaaatgagtgaggctcatccagtgcttgatgcattgcatgcctccattggattgtgccaaaggaattcacagcgcttggacccagaggaatctcagtccctttggttccaactccttgactcgaaattattcaatagcgcatctagaaagacaatgcgagcctattgctcttctcagagccattaaaaaaactgtatgggatcaaggatgtaaatggaaaaggtgtcaagtccaattggagtgaagcatcaatggaacatctgaaggaaaaaggactatctcaacaaatgaggatttcaactaaacaaaagtgcctaaatgttctgcgaaaagtattttcacaatgtgttggagaaataatagaggccatggctgggtatattcccctaccggcaatcatggcaaaactgttatctgataatgggaatcaagagttcggtgatttcaaacttgtgatacacagaatgttatctatgtatctttacgaaaaaagaatactggaaacggctaagtcagtaattgaggatgactcattttacaccttgagcttattaaagagaggagtttgtcatgggtttgccccacagactttcgtatgctgcatatgcaactgttcactttctaaagaaggtgctatttcagccgtacgtttgttcagttgcgggcatgcaacacatcttcagtgtgagtctgagcagaccaggtcatccaatcaggaatccaaagagggatgccctgtttgtctctcaatgagtgatacgcaagctcgaagcaaatcacctatgtttgagaatgggctaatgaagtattctggggctgaacatgaagtgtcacatggcatgtatcagattcatgaagttgatcatgctgagagatctcgtgggcttcaacagatgtcacggtatgaaatactgaataatcttcagaaagcgcagaagtcctttcatatagaaaccgtacctccattgaaacttgcaccgccagctatataccatgagaagatacagaagaggaccacttcggttggtgaaactagcaaacattctgttagaagtcagaaaccccagaaaatttggcaaatgaaggagaaaaaatcaaaagaggctgggagtcatcatccacaaaagtcaagttttctacgttaatagaagaaaagattgctgatttgttaagtatgaaaccagatccaaactgattgttaatttgcttcatgccatcaccacgatcgaatcttcaagactacaaatttgtcagcgtgatggagcctgcccatcagtacatagcttttttttttgtcttggggatgcatcctgttggtttatcatcttctgcttaattacaggttctgtggagccaaggtgctttgggctagggaggaaattgtaacagtaaattttcatacagttcatcgtgattagttttgtgtacagagcagagcatacacgtggtgacatggtccctgtagagggacacattcgcagtaaaggtgggatgcctcgattcatactcaacaatgtaaagtaaaggtgggatacctcaattcatgatcattgtaaaatacgtgcacagtataacacaggagcactggctgagtggcatgtatccttgcagttcatcgcgattaatctctgtacagagctgttatactgtcggttttgatatcagttgcaattacacatctgctacagttttgtagtatcagatatcagaacacgtcgggcccgcagaacgcctggaagctcgtagttgtcggcgccgagcatcctgtcgccattgggttgcgctgtactgtac

SEQ ID NO: 24413 - DNA, 161 bp, Zea Mays
cgcgcccccactcctctccccttcaaaccgtctctcccacaacgcgaggatccggcaaccatgcacgcagccatggaggcagccggcctcggtctccgatccccggtgtggcgtggccagccagcgcggcccaccagcacagacttccaccggcgagcctt

SEQ ID NO: 24414 - DNA, 1641 bp, Zea Mays
taatgtgaatggcgatgtgaagaatgctgattccaactggttatgttgctgtattggggaagccaaatgttggcaagagcacacttattaaccaaatggttggtcagaaactttcaattgtaacagataaaccgcaaacgacaagacatcgcattcttggtatatgttctgaaccagagtaccagtttgcagattatactttatgacactcctggtgttattaaaaaggagatgcataagctggacagtatgatgatgaagaatgttaggagcgctatcggcagtgcggactgtgtgcttgttgttgctgatgcttgcaaaactcctgaaaagattgatgaaatgcttgaagaaggtgttggaaacaaagatattggacttcctgtactgctggtattgaacaagaaagatctcataaaacccggagaaatcgcaaagaaacttgagtggtaccaaaaatttactaatgttgatgatgttataccaataagtgctaaatttggtcatggagtggatgatatcaaggagtggatattgtcaaagctccctctgggtcctgcttactaccccaaggatatagctagcgaacaccctgagagattttttgttggtgaaatagtgagggaaaagatttttgttcagtacaggcaggaaattccttattcatgccaggttaatgttgtcagttacaaaagtcggcctgctgccaaggacttcattcaagttgagatacttgtggagaaagaatcacaaagaggcattatactagggaaggatggcaaaagcataaagatgctggcaaccgcatcgaggcttgacatcgaggactttctacagaagaaagtctaccttgaggtggaggtcaaagtgaaggaaaactggcggcaggacgagcgactcctgaagcggtatggctacggcggcgagatccaagcgctgtgactgtgactgtgactatgaccggtgcgctctagctcactgtcagctgccgcgagcgtggaatgacctggttttttttcaattcctctcgtgtgttgttgttgtcgatgcgaatgagtagcagttatttaacctggtgtcgaactcaactagcagctcagttgtgttaattagtcagcaagttatgtgctctgatcctgctgttgttgtcagcggaactggttttgccgcagacaagtcagcatggttgcgctctctgtagcagtctgtgtgaatagaatcacgggggagttcagacatcagagggactgaacagccgagccaagccacaagtgcatgtacaagtcgtgtccttcgggcggcggcgggtccaggtggaggcgcgccgtgtgccggtgccctgcgccggccgtcgtggatacggtgtggcatagcgagcacgaccggttggggctgactgaccgtgggaggcggtggagtatgctgatacacgtcgggtctgccgcagcattgacttggctaccttgagcagctcctctgttgtccaaacaaaaaaactcaacttctccacagaccacatgacagctgggatggttaaccgagtgactgacgtatttataagccggaccggccctaccgaatagccgccatatgtgtgcactgcagattttttttatttacgtacattttgtcttgtctgat

SEQ ID NO: 24415 - DNA, 8359 bp, Zea Mays
gccgaccgcacctccgccggaccgcctttatgccaaaaggcccctccccaccccgcgaatcattccagcgcccctaccttccgtccattccgttccagtccacctccattcccacggagaggcagccaggcagcaccagcagctcgctcgctcgctcgcgagctggtccacagcgccccggattagaccgtcgcggcggacgacgaggaagcagactcgtcctcgtccccgtccttccccgcctcccacccaccccggcggtcgacgaccaccgctcccacgcttctcggccgcgggccctaaaccctcccgatccatggaggccgccgcgcccgatggggccgcgcaggcgtccccgccccccgcggaggccgaccgcccgcccgagcctcgccccccgccgctgccagccgcggggacgcacgatccgcacttcctgagctcgatcataggggacgcggcgcccccgcccccgccgccgccgctcgggcagaagcggaagcgggggaggccgcccaagaggaaggacggcgcggccgtggccgcggggccggtggtgccggcgccggcgccggcgctcgcccgggccgcccggagaaggcaggacgaggaggaggtcgtctgcttcatctgcttcgacgggggaaacctcgtcgtctgcgataggaggggttgccccaaggtctaccatccggcgtgcatcaagcgtgacgaggcattcttccagtcccggagcaagtggaactgcggctggcacatatgcagcagctgcgaaaaggcagtgcactacatgtgctacacttgtacatactccctctgcaaagtgtgcatcaagcaaggtaaattcttcagtgtcagggggacaaagggcttctgcgacacatgttatgggactatacttttgatagaatgcaaagatgaaagcgcaacaaaggttgattttgatgacatactcagctgggagtacctgttcaagctatattggctagatctgaaagggaagctttcattaacattggaagaactcactactgccaagaatagatggaatgttcctagcacttctgctaggaaagaaaaagaggagtcgtctgatgacctgtatgatgctaataatgatgatgatgctggttctgactgctcctcaggaaaacgaaggcgaactaattcaaggaaaaagggtcaaaaacgccgaaaggtaaatagagattgtagcattcttgaaaaaaaggtcgagcttccacttagaaatactgagagcattccggtggaagtgccaaatgaacgggtgccatatccggtacacacaaaagtaccaaatggacgagtacccatgccagtagacacaaaagtaccaaatgaaccagtgtccttggcagcaaacacaaaatgggcatcaccagagctattggagtttataggacacatgagaaatggcgatcaatctttcatttctcaatttgatgttcagactcttctgcttgattatatcaagaagaataaccttcgtgatcctcaaaggaaaagccagattatttgtgactcgagacttcacttcttgttcaggaaagcacgagttgctcactttgagatgttaaagcttttggaaatgcattttcttacgaatgagacttcaacagtaactaatagtagccaagtgactatcaatctcaattcagctcatgtagataccaatggacacaatgacacggctgcaaaagtttcccctgataagaggaggaggatctatagaaagatggaaagagatacacaagttaatcttgaggattatgcagcaattgacatgcataacataaatttgatttacatgaggcgcagcctaatggaggatttagttgatgatgtcaaattctcagataaaattcacggtggttttgtgaggataaaaatttctgatgtttgtcaaaaacaagacatataccgtctcgtaaaagttattggaacacataaggttccagaaaagtatagtattggaaagaagatgacaaatgttgcacttgagatattgaatttaaacaaaaaggagattattacaatggatacaatatctaatcatgattttacagaggaggagtgcaaacgtttaaggcagagcatgaagtgtgatttaattagcagactaaaagtgggtgatatcctagagaaagccaagatattgcaatatgtaagagtgaatgattggtttgaaaatgaaaagcagaggcttgggcatcttcgtgaccgtgcaagtgaaactgggcgcagaaaggaacttagagaatatgtagaaaagctgcagcttctcaacgattctgaggaaagaactcgcaggattattgaaattctggaattgcatgttgactcacatatggatcctaattatgagtctgctgaagaaacagatgagaaaggaactgttggaaagtcggtaaatcagacaagaccagatacaaccatatcacgaaggatatcgagatatcttagcactgtgcaaaaccatcctaaaaaagtttctgattctagccaccttccaaaaagcttgtccacagaaagtgcaatatgtggatcaggagcaagaagtttggagaacagcacagcaaacagaactatgtatggagctggaccactttcatcttctgtagtaacaatgacaaacgacacagagccagagaaagtctggcactacaaggatccttctgggaatgttcagggtccatttactcttttgcaactttcaaattggacaagttacttcccacgtgatctgagagtatggcttacatttgagagtgaagagagatcattgctgttgactgaagtgctttcaaaacagcagaaagattttactcaggctgcatcacatacaagtagcaaggcaacactggttggcactggacatacaaggaacaaccctagtgtggatcagaccaatgctttctcccctgttggtcatagcgtggttagttcttctggaatacctgttcagtataataagtattctgttccagaaagggaaagtgtgtactctccagatgatagcttgtcgctgtcaactagttcggttccaccaaaggatgcttatactgtgaatagccaagcacactgccagaataagcattctgttttcattcaatctcctgggagttcatatgggcacacagacttgaaccatgatggaatacagggaggatgctctggtgaatcaaaccaccatcacagcagtagagccctatggagtcctacagtggcacatgtgagttgtggacgtggtaacgtggaatctcatcagaatcagcatgtttcctggtcagaaagtcaacatgaatctaaaaatggttcacaaggaggatttgttaaagatctgaattcaaggcaggatctatcgaaaaacctacctgctcaacgtattgggaaagatgtttccagtcctttgtttgcttggagtccggccgagtcgaggacagcttcaagtcaacaggaagggtcttgcttaagttcaacaactaacccaagctttctcgatgaacttcattcttctattgcttctgcaaagcctaagagctgcgctccagcaacccccattgaagacagaggttctagttcaccatcagatatgctaagtcatgaagaaagagttccaatctgcagtccacaatcagcccctttagcatctgcttctgatatgtgcaagatggaggagatcatgaatcagcaaagaacacttgtggtggatacatcgaatgcttcagttaaccagtctcctgaatcaagggcttttcctgtatcctctcctgataaccaagatattgaccgcgagtttcctagtccagttccaagatctgagaataaggacattgctgtggacagctcagaattagcaccagcgtcacctgaaaatattactacgaatttgcctgtttcagatacatgcaagatggaggaggtagtgagtcaacaacaagtaattggggctgttgtatcgaattcttcagataaccattctcctcaatctaaagtttcccctgtatcttctaataatgaagatacgaaacataaataccccagttcaaccccaaggcccgagaataagaatcctgcggtggatagtttactttcaacgtcagctgctcctgaaaatctaacgacaacttcaacccatgattctgatacatgcaaaatggaggtccaactccaagatctgacagtgaggaagctcttatgaacaactcagcgacaactgcatcagcctctgatacaagcaaaatggaggagtttgtgaatcagcaaaaaacccttgaagcagattcatcaaatgctccacttaatcaatctcctcattctcacattttctcagtaccttctgacaagcaagatattgagcgtgaatgtccaggcccaactcaaagatctgacactaaggaacctcttatgaacaactccgtgttaacatcaggaccatctgaaattcagacgacagcctctgcagcctctgatacatgcaaaatggaggagtcagtggatcagccaaaagcgcttgaagcagatgcatcaaatgctccacttaatcatcatcctcattctcacattttccgtgtatcttctgataatcaagacaatcagtgtgaacatcctagcccaaatccaaaatctgacagtaaggaacctcttgtggacaactcagtattaacatcagtggtgcctggaatgctagcgacaacttctgcctctgataaatgcaaaatggaggagtttgcgaatcagcaaaaagcacttgaagtggatgcatcgaatgcttcatttaatcagcctcacattttcgctgtatcttccgataatcaagatatggagcgtgaacgtcctagcccaactccaaggtctgaatgcaaggaatcacttacggagaactcagtattaacatccttggcgcctgaaattctagcaagatcttctgcctctgcttctgataaatgcaaaacggaggagtttgtgaatcagcaaaaaccaattgaagcggatgcatcaaatgcttcacttaatcagcctcatgtttttgctgtaccttccgataatcaagatatagagcgtgagtgtcctagtccaactccaaggtctgaatgcaaggaatcttttatggagaactcagtattaacatcagcggtgcctgaaattgcaagatcttctgtatccgcttctgatacatgcaaaatggagtttgtgaatcagcaaagaccaattgaagcagatgcatcgaatgcttcacttaaccagcctcgcattttcgctatatcttctgataataaagatatagagcgtgaatgtcctaacccaactccaaggtctgaatgcaaggaatctattatggagaactcagtattaacatcagcggcgcctgaaattcttgcaatatcttctgcatccgcttctgatacatgcaaaatggagtttgtgaatcagcaaagaccaattgaagcagatgcatcgaatgcttcacttaaccagcctcacattttcgctatatcttctgataataaagatatagagcgcgaatgtcctagcccaactccaaggtctgaatgcaaggaatctcttatggagaactcagtattaacaccagcgacgcctgaaattcttgcaagatcttctgcatccgcttctgatacatgcaaaatggaggagtttgtgaagcagcaaagaccaaatgaagcggacgcatcgaatgcttcacttaaccagcctcacattttcactgtatcttctgataataaagatatagagcgtgaatgtcctagcccaactccaaggtctgaatgcaaggaatcccttatggagaactcagtattaacatcagcggcacctgaaagatcttctgcatccgcttctgatacatgcaaaatggagtttgtgaatcagcaaagaccaattgaagcagatgcaccaaatgcttcacttaatcagtgtcgcactttcgctgtatcttctgatactaaagatatagagcgtgaatgtcctagcccaactccaaggtctgaatgcaaggaatcccttatggagaattcagtattaacatcagcggcgcctgaaattcttgcaagatcttctgcatctgcttctgatacatgcaaaatggaggagtttgtgaatcagcaaagactaattgaagcggatgcatcaaatgcttcacttaatcagcctcacattttcgctgtatcttctgataataaagatatagagcgtgaatgtcctagcccaactccaaggtctgaatgcaaggaatctcttatggagaactcagtattaacatcagcggcgcctgaaattcttgtaagatcttctgcatccgcttctgatacatgcaaaatggaggagtttgtgaatcagcaaagaccaattgaagtggatgcatcgaatgcttcacttaatcagcctcctcgttgtcacattttcactgcttcttccaataatcaagatattgagcgtgaatgtcctagctcaactccaaggtctgacagtaaggaaccttttgtggacaacttagtgttaacatcagcagtgcctggaaatctactgacaagttctgcagttgcctctgatacatgcaagatggagatcttgaataagaaaataacacttgaagcagatgcatcaaatgctccacttaatcagcctcctctctctagcgttttcgcttcatcttctggtgatgaccaagataatgtgtgtggacgtcctagtccaaatccaagacctgagggtgagcagcctctcatgggtaactcagggttaatatcaacagtgcctcgaaatctaacttctacttctgcatctgcttccgacatatgcaaaatggagatcttgaatgagaaaagaacacttgaagcaaacccatcaaatggtttgattactcaatctcctcaacccaaggttttccttgtaccatctcctgatatcctagagtgtgaattttctagtgaaacacctaggcatgagtttaaggaacctgttgcggacagctctgggttaacttcagcagcacatgaaaatttagggactaagccacatgtccactcaccagatgcctttgtaccaccaaagtctggtgctctaactggggaattaggtgacacgaaatcagattttaaagatgtgtcagatgtactggattctttaatggaagaaaggagtggaacttcgtacatgccaggatcaatagaggacttcctagccgaagaagaaccacaatactctagccctatcgcattatctccttggggtgaacctagttactaccaaggtgatgctgttgattctgcgctatggggtactcaagatttgatcaatgatatgtggtcattgctttcaccaagacctatgctccaaccttcatctggtattggaactgaggggaaggaaacttttgatatcaacgaggtggctgtgacccatgttagtagtgattattttcaaaaaggatcaatgtttggggaggaaaatgtgaaccaggcaaacttgagtgctgctgcagactggatgctgcctgagcaggtcccatcaataccaaatggtatgtcaacatcgtcagtagatgagagcaccatagttttaggttctcagccatcaaccaatcagagcttagactggggtggtactacatggagtattggccagaatgccagcgtgtatagcaatgaaaaagcagagccctcgagtaaaagctattgggaagaaccaaggaagcaggaaaccgccaaatccagtgtttctatttcaggacaggccattggaaacaacaagggcttggaccctcgtgataatgctgctaatcggggcagccggctgagtcatcatcaccgtggcaggtactcccaaatcagtgaatcttggctacttagttcaagtcactctaggagtaggtctgatagatttggcagcggtgggtcatcaagatcaacttcaaaggggcaatctaggggctaatgtaaattgtcaagtgcaggagagaaatgatgcatcttgtagctaacctgcatccttgatctctgcagcaggaatagttttctttttaaaattctttgtcatatctttgcagtttgtataggctaattacagtttagtccactcagactgtagcaaggagcatatatgtttagcatagaggtatttgactgcccattgcccaaggagtagattcagctcttgggcatggtctgtatcatcctgacattctgttggatggagctccaattgtaccaccggcatctctgttgacaccgaaacgcctgatgcgttggaaacaattatatctgattgattggtttaacttcgtggaatccctattttcgaagatcacgaaacgacagag

SEQ ID NO: 24416 - DNA, 1556 bp, Zea Mays
aaagaattttcacctgaagcaaagcaaaaggcctggtcttacaggtggaagtgatgatacatatgtaaggcatatgcttatgagagctagaagcaagggatggcgtgttgtggtgtttaatagccgtggatgtgcagatagtcctgtgactacacccaagttctattctgcttcatttacaggggatctccgccaagttattggtcatattttaggacgttatcctcagtccaatgtctatgctaccggttggtctcttggagcgaatattcttgtgcgctaccttggcgaggaaactgataaatgccctttatctggcgcggtctccttgtgcaatccttttaatttggtaattgcagatgaagatttccacaaaggatttaacaacgtttatgataaagcattggctagggctttgacgactatatttaagaaggatttgaacaaaatttaggcatgctctccttttcgaagggctggagggtgaatatgatatacccaaggcagcgaatgcaagaactgttagagattttgatgaggggttaacccgagtttcatttggtttcaagtcagtggatgattattactccaattcaagcagctcggattctatcaaggatgtttgcatacccttactgtgcatacaggctgataatgacccaattgcaccatccaggggaattcctagagatgatatcaaggcaaataagaactgtctacttatagtaacaccacagggtggccatcttggatgggtagcaggcgacgaagctccattcggatgtccttggacagacccaatagtgatggaatatctagaacatctcgagaatgagaaggactctagtaccaaaaataacacatcctatgagggtgtttcagaggcatcagtatcccatctaactgtgcatggccaaagataataatatctctcttctcatagtactcattcgccacattatgttttatatggaaatagtttagtagagttcatttagccgtgttgtctgctgctgcctgctggttaattgagtacatggctcttcgtctacaggtctagtggtctacacatgtgcgagaagatttctgtgtcaaataagatgtctggttctgagatcaaaatagaacatgcgttatccaattgttcgttcttagggggtttcactttcatcccgtgtttgaaagggattctctgtaaatgcatgagctgttacggagttggcctttgtatccctcttctgcaacgcgtgaaagttgatggcgatgagcacggcagtgcatcatgtaaatttgacaatgtcattcagcgcaaaaaaaaaaaaaccccccgaaaaatgtgttggaagagtttttgtgtgcgcatgctaacaaatatctcatgtggtaaacatcatcttggattaacatatggcaatgtgatgaaatagtaacagttgttgaaattttatatgatcctactattccttttacagatggtaccagatatagatgatttcattgaaccctttgcgccagaaaaattaatatatcttactactactgtgtctagattttcc

SEQ ID NO: 24417 - DNA, 518 bp, Zea Mays
tgatgcaatactgtgtagcccatatcgtaaggctgcattgatcactgtcgggggacttgcagctggtgcaactgtcggatctgcagtggaaaatttcctgcaggttgatatcgtgccctttctaggcatccactcccccgccgtcgttgtcagtgaatttattctgttctcccagttgttggtatcactgtttgttaggtaggatctgaaatcaagctgtcatcctgatcatggcatgtaagtaactgaaatggttcgtgttcaaacttcaaagggtcagggaaatgcttattttccgctcaaggtgcaagcagctgtgtatagcaaacaatacatggacatctctgtcccttataaagatcacttgtatctaaaaaaaaaacacaagaggctacgatattccagatctagagtattaatccaagaatttacattctgcaatggatacaagcttccttctgaaagattgggattgggattgagagaactagatacaattgaattgatctttgtaaggg

SEQ ID NO: 24418 - DNA, 2260 bp, Zea Mays
cgtacatgccccgtgataaacaaaccattccccgcaagaaacagcaaacaggcacagccctcccctcctccactcctcgccctctctctctctctctctctcatcccgtcccgagaagcggacaaagcgcggcgctgcagatttcgatccggttcccaatgcctcccatgctcgccgtcgccccgtgctagctcctctcccgtctccgcttcctccacctgccgcgccagcgccacgccgcctggatccggcgagcgcgtggccgggagcctcagatccgagcgaaacccagccttcccgtggtgacggccttcgctctagctccagattggctggcggctgccattcctcctcctcctcttctcgctcgaggtttcaaggcgggtccgttcagctctgaaatctacggaggagtcttgccgccgctttaaacgtagaggttttgcgcaagatgtggaagcagctcctcagcaagctgccccggaagtcgccggcctgcggggattcgggccagtgcagcaatggcaccggtatacagcgcacgagcagctgcgggagcatcccgcccggccgcccggcctccgccatccggcgcatgtcatccgccgtcttcccctcgagtgtcgtggccggtatcgagccgctggtctcgttcaaggatgtccccaactcggagaagcagaacctgttcgtcagcaagctgagcctgtgctgcgtcgtcttcgatttctcggacccgaacaagagctcagtggagaaggatatcaagaggcaggcattgctggatcttatagagtttgtcgagtcgaccaacgctcgcttctcggaggcagccatcgcggcctgctctaggatgtgtgccatcaacctgttccgggcgttccctccgagttgcagatctggctcatcaggtggtggtgagggcgacgaggaagagccaatgttcgaccccgcgtggtgccacctgcagcttgtttatgagctgctgctgaaatttatcggatcctcgtccttggacgcgaaggtagggaagaagcactttgatcactcattcatcgtgaagctccttaatcttcttgactccgaggatccaagagagagggattgcttgaaaactattctgcacagggtatatgggaagttcatggtacaccgtcctttcatccgcaaagcagtgagcaacatattttaccagtttgtctttgagactgatcggcacaatgggatcgcggagctgctggaggtctttggcagtgtcattagtgggtttgcattgcctctgaaagaagaacacaagatctttctttggagagttctgattcctttacacaaaccaaaatctgttggtgtgtatcttcagcagttgacctactgtgtaacacagtttctggaaaaggacccaaagcttgcaagctcagtgataattggtttgttaagatattggccgataacaaactgtcagaaggaagtgatgtttctcagtgagattgaagagatcttggagtctaccagccaagcagaatttcagaaatgtatggtaccgttgtttcggcgaattgctcattgtattaccagttcccacttccaggttgctgaaagagcgctcttcgtatggaacaatgatcacattatcagcttgattgcacaaaaccgccaagtgatcatgcctcttgtcattccagcgctagagcaaaacattcagaatcactggaaccaggcggtcctgaatctgaccgtgaatgtcaagaaaatgttatctgagatggacgacgatctcttctcgtcatgcctggcgaagtacaaggacgaagaagaaaaacgcgtgtcgctagaagcgaagcgtagacttacgtgggagaagctcgagtcagctgcagctttccagccagtgactggccatacagccgtcctagtaggccaccggccgtcagcaaatctgatcgccaccatgatctagctcatgcatgtatgccgaacaagcgaatgtggtgctctcccccccttttggtgaggcgcagcaagtgtagtgttctctattttgctcctgcttattattattttccttttgctggtatgggtaatcagtgtagtagtaagttgtaactatttccggatgtttatgttcttaaggcaaggatacctgtaacttaagactgccgagtgctgacactctacatgtatctttgcctgtttatggatgaacaggtgtcctacagtttaatttcaaaaaagatgagtatatctaaaaaaacataaaaaa

SEQ ID NO: 24419 - DNA, 4192 bp, Zea Mays
gtcggttaaatttgttgtcaaaaaacttaaacgacaatcttagggagtaccaaaaaaatcaacacacgtgcatatggaatgtaattcttgaattaaaattttgtcaggtttgagcctcagttactgcccacagtcgccacagatagacctccagtaccagtcacacacgtgacactcgcaatcgcaaagtcgcaagcggatcgcaaactcgcaatcaaggctgctcccctccgtctccgtgttcgccactcggttcaccgcccgccgccgccgagacctcctcctcgccggctactcctgaccccacaaaggcagcgctcggaggtggccctctgtcgggtggagtggtggacacatccgcgcccatggccaacggcggcgctgcggccggcaagctcaccgtcgccgagaccttctccaacctcagggagcaaggcaaggtgcgtgcgtttgagacctcacgttcgtgcttcgcttcgtcgcaacccttgcggggcaattcaccccagcacccacatttctcttgctgttcctgattgagtcgcagggttggattgctggcgccgtggtggccgatacccaatgttggtcccggttggttgcagggaatacctaattttggtcccatttagttgcaaggaaatggattagggctttggaacaatctgtgtattccttgcatgaattgtccaaatctagtggttttatgtcgagtacacatcgtgctggtttaatttccgtaaaaatctagcctgatcttgcacaatagtggctgctggcttgatgtgcacattgatccgtctttgtctttaaaagcagtgtttatattttaggtgccacagtgttcattctcaacaaaggtaactgcattaagaaatttgtatccagagtagcgataacatgctaagcagagaccaatctttagttgcagggatcttgcattgtactccattccaaattctgtgttattttgtcttttctagatgcataccttattagcttttgttatgcactttgatatatggtatgtctagatatatagcaaaaactatgtacctaataaagcaaaaacgacttacaatttgcaattgaaagagtatggtgcagatctgccttaaatcgtatccagcagttcactcatatggttacccaaaatactgttttacactgttcgcagagtgaagttttaatatgggtgtgagcatgggtaaaagtcttagttggcaaatagtcttttggtgtaaggatttagaaaatactccagtgaacacgtgggaaaatcacttgtcagagagggagggtggagccacaaaccaaggagccgcacagatgccgacatcaatacacttatgttgtggagaggagccgcatctcgtaatgtctgattttgtttagatgccacacagtagtatcccagccatgggcgcatggatgggggatttggacccagggtcaatggaatttaattcccagatttagggggtgtatggtacggatccaggttccagctttaatttaaaggtgtagtttataatagaaatttaaatagttttaaaaatatttttaatctaaataataaataaaatgacttatctaaatgacttacgggggttcacaacttcaaaactatacgattttatggaacacctaatggcctgctctatcaattccactaagaccccgtttggttccaattagtcctaggactaaagtttagttctaggactaaactttagtcccttcctgtttaattctagggactaaacaaattctaaagtaattaaatatagtgtccaaagactcaaatacccctggaatctatagcaacatggacgtgggataagggcaatggaggaaaaaaatatggtttagtcccctttagccaccacttgagggactagggactaaactgatttagtctctcctttagtccttatgtatggcaaattagagactaaaagagactaaaacgaagagactaaaaattatcccttgcaaccaaacaccccctaaattttctggagctggatcaatcccagacagcaccttaatttaagttgacagtctaacctgggaaattttcagagtgcattcatcccgttcataactgctggtgatcctgacctggtaaccacatcgaaagcattgaagattctcaattcctgcggttcggatgttatagaggttggcgtaccatactcggatccactggctgatgggccagttattcaggcttctgcaacacgggcgcttaagaaaggcactacacttgattctgtcatagagatgctgaagggggttacacctgagctttcttgccccattgttcttttcacatactataatccaattctgaaacgtggtgtgggaaacttcatgtctactatcaaacaagctggcatacatggacttgtagtgcctgatcttcctttggaggagacagcgttgctgaggagcgaggccattatgcacaacatagagctggttcatacccactctcatctttgcatgcaccacttgcacaaagtttgttgcgtacttgtgttgctatctgggtgctaactaaattcttactcgagatgggacctatcaaatcttcagcttgggctctgcccattccagacctgcaaatatacacagttgcaaaagatcttctgggcctttgcagcaacccagccctagaagcgggtctagctacttgggctcacacatgtcaacggggtttgtccagtccactaaattcaggataggttacatcaaggccttttttatttctttttgtaacctggtttggtaccacacctaatagctttgcttattaatcatggtggaccaatcaacagaatagatatcttgagtgtaatgtacttggtattgttataaaagcttcctttatcgaagaaaatcttgagtgtcagccatataccattttttattttgcatgattgcttgcaggtgctgcttacaacgccaaccacgccgacagatcggatgaagggaattgcacaagcttcagaaggatttctctatcttgtgagcgctgtaggggttacaggtgcacgctcaaatgtaaacttacgtgtagaacaccttcttagggagatcaagaaggttacagacaaaccggtagctgttggtttcggtgtatcgactccagagcatgtgaaacagatcgtgggctggggagcggacggtgtgattgttggcagtgcgattgtgaagcagttgtgtgaggctgctactcctgaagagggtctggaaaggctcgaggagtacgccaggagtatgaaggctgctatgccgtgagctgatctcactccccgtcacaggcaaggtaattagaacatggttttagcaatattctgggcatggggttggcatccataactcatctagtgctgtacgggtcgttctccggtggtgagaacgaagtctggctttgcctataatagaaaagggttataaactgagttagtgcgacattttgatgaaaaagtgagcgattgcgagatatcagttcatgcttattggcagatcctttttttggctgaaagattgaaatgttagggatgaggttgccctggcctcttgagaggataggaataagagaggataagttcgttatgatttatatggcttttcgcttgaaccccaccagctggtgtccatggatgcgggcagagcagtgtctgattggctgcactgaaaatgacattaccttcagacaattcgccttgctctcttctggttctggagtactactttcgaggtccgtcagactgggtcacaagatgatcccaaacggccccagatgctggatttttggacaacggaaagtcgattctgacctctgttaatgtcggcactcatgggtcatgaccaagccatgtttatggtcaaatcagtcccggatgctaacacgcttctctaatctctacctacggagacgactttttccggtgcttatcgtatcattatcatgcatgttactggtagtaacatgttgtctgaacagattctttagctctgtcatggcagcatgaagtgtatctggatgcgaagaagcagtgttggtattgaactgtccatgtacgagttgtttgttgctgtgctttggcggggtgaacagctaggattggataggctctagtgccagccgagccgccagggcccatgaaaagtcaattgtttg

SEQ ID NO: 24420 - DNA, 4471 bp, Zea Mays
gccaaaatccggccagaaacctcgtccggcggcatcagcatttcctctcccacatttcgccccgccctacgcctacacgacggcgctgcggcaagcgccgaccaatccatggcagacgaggcggagtggaacgaggctgaggccgggatcgcggccccgggcgcgggcgtggctcctccagcgcccggaggcggcgaggaaaccaagaggaagagggggaggcccaaaggtagcctcgacacgtataagaggcggaggcggaggcggcgcaccggcgacctggtgtcggcggtgcccgcggctagcctcggggatatgggccactcatgtggctgcattcccgctcccccactccctcccccctgcactgtgtacactgtacgcgacggcggcgtggcaatcacccctcaatccatggaggacgaagcggagggggtcgaggctgagtccgggaatgcgggcgcggcctccgccgccagagacggcgaggaaaccaagcggaagaggggaagtcccgaaggtagcttgaatgagaggaacaaggacaggacgcctaagcccaaggccaaggggaggcggaggcggcgcaccgacgaccagaccttgtcggtgtccgcggtgagcctcggggatctagggctcggggtagcggcggggaccaggtcgatcagagagaggaggccggcgcccaatgcgttcttcgacgtgggcagcgacagcgatactgagcatgatgatgatgatgatgaggagcaaactacgattgatcaggccaatcacgagagtgctaaaacaggtgattctgtaaagaagggaggaagacccaggaaaatggaagcgggccaattgcatactaggacgcagatttccaatggtaaaagcaacggccatacaaatgggaatcctgctgggaagaagaggggaaggggaagacccaagaaactgacagtagaacaagcgattactaggtgccagttctccaatggtgaaacaaacaagagtggtgccgaggcagcaaggagcaaacagtcaaggaatcgtaggatttcacagaatgcaaagaagcggaaaagagatgaagggaaggagtctatgacaaaaaagttgaacaaacggagtaagatgttgactggggaaaatgccctcatgtgccaccagtgccagaggaaggacaaaccacgggttgtccggtgtcagtcatgcaaaaaaaagcgattctgtctgccatgcatagaacaatggtatcctaatttgccagaagatgaatttgctgtgaagtgcccatattgtcgcaagaactgtaattgcaaggcatgcctaaggatgaggggagttgaagagcctccaaaaaaggagatctctaaagaaaatgaaattcgctatgcttttcatattgtaaccatgctgcttccctggatgagagaactgcgacaagaacagttggaggagaaggaagtagaggctaatatacaaggagtttcaatgaatgagataaaagtggaacaagctgagtttgacctagatgatcgtgtatattgcgataggtgtaaaacatctattgttgattttcatagaagctgcaagcgttgtttctacgatctttgccttaattgctgcaaggagcttcgcaaaggtgagatcccaggaggagaagaggtggaatatgtgccacctgaacctaaaggtaggagttattcttttggcaagattcatctactgaaggatgctgatagaagtaagaactcctcaaatggcgagtcttacaacggcatgcctgctgttgggaactccaataatggtctgttgctctggaaagcaaaaagtaatggtagcataccttgtccaccaaaggaagtaggaggctgtggtagtacacttctggacctcaagtgtttgtttccagagaagatgtttgccgagctagaatatagagctgacaaagttctcaggagtgggacattagctaaagcaatggttagtagaagtgatcggtgcccttgcttcaatcaatcaggcaagataagaactgaaagcaaatcagtaagggaggctgcaagcaggaagggctcaagcgataacttcctatactgtccagttgctattggtattcaagatgatgacatagtgcattttcagatgcattgggcaaagggtgagccagttgttgtttctgatgtccttcagttaacctctggtctgagttgggagccaatggtaatgtggcgggcattgcgggaaagatccaaaggcaaagcagaagatgagcaatttgctgtttgggcgatagactgccttgattggtgtgaggtgcggagctctatttctaatgtctaagtgggtgaattcatttttgtggatgataaccattgattgatatttcttgtttctaatatcaaggttgtttggcttgtataaaatcataaaaaagttctgacttttggcagaaattcttaggacggcattgagtagtgaccagcctaagtaaagccgagcctgcgtttgcatccagaagaaaagaacacatattataatagtattgacaaacttcatcgttctatcagtgaagttctcatttcaactggggatgtttatgagtcgccctaaatttagatgtgccttgtttccttcttatgccgcttcatgcacgcatttaatatccttatatgttgcaggtggaaattaacatacataggttcttttcgggatatacaacaggcagaactcatgctaggactcactggcctcagatgcttaagctaaaagactggcctccttctagttcctttgacaagcgattgccgcggcatggtgccgaatttattagcgcattgccatttcgtgagtatactgatccacgatatggcccgctaaatcttgcagccaagcttcctgctggtgtcttgaagccagatcttggacccaaaagttacattgcttatgggttctacaaagaattgggcaggggcgattctgtgaccaagcttcactgtgacatgtctgatgcagtaaatatcttaacacacacagctgaagtcacttgtcagactgatattggcttaattgaaaaaatccaaaaagacatgagagagcaagatctgcaggaactatatgggggtctaaattcccgctctgagctcaagttgtcaccagctccaactgaatgcagggatgaatctgttgatgaaggattgaagacctcatatagtagagaaggcaattgtgtaaatagagacaattataatggtttggacatcaatgcattaccacctgatgacgatggagatattgcaaaggataaagaatcatctcctggatcagagtggcaaagtgaactaggtcagagttcagatcacaacaatggggtcaacacaactgatgagatgtacaatggagctcattacatttcacacaatcaaaaaagcactggcaggaaagttggcattaaacctcaagaagagaaatctgaaaaggctgattgcagtggcacatgtgcttatctaaaaggaagttctgaagataatccggaaatgcctattgtggagagctcagaggagcagagcaccggtggtgctctatgggatatcttccgcagacaggattctgataaattgcaagattatcttaggaagcattgctctgaattccggcatatttactgcaatccagtcaaaaaggtattccacccaattcatgatcagtccttttacttaactgaggagcataagagaaagctcaaggaagaatatggtattgaaccctggacgtttgaacagaagcttggtgaagctgttttcattcctgctggatgtcctcaccaagtgagaaatttgaagtcctgcatcaaagttgcgcttgattttgtttccccagaaaatgttggtgagtgtgttaagctgacggaggagtttagacgacttccatctttccacaaggctaaagaagacaaactagagatcaagaagatggctgttcatgccctgaacgaagctgtaaacttcctggatcctcgttcctcagaagagttgaaaattggggttggtgagaacatctgtgaggatgaatctgtagatgagaaggagctgccgcctagaagaggagttgaagtgtcaggcgttgatgagaagcctaaatagaaggcgagggaggcatcaagtccaaaagtgaagctgctgatgaggtcgcccattttaggttctcggaatcgtggttaattgatttgtcaaagcccctgttcatgtatggtgatcgctggctgacaccgatggatgaagagaagcaggacacgtgtgtgctgctgatatgtcgtgtcggcgagtgacatgaatatcatccctatccctatgtttaagtgcgaggcgccatcagaaatcagaacatcaaaaggaagcaaaatcaccttattatcaatgtcgcgatccagaagatcattcaccgtgcaaccagcccccctgagaaggacagctccacatcc

SEQ ID NO: 24421 - DNA, 1446 bp, Zea Mays
gtcgaccacgcgttggtggtagcggcgctagctaggcggcggcacggcatccacctggcgtccatccgagacgggcaggccgacgaggacgacgaccgcaaggacatcatcaacaagctcgtggacgcctagtcgcgccacattccagattgccaggctgcctcatcgcgccgacatggagatcaccgtgcttggccttcatgctcaagattcccgagctgatggcctgtgcatatgcatgggctgccagtccgtcaggagacgttccagctcgccccggggatgccgccgctgcactcgtcgcagctgtcgtggaacaacgccggcgagcccgaggggcagcacatcatcttcgagctggtgacccggaacaacaagctgaacgatgagctggcggagatggtggtgagcaactccttctacgaggccgaggccggcgcgttcaagcttttcccgggcatcctgcccatcggcccgctgtccgccgacggggcgttccggaagcccgtgggccactacctgccggaggacgagcggtgcgtcaagtggctggacgcgcatccggacgcgtcgtccgtcgtgtacgtggccttcggcagcataaccatcttcagcgcgcgccagttcgaggagctggccgagggcctggagctcaccggccgcccgttcctgtgggtggtgcggccggacttcacccccggcctcagcaaggcgtggctccacgagttccagcggcgcgtcgccggcaggggcatgatcgtcagctggtgttcccagcaacaggtcctggcgcaccgtgcggtggcgtgcttcgtgtcgcactgcgggtggaactcgaccatggagggtctgaggaacggcgtgccgttcctgtgctggccctacttctgcgaccagtacctgaaccggagctacatcgtcaacgtgtggaggaccgggctggcggtgacgcccgacgcggacggaatcgtaggcagggaggagctgaggagcaaggtggagcaggtcgtcggcgacgccgacatcaaggacagggcgcgggtgctcaaggacgaagcccaccggtgcgtcgccgaaggagggtcctcgaacgacaacttcaaaaagctcgtgaatctgctcagtgaatgatgagaaccgggagactgggagcatcgtgtccagtgtcctggcgttgtaaatgttggtgcacttagggcttgtttggtttgatggctaacttgtcatattttacctaacttttgtgtctaaagttagttcttcaattcgaacgactaaccttaggtaaagtgtgacacatttagctacgaaccaaatagccccttaatctccttgattgtaaacagtggtggagcacctcttacggttaggggtgctaattgatcgcaatctaaattcttcttgacaaaatggtaaattttaaataaattttattttaaaaaataa

SEQ ID NO: 24422 - DNA, 2618 bp, Zea Mays
ggggccaagtacaagcatattgatactcatccatgaataaaacacccaaaggaagctatgtactcgttatcacttctcagaaagatgctggctcttatctgggctcccctgtgtaccaagtgaactcaatgaaattcttatgctgcaacgaggctatcaagcacttgactccacaggaaagaagggatgaggcatacttcatgtctctcctgagaattgcagaaactacttgtggattgtattattcatatgacagggatttgacactaaagtaagtgctttgtcatgcatgtatctgaataaggcaaccaaaagacattggcttaatattcagaaaaggccaacaacctttgtgtagtgattatgcacatccttaagatatttttttttctcaaacaacacatgagaactgtgtgcatttcattaagtagagaaaaaaaaccaaaggagaagcagtgtgtggcgctgttagccttgtactaggtggcctagggaagttggcctcctggaaaaaagccgaaacagtcagagcaccctgaatgtcctggatccagagattctgatctaaatcctcctgtaccgttcatctcctcgtcgacatttgtaactaatcgattgcctgttagttccattgttccttgcagatgtgtagtaggttcttgaagtatggatctattgagcacttcttaagaggttctagttgtatgactgttatcatgtactgaatgcctctgtggtgcatttatttttcttttgttatactggattgtatctaactgatgagatagaaataatgcgatgatggaatgctcctcaatgtaaagctataaacactatgattatgtagcttgcagagggcatccaagttggctgctgggagggtacataaaccactatggaagcaggctgatccacgttttgtttggaacaaaaatttgttagaggaacttattgaagctaagcttgatgagttcatcatcccactgatacaaggaagttttcagtcagcacaatttaccttgaaggatagaccagtgaggataacattgttctcaaggagatgcaacaggcgtttaggaacaagaatgtggagaaggggtgcgaatcttgaaggcgccacagcaaattttgtagaaacagaacagttggttgagtatgaagatctcacatcctcatttatacagcttcgaggttcaattccacttctctgggagcaaatagtggatttaagctacaaaccacggcttagcattattgaacatgaagaaactcataaggttgttcaacgccactttcatgatctttcacaacgatatggcaagataattgttgctgacttgactgataaacgaggtgatgaaggagatttgagcaatgcatttgctgctgaaatggacagaattcctggtgtcaggtatatacattttgatttccatcatgtttgtcgtggaggtaactttgacaatttgcaagctctctacaatcaaattgaggaagctattcataagcaaggctgagcagatattttcttatgaacactaaaggagagattttgctggagcaaagtggtgtagttaggtccaattgcattgattgcctggaccgtacaaatgtgacacagctgatgggagcattattgtcatctgaaagcatttctctctctgataacattcatgatacattcaaaaaattatgggttgagcacggtgatgagctgagcctggagtatgctggctcttatgctttgaaaggggatctagtgagatatggaaggcagacattgcctggactaattaaagatggaatgagtgctctttcaagatattatttgaataattttcatgacggagtgcggcaagatgctcttgaccttattagcggttattatacagtcagccaaggcagctcttctccttttcataatggtgttgattcttcttcgtatctgccggtggcttcagcaatcatagttggtgggattaccgcgacaactttcactctcagtcaagttggacggaacgcgcagcacttgatctcctccattatctgtgcgggcttaacagtcggagtagtagccttggtgaaagccaatgggaaacagttttgctctaggccccgtctgtgtggtctaatctaatccttggtcttttccccccttccctttcatattgccctttgttagaaattgaatgtaaaaggattagaatgttgttttattcgttgcaagagtaaggttaaataaggaggcaggatggcctgccggtcccgtaatctgaagctgctaatttgtaagcctatagtttggatttgcacattctatttgttatactttttatgtatccatgaatagaaaattacgcctcgaaattccaaatttgtaataaatccgagagaccacatatttttttagtgtgactggttggtagcgacggtcttggcgtcttgcatagttgctgacacagaaaagacacctccgtccctctgtctggtacagtgagggtggggcatcaaaaacacaaagatgctgttcttatcaggcacagatgtttgccaagtataattccacgttgcgctatacagtcgggtttgctcgtatgcatttatgatctagatactta

SEQ ID NO: 24423 - DNA, 1994 bp, Zea Mays
caagttttgaaggcaagtttccagacagaatcaaacagctaccgttggaccgacatttcgatctcaacaatgtcaaaagggttcatcgtgtattgttagacatagtcaatgcctccgcaaatgccacaccaggactcggaaggtatcctccattcaagcgtgaggttgttgcaatagcatcaaatgcattggataccttcaaaaatgatgccaaaaagatggtcgtcgcgcttgttgatatggaacgtgcctttgttcctccccaacatttcatccgcttggtgcaaagaagaatggaaaggcagcgtcgagaggatgagttaagaaaccgatcttctaagaaaacacaggaagctgaacagtcaacatctaagagggccttcagtccccaaacagatgctgagcaaggtggtggcagcttaaaatcaatgaaagacaaatctggccagcaagataaagacgcaaaagagggatcgaatttgcaggttgctggtcctgctggtgaaattactgcaggttacctcttaaagaaaagcgcaaaaactaatgggtggagtaaaaggtggtttgttcttaatgagaagagtggaaagcttgggtacacagagaaacaagaggagagacattttcgtggtgtcatcactcttgaggagtgcaaccttgaggaggtagaggaggaagaaccatctaaaagctcaaaagactcaaaaaaggcaaatggatcagaaaaacccccaagtcttgtatttaagattactaacagggttgcatacaaaacagtcttaaaagctcacagtgctgttctgttaaaggctgagagcatgcctgacaaggttgagtgggtgaataagatcaaagctgttattcagagcaaagggggttctttcaagggtccaagtactgagggtggttcaatgaagcaaagcaattcggatggcgctttagatgctatggcgcggagaccagctgatcctgaagaagaacttagatggatgtctcaagaagttcgtggttatgttgaggctgttttgaatagtctggcagcaaatgttccgaaggctattgtgctgtgccaagtggagaaagcaaaggaagacatgcttaaccagctatacagctcgataagcgggcaaagcaacgctaagattgaagagcttcttcaagaggatcataatgctaagcgcagaagggagaagtaccaaaaacaatcatctctcctgtcaaaacttactcgtcaactcagtatccatgacaacagggcatctgtttcctcgtattctaatgacagcactgaagttgagagccctcgaacaccaagccgctcaggtgaggactggaggtctgcctttgattcatcttcaaatgggcctgttgctacaagcacaaacagtgaatcaaggtcgagaagtgctgatggtcgcagccggcgctatgagaacggggatgtgagctcaggtgccaactctggcagccggcgcacaccgaaccggttgccaccagcaccgccaaaatactaatcgtgctgattggtattcatgaacattatgtattcttgcctggcacacgccccttgcttgtcatatgggttattggagcgtatttcagatcggccgctagagattgtgttgtagtggagtctggtgattgcgtgaacattgtgttcgcaggtcgctgcgactcagatgagttgtttatagaaatatataggtaaccatggtctctatctttactgtttattatctccgcacatttcctggccctggtgccgtccctgccataggattttgttcgggcgatcgatcttgctttcgcacttggtcgttctgggacggcggctgtcagactaaaagatttatgttgcccctcccgcgcatattgttcggtaaccctgatgatccttactagtggatggggcgcgctcgatgttgaaatgtggttgtagattatagaatcttctatgacctttggagaggaatttgtaagatatatcccat

SEQ ID NO: 24424 - DNA, 3287 bp, Zea Mays
tctgtggatgctgtgtcatctattcagttatctctcagctattgcccaaagaaggccttcattttatggacgcatattgccagttttactttccttggatccagcaagttctattattaaattgagagtcccgggcgcattccatgccttgaagagtgccttctctgcatgcctgaaatgcacacattcaagtgctgagccgtggcgagcacgcctattggaagctcaaaatattatcaaccaagggggttcaatagaagatgcagcaaatgctgctaagaatttcggggacacttcaaacagggaagaatcgtggcctctgatggagagaagcactgacggtagtaacaagcgtagtctggctgaagacatgaatcatgtgacagaggatgatgtccactccactaaaagagccaggcaatcaattgatgctaatgaacatagtgaagaggcaaacaagacaaattttgagtcgatgtctgttgatatctcatctagccagcccagctctataagaactgggaattcagaagctgtgtatcaattaattggtatgtttgctgcactagctgcacaaggtgacagagcagctggatcactgcaaatcctttcatacagtatcgctagtgacttactagcggaggtggtaatggttaacatgcaacatctcccaatctctcgtcctgaagttgaccaacagcagcttccttctacgagctctggagatggacttccactttcaagtttctcctctctgctggggattctgctgaagggagcgaaccaaattgatcaagatgaagtgtctccagctaaagaacctgcgctggtgtcgtcagttgcagatgacagaatgatacttcctgctaattcacctgttcctagctcagtaaatctacctatcgaagagaacagtaacagtccaacagttccattatgtatagaaacaacagaggccaaagtaaccagtgcaggtggcaatagttcgattgatattccagaatcatcagaagcttcccatgcctcaacagagccccagggaacccaagagcatgctagcacttttgccggtccatttcctgctgataatttctcagttggatttagtttggcacaatcgtcagaaactcgcagcccaagctcttctacattggaagcaaaccactcacagctttcatcccttagttcacaatatgttcttccaaagttggttgtcaataatattgatctcagtgatgaggccaaagatctccttcaaaaagaggcgtttgtgcggattcttgagagtgataagaaagaagcatctggtggttcaattgctcgccttccgttgcttgctcacctgggtgttgagtttcctctggaatttgatccttgggtgattcttcaaaagcacattctctctgattatgcgaataatgaggggcacgagttgactatatgcatcctgaaccggctatatcatgaggcagagcaggatcacgatttcctttcatctagaactgctacatcagtttacgaatcctttcttctaaacatagctgaaaatcttcgagacatgtttccagcttcagataagtcacttggcaaattgctttgtgagataccatacttaccagaaggtgtgctgaaactgcttgaaagtttatgttctcctggaagtaatgagaggcaggacaaggatattcagagtggtgatagggtaactcaaggtctcagtgctgtctggaaccttatcatgctaagaccttcaaatcgggacagatgtctggagattgctttgcagagttcaactcatcatctagaggaggtccgcatgaaggcaatacgtttggtggcaaataagttatttcctatgacaagcatttccaaaaagattgaagattttgcaaatgaaaaacttaattcagtgctggaaatgactccatctggtgattgtgtaactactgaaatggctacacctgaagcacacaaagatattggtttagaaaacttaacagcttcagtaacaggcatgcagactctgatgtctctatactttgcattgtgcaccaagaaacattcccttctcagacatgtatttgcaatatatggtaatctaccgcaagctgccaagcagttcatcaacaagtaccaattctgatacgcactataggctcctcctctgatcttcttggaatcatctcagatccaccagctgactgccgggacctcctcatgcaggtcctgcctgtgttccccagtattgttaatcttccaatagacaagtttcaaagtgccatttcccgaatcttgcagggatcacctcggaatggcccttcacttgatccatcagaaattttaattgcaattcatgtaatagctcctgataaggaaggaataccactcaaaaaggttatggatgcatgctcttcttgctttgagcaaagaacaatatttacccagcaagttctggcaaaagcactaaatcaactggttgaacagattcctcttcctttgctattcatgaggactgtcatgcaagcaataggtgtttttcctgcattggtggattttgtgatggagatcatgtcacgccttgtgagcaagcagatttggaaatatcccaagttatgggtaggatttctgaagtgtgctatcttgacaaaacctcagtcatatggtgtgttgctgcagttaccagctcctcaacttgagaatgccttgagtaagaacccgacactgaagacgcccttggctgagcatgccgagcagccaaatattcggtcgacacttccaaggtctactttggtggttctgggtcttgctgaagatcaaccacagcaaccagcagtaacacaggtgcagagcagccaaaaccaggctgcggaaaccagtagctctgctgctgatacggctacagaagtaactcaggaatcttctggtgctagctaacatcttttatgccgaaatgggctaatgcttgcaggattggctggatggcagagtagatacttcagataatgaagccggtgaagttcttaaagaaaggtcaatgagtcgatgaaagtgggttcaatataggccaatttgatgaacacaggcattgaattatactagattaggctgctgaatagcgtaatacctacatccatttaggtgtgttttcttgttagcgtgctattgtaatgtctatattgtaatgggtctcgacccaccaaactttgttatattaatgcactcccaatcttgattaggattagggttttcaatatgttataaagctagattctctcttccccctttca

SEQ ID NO: 24425 - DNA, 1818 bp, Zea Mays
accatgtccatgaggcggagtgcatgagccaaatgcccagcgccgtgcccgtgcgtgccgacgcacgcagccacctccggcctcccttcgcataaacacccctcccccgaccgacccttcccactgtctctgctcggccgctctccctcccctttccatcgtctccccctcccactcgtcgtgttcctcatcctcctgctggtaggtagcagcagcggcagcagtagcagccagggaggcggtactgattgggtggtaggtaggtggaggccgcggccgccagggatggtggccgtcggcggtgtgcggcggaagcgggcgtggcggtgggccatgcgggcggtggccagcgccgtcgtgtggaccgcggtcgtgcaggtcgcctccatcgccgggctgttccgcccgcgggtcgtcgccgactgcggcgggaaaggcggcggcggcgccgcggccgggctcgccgctctcgccggcgaggacagcgccgccgcgaggctgtcgccgccggcgctcgtgcccaagagaatttacaagagcaacggctatctacgagtgacttgcaatggtggcctcaaccaaatgcgagccgggatatgcgatatggttactatagcacgccatctaaatctaacgcttgtggtccctgaattggacaaaaggtcgttttgggctgacccaagtgattttggagatatttttgacgtggaccacttcattaattccttgagagatgagctgatgatagttaaagagctgcctttgaaactccagttaataagaactaagaagagactgtactccatgtctcctgtcagctggtcgaatgaaacatactacctaaagcggatactacctcttgcaaggaagcacaaagtaatccatttcgataaatcagacgcccgccttgcaaacaacggccttccagttcagctccagatgctgcgttgccgtgtaaacttcgatgctttgagattcaccccacagattgaggcccttggcagacagcttatctccactctccagagaagcgggcaattcgttgtgcttcacctgcgctatgagatggacatgctctccttttcaggctgcacgcatggctgctctactgaagaagctgaggagctcactagaatgagatatgcttatccatggtggaaagaaaaagagattggttctgaagcgaagaggcttcagggactttgcccccctcacgccagaggagattactctagtgcttaaagctctagggttcacaaaggacacgctgatctacattgcttctggtgagatctatggcggcgaaaggcgcttggcagtgctcaaggctgcgtaccctaaactagtaaggaaggagaagattctatctcctgatgaactgcggccgttccagaaccattcgacccagatggcagcgctggattacatggtctctctagcgagcgatattttcattcccagctatgacggaaatatggcaagggttgttgaaggtcaccgcaggtatatgggtttccgcaagaccattgctttggacagaaagaagctcgttgagctcttggaccttttccaaggacgcgctctatcttgggacgagttctcaggcgcagtgaaggaggcgcacaagagccgcacggggcaacctacggatagaaaggccatccctggccagcccaaggaagaggactatttctacgctaaccctcaggaatgccttggctctagtatcctgacagctcgtcctgggaacccgttgccaatgaataatggcgcctcgacgactgtagtatagcctgggtttgtcgacaccgtcacttc

SEQ ID NO: 24426 - DNA, 325 bp, Zea Mays
cggttgaaaacaaactttgcatgccattcatgtggcgttctcccatagccagaattgctagggctcggtgtccgaccactatccggtgcggcggtgcctccgatcaggtcatagggcaccagccaccgcgtacatccactcctccattcctcaacggaagtttctagaagaggtgacaacgaacctgctcttatgttgtcgtaaaggtcatcggcacccaactgcctacgacatcgttgttgctgctcctgcatgcacaagagtcgggccgatggcctctacctccgatctgtgccctctcctcttgccacaaagctaacgtatg

SEQ ID NO: 24427 - DNA, 3321 bp, Zea Mays
actctgctctccttttcccctttctccgttcacctttctctcttcctttttctttcccctccctctccctttctttcctcctggcgacgactgggcgagtgccgccgaacttcgccaggtcttcaccggcgacgagcacctacaaggtgacactattccttttcttcacttggtgtataatctctctttgctccgatcaagcttttcaaacataataagcaaatagtctctgcacgtgattgccaaaattagtcaagacgggtgctctttgctgcgtggccgctaggccacatgggacaaagtctgaccctgctagcagagatcgttctatggatcctactgagcctcgttggcgcataaattcgagcttttctcctccaacgtcaaggaggtgggattgccgctattcatcagatggattgccccacagagttcatgatgctcctcatgatcacccgccatatgtttcatcactatcatcccatagcaaaggaagcagaagtgcatttggcagtgatcagtacctcaatcatcatcattctgcatctgatggagcactttcttactttgggagtccagctgacagccttcaggccccacgctggacaccctctcttcaaagatttgatctcggtgaattctctacccctgcaggagaattccgacttgtgagttagactgaatttgggcttctattggaaataatgacacagtgtgccaacttatttcgattggaaaaatataatatcttcctcgtttagtcaatcttctacaattttgtaatctatggctaaagtaaatttgattctttacagacatgccttcccattgcattatcagtgggggattgtaaagttagaatttggttcttgattaacaacttgtatagctgctattaattaccagctttttcctactgaactttcatggtgagcactcttataatcttttctattagacgtgttattattttcatatatgatatatgctctgttactcagcgtgcattcagttgtatatggtttagacatgattatgttttgttaggttttcattgggtttaacaatatttgagcccaaataataataggattcattattgtatctttatgattttcgttatttattacttctaagattaagttggttcaatacaaacatagctttacattgcataatcaatggggaacttgtaatctgttttgtttggccagttcattggttgattttacattgtattctttgcgttaagacttactccctctattctagttgttttagttttttgttctaagtcaaacttttactttgaccaagtttgtagaaaaagatattaatatctccagtacctaataaatgtattatcaagagatttcatggtggatctaatgaaactaatttgacgatgtagatattgatacacttttctataaactttgttaaagttagataagtctgacttaagacaaaactaaaacgacctataatggagggatttactactaggattttatggtcatgcactctagttgcttataatgtttccattgggttggatcttggtattacttttcatacattatatgcactgttagtataaacattgctcaaagtgtgccttgttctattttgcacaaattgagcaatatttatgcccaaagaagccttaggcccctgtgaatcaaacaaatgtatctggaatcggaatcatcttaggtgtgataattgacaagtatattgagaccaaaaagattagtctcaacttttcttctaactgaatctactggtagtgttattttcttcattgtaaacactggggttggcattaatggcatgcaagtcaaagactgctacgccacaatttttcttcgtttttgtgactactagatgtcttcctataatcctacacaattgtagaagcaactgagacattcatgtgtttctcgtattcctttgatatcttcctgttgtattgtattaaccgttgctttactcattgaaccaggatcaagaccagaaacttctgattatcctcagtcaagtgagaggccactgactgccacaagcagtttcagttctgcatccccattttcggaatcaagccaactagcttcgtctagtaaacaagcggccccatatctacctcgcaaccatatgggcaggcggtctttcatgtctaaaccagtgtacccacttgtcttccggaaccctgtgtccgaatcagaagcgtgcaggatgcttgaggttagtaatgccgggcgagcgacaccaagtgatgacagccaggcttctcctctgtggcgtcgcagcttggcgagcccagagctcaagttccataacgcactgaacgaacttgggaagatggaggtttcacctgaacggaacacgagctcaagaagggaagggttcagatggagcaatgccagcagttatgattttggatacgatggagatgccattgacatgtcagatcatatcagtatcgagtcccagagatcacccacaagctcagtgaggttcctgaaatgtgggctctgcgagagattcctgtgccagaaatcaccctggacctcgaaccggattgttcgaaacgccgatatgccagtagcagcggttcttcattgccgacatgtcttccatgcggattgcttggaggagggcactcccaagacagaagtccatgaaccaccctgtccgctgtgcacggcacccactgacgacgaagcacatgtgtcattctcggaacctctgcatgttgccctccgatctgctcgcaggaacctttcgctgggcagtggcgctggagggagtaacagcagtggcgcgaggcctccttgcagtgaccgtggcctgaagaggaaccattctgctatcgtgccgagacgcggcggcggcggctcgttgttccgcaaccgcttcaagaggcagttccccttcaaggctaggatcgggaaggagctctttggcggcagggttttcagcaaggtcgggtcgtcttcaggtcaacaggatgaccatcgacagcaagcgccgaagcgtgatcggctcatgaagtagctagagaacttagtggcacggagtatatgttgtgtgccctcctgatattctatccgtgccatcagttatcatgtctagtgtaacctataacagcatgcgaaacttggcatccatgcgcagtagtcgtccaagacgggggctctgtatatggaggctgcctgcattgcatgtagcacccaccgttggctaactatgaggtgtattttggatccttgcagtaagaatctcagaatctatgccctatgattactatgttctgcttga

SEQ ID NO: 24428 - DNA, 1380 bp, Zea Mays
gcgtcacaaaggatccgtgaagcccttcaaagtctctccctccccctcgtgtacgacgcaaaggggagcaccgcaatccggcccgccaacggcgtgcctccacctcggccagccgccgccacgtcagcgcgtgatcggggaaaagcggcctggccaccatgcttctcgcggtctcgccgcggtcgcgggctttccctcgctgctccaaacagtcgtccaggacagccccggatcccgtgacaaaagaagcgtcgccaattcgccatggcccgtggccagcggcggcggaggcggcggaggccggagccgcgggcgagggccagtggcaaggggaagaaggccaggtacctgagcctcagcgacctcatggttaaggcggaggtgggagcgacgccgccgcggtccgggtgcgaggaggcgggcgtgaagcctgaggaggaggacgcccgcggcgacgggcagcagcggcaggtggagccgttcgcgccgcaccaccaccacgaggcgtccaccctgttcgaggccctgccggcgccttcgctctccgacatcctcggcccgtcgccgtcgccgtcgcccgacggggccggctccggggcctcggggctcccgggcgccgacgaggaggacctgccgcgccgcgcgctgcggggcagggagcgctgggtgtactgcagcggcgactcctcgttctcgccggcgtccacgccgcccgccaccgccacggccaccacgtcgtcgccgtcgccgccgtgctcgtcgtccgccgcgagcacgggcgcgtcggcgcgctcgctgctgctcaagctggattacgaggagatcctcgcggcctgggcggaccgggggccgctctacatcggcgccggcagcgacctgcaactcgacgcagcgcaggtggcttcggggagggcggagagggtgaggcggtacaaggagaagcggcggaggcggctcttcgcgaagcggatccgctacgaggttcgccgggccaatgccgtcaagcggccgcggttcaagggccgtttcatcaaggaggaggacgacgaaggcgagctccggcctacacagcctgcctccttcagtttgcttcttccatcatcgccagcctcgtccccgtgtgtatcactgcatggcaaaagaactcgatagctagctgcgatacgtacatgtatcttgtaaaacagtaaccaggaaaaaaaaagaaattgctacagccatggtctgggatttcgaggtccattgatgggaggcatctttgatgactcattgctttctccgtaacaagggctcattgttactcgttgttggtctcttccctttgcgttgagcttgtgtcctatactcctatcacagtcaatagaacgtcgtgaattgaca

SEQ ID NO: 24429 - DNA, 2353 bp, Zea Mays
cactttctagtttcctttctcctcctccagccctccttaaaaaatcggccacggttatttatttctctcgccccgctccgctttcctaatctgcgagctggggggagatcgagaccctagaacggagggcgggtgtgcggcgctgagggccttagacgaatggcggtggaggagaccgcggagagctgcggcagccacgccgcgaccgctgcgtccggcggcggcgcggcggggcccgcgacgtcctcgtcatcggccgccgcggcggcgcaggcgcggaagcagcaacagcagcagcgccataagctcgaggtgtacacggaggttcttcggcgcctccacgacgccggcctgcccgacgcgcgggcgcccgggttcgacgacgagctctggaatcacttcaaccgcctccctgcccgctacgccatggatgtgaacgtggagagggcggaggacgtgctcacgcacaagcggctcctggagcaggccaaggatccggctcatcgcccggctttcgcggtgcggtccgtgcaggggaggaagtcgcttcaagactgttgaacaggcagcaaagcatatatcctcctcctgccttcggttcttctacaaatcttgaggcccttgctcttgaagctagcaagtctcatgatcacgatagcacttctgataatggccgatctctatacaggcccatgcatgaaatcaccttttcaaccattgacaagccaaaacttctcagtgagctgacatctctgcttggtgagcttggtctaaacattcaagaagcacatgcattttcaacaaatgatggctactcacttgatgtcttcgttgttgtcggttggcatgatgaggaaacagaggatttagtagaagcagtgcagaaggaaattggcaggattgaagagacacaagcatggtcttcatctcattcatggtctactccagttgaaaaaatgcagattgctgagaattcagcagctgaccgtgttgagataccaacagatggtgctagtgaatgggaaattgatgtaaagcttctcaagtttgggaataaagtagcatcaggatcatatggtgacctttaccggggtacatattgcagtcaagatgttgctattaaagtgctgaaacctgagagaataaatgcagacatgcaacgagaatttgctcaggaagtatatattatgaggaaggtccgtcacaagaatgttgtgcaatttattggggcttgcactaaacccccaaacctatgtatagtcacagaatttatgtccggtggaagtgtgtatgattacctccataaacataaaggtgttttcaaacttcctgctttagttggagttgcaacggatgtgtcaaaaggcatgagctacttacaccagaataatattattcatcgtgatttgaaaactgcaaaccttctgatggatgaaaatgggactgttaaagttgctgattttggtgttgcacgtgttaaagctcaatctggagttatgactgcagaaactggtacttaccgttggatggccccagaggtcattgagcacaaaccctatgatcacaaggctgatgtttttagttttggaattttgatgtgggaactactcacagggaagattccttatgagtacctgactccactacaagccgctgttggtgtggtgcagaagggattacggcctacaattccaaagcatactcacgcaaagctttccgagcttcttcagaaatgctggcagcaggaccctacccaaagaccagacttctccgaaatattagaaactcttcagagaatagcagaggaggtcggagaggagcacgatgggaagcacaaggacagaacactgggtggtttcttttcggctttgagggggcggagccattgagacacagtcgaagacttttaataataaaaatgtacatggcctcggtccgtcctttgaaggacctgagctacaaccagtgcagtgcctgttcctcgcacgtcagcaccagtacacagaaatacagacctgctgtgcagctgcagttgactgaagcggcaatttttatttagctgcagccatcgctttccgcatatccgcttgttattcctgagttccattacgcaatgtataacataggtgaggaagcttgggaactgtatcatcagtctgatttccctgggagtgcaatcctgctgtagatgaaaaaaaaagccagattcaggccgtggcatgattcttttaagactccatcatttagcatcttttcgtttatggcagcgcggcgagcttgagtagctgaacaacagaacaaggcacctgcatctgcatgggttctgctcgcttgtgccaatttttgttcccca

SEQ ID NO: 24430 - DNA, 4489 bp, Zea Mays
acaacatctccactcccccacccacccacgccgctccacccctctcgttttcactgcccagagaccaccaaaggaaaaaaaggggactcgctctcgccaactcccctgctccacagccacaagcccactcggatcccaatccgagccctactcgtcgtcgacgacgcgacggccccgcgtgcgaagccagccagccagccagccagccatcgccgtggaccggggagcccggagggatggaccccgagaagcgcggctacgagctccaaaattttgtggcgcatgatgcggaagttaggtccctgtctattggcaaaaagtctaggcgtgtgttcatcaccggtggcaatgatcgcaaggtcaaactgtgggccattggcaagcaaactccacttctgaccttgtccggccacacaagtgcggtggaggctgtgcagtttgattcagcagaggtgcttgtgcttgctggctcgtcaaatggttccatcaagctctgggacttggaagaagctaaagttgtgcggtctctcactgggcacaggtcaagttgcactgctgttgaattccatccatttggcgagttttttgcatctggttcgtcagatacagacctgaagatatgggacataaagaaaaaaggatacatacacacatataagggtcacagaggagcaattaaaacaatcaggtttacgcctgatggacgatgggttgtcactggtggggaagataacattgtgaaggtgtgggatttgacagctggaaagcttctacatgatttcaagttccatagtggacaaatcaactgtattgattttcaccctcaagaatttttgcttgcaacaggctctgctgataggacagtgaaattttgggatcttgaaacttttgaattgataggttcttctggacctgaggtattgcaagtttttttcttaaatcaagctggatctggttatgaaatcgataatttgaagaccacaaactatggcttctcaaattctttagcatgcatgttctataggcatggtaactacagtacattcttgctgtggccttgtattaatatctttgtctttcttataaatcgtaactgtaagaactttctcagaggaatttagctcgcatttccctacagctgattcagttttataagagttatggtctgacatctagcctgagcttcacgtatgtgttgttccctgttttttaaccgttgctctaaaagcacatgaggagaacatccatcttcctcttctgtgatagcttacatgactcctctctccagggtaccggtgtacgttctatggtctttcacccagatggtaaaacccttttctgtggattagaccaaagcttaaaggtaggtcgtattctgatcaatgatttcaagtcgcctggtcgcctggtcgatccctgggaccgaccaggcgactagtcgcgattaggcgactagtcgcgattaggcgacgactagggcgattagtcgactcctagtcgttccctggtcgtcctagtctagtagttatacttatatagctatatatataaatgtacatgtatgcaactacattatataaattagaaagtcactacttagcacaggcttaggattagggcagccagcaaccatccactaatttggcagaactgcagagaagggggagatggggcagagcatgaggaaccttgagatgacgagctcatctcctcaatggtgcaggtctgctggagcttgggaaggggcagggtggagactgcagctggtgaaccttaagacagtctccgcatgtggagactgtagcaggcgagcatgggaaggggcagggtggtgtagccgctgatgatgtagccgtcggtgagctgtaggtctgaaggggcagccaccggcgaccaagtgtgaataagggctggaacagtcgagctagcaagagaggagagtaggagacgtagtgcactgtttggcggctaggtattacagaggagaggagagggtagtctaaagtatactgtagatgggttgaaaatggcccaataacaaaaccctagccaggacgaccaggaaacagtaatcgggcgattagtcgccctaatcggcgattagtcggccgaccagcctatctagtcgagtcgtccagctaatcgagcccaaatagccgaccagcccgactaatcgcgacttaatcgcgattagtcggacgacttgaaatcattgattctgataggttcttgattgatatttatttgcttggtacttgagaacatgaatatttccaggtattctcttgggaaccagtaaggtgccatgatgttgttgacatgggttggagtaatttggctgaccttagtatttatgaagggaaactcttgggatgctcctaccatgagtgccgtgttggtctatgggctgctgatatatcactcattggaccctatgctcttggtgtattgcccaaagcgaatttttttgctgagcttgtgcagtctatggaagataatcctgtgaaaccagttgatagcactgcaaattctcgtcctgcttcagcaatggcacattcaagaagttcatacaaaatcaaggagtctgggattgctcaaagcagggttcgtggctcacatttgactccagcaagtacagataagaccaagaaagataggagcagcactattccacgaagacctgattcgtctttaaagtcatctgttcagagtactaccctgatgaggcgtatgaagcttgttgatagtccttccaccaacacaaaaaatgtggaacgtaatgttgggcagagagacatttcattagcgtctcgtgcagtgatggctaataattctgcaactgctaagaaaagcaatcttacagaatcagctttagtgaaagatatttacactacatctcaggctgtttcagcacctattgttgtgcccagagacattttagaggacaaaacagtaagcaatgttcgtcgagggactggagagacagctgcagtcccagatgattttcggatccctgttcacagaagaaaaccctcacttagtggcagtgctgctgatagtgatagctcatcaagatcagtgttcactgaacctgatgtttgctcagagggtttgtctagcttaaaattctcctttgggctaactccatatcacaagaaagaagaatttggcgatgtggataatgaaggtattgcacaaatagcagaaaagatggaaagaacagtgtcgctggaccattctcagcagttaaatgatgataaatcctttgaatcaccatgctcaacaacagagactgccaaggtcaaatatgttagaggagttgctgtgccactggggaaaacaaagtctcttgttgagagatgggaaaaaagagagacttctagcactgattattcaccacaaactggttcttgtggtgatcgggcatcgagaaatgacaaccatccattccatctggcggaaccaagtacaacatttgaaaaggacctgtcaactgtagatgaagcgatggctcctgtcaatttagtgcggaaccatgatgaattcctaaatgctgtaaaacttcggctgacaaaactagagatgatgcggcatgtctttgaacaaagtggtattaaaggagcaattgctgcagtggcaaagctacctgacaatgctgttcaagcagatgttgttagtgctctcaaaggaaagcttgatcttttcaacctggaatttttctcaaattttctgcctgttcttgctgggttactgtgtagcaagactgaaaggcatgctatggtctctttggaaatgttgttggatcttataaagatttttggaccagtaattcattcagcattatcagcaaatttaggcgttggagttgacattcaggctgagcagaggttgcaacgttgttcacggtgctttaaccatttgcaaaagatccaacagagtctgaatccattgattctgcggggtggtcaaacagcacaacttgcacaagaactaagtctttcattgcaagatttggtggtgatctaggcaagatgatgtacaatgtatacgacagagtagataccattggttttggcgaaaagtgcccacagttgtgtagcttgtaattttgtcatagctttgcaagtgggttttgcaactgtgttttaacattgggctggcattcagcctggtcccctgttgtaaatgtgagcctagccgtgaatgagtctgtaattagccagccacatctgctgtgtgagcagccctgaacaaaaagactagttgaaaggaaacaaccgcaaaggggatcattttggttacaccccaggtggtaggatggctcatgtagcatgcggtgattggcaattccattctttgaaagcatctgtgtttaacgtatattttgtagaagtaaattgagttatgccatagtaacgatgactgattgggctaatatgccttttgtttcttcaactgaccaagaatactaagagtcggctagttttaa

SEQ ID NO: 24431 - DNA, 3743 bp, Zea Mays
gcagtagccagtccagtgaacacaacgcagcgcagagcagaaaagggccaggaagccaccaaaacctgatccttaactgccctccgaacgccaactcatcccctcccccatcctcccctgccatcctcgacgccacgccatctctctctctgccctgccttgcgttgtcttggtcggtttcgtttcgatcccgctcctgaacagtacgtcggcaacttggagggggcgctgcctgcttcttcttcctcccgtgaagggaaggcggggtagccgatctcggcccgagttgatccggttgcgggggcttttctctcgcgtggtcctccagcgcgccgcgccgcgccgtgaatcgacaaccggccaccatgttcgtcaagaagctcgtggagagggcctccaagaagcaacatatcggcagcatcagctcccttcgccccgagaacgtcagcccgcggctagccttccactacggcgtccctgcggacgccgccctccttgcctacgaccccgttctccacgtgctcgccgtcgccaccaggaatggacagatcaagctgttcggccgcgacaacacgcaggcgttgctccagtccccctcccctctcccttccaggttcttgcagtttgccgagggccaaggggttctgctcaatgtcaatacccagaaccagatcgaggtttgggacattgatgcgaaaaaactctgttatctgcacccggctgaaaaggcgatcactgcattctctgtgctgcagaagagcttctacatatatgttggagatagttctggaagtgtgtccccattgaagcttgatttggctcagagatgtctagctgacctgccgtactggattccttttactgaatcttatggttccactaccagtgccggtaatgatgtggaagtagtatttgtttcaccccagcctttgtctgaatcgaacagggtgctcattatcttcagagatggggttatgagtttgtgggatattaaagctagcaaagcagtatccatatctggtaaaactacgcagcagcaatcacagaaggaggctaaaaatgtaacatcagcatgctgggtttgtgccaagggaagcaaaattgctatcggatacgataatggcgatttatacatttgggccattcctgaggttacaagtacacaaaattcctcatctatgggtggccagaatctacctattcagaggcttaacctaggatacaagctagacaagttgccaatagtctctttgcaatggatccctagcgatggaaaggcaggccgtttgtatatcaatggtttcaatgatcatggacacctatttcaggttctgattctgaatgaagagagtgagtcgcgaattgtaaagatggttttgcctatcgctgaatcttgccaaggaatggaacttgttacagggcttagtgacccaaataagcacagacaaagtgcccttgcactcttgttgaaatctggtcacatctgtttatatgatgattcagaaattgagcgctatctccttcactctcagtctagatcccctccaacacttccaaactgttcatatgtgaagcttccttatggtgattcaggcatcagtgttgcaaagttctatacaagtaaccctgcagcgttagcttctttggacgaggattatttttcatcagctaccaaatatccatgtctgttttcaatgaagggtaaaggtcagactttaacaagttttaccaacattcataagacccggaacctctatataactggacatctagatggaaccataagcttttgggatgcatcttgtcctcatttgctgcagatttttatgataaagcagcagaataaagacgatacatcaactggtaaccctatcacatcattacagtttgatatgtcctctagcattctattgtctggagaaaggagtggaatggtccatattatcacattcaaaaaggactccagcgacaacatattctcctttttaaatgcaaagcaaggagacaactatgatgtcagaagtataaagctcaaaggtgctgtaaccacaatgtcttctatctcaaaatcaaagcattttgctgttgggacagaaaaaggaattgtatcagttatcaacgtagaagatgctacaatattatatcaagaacagtttgagtgtcgactgcctggtggaatcgcctctttgcaatttgaaatctatagccataatggatatgacaaggacattttgataatagcgatggaagattcatctatttttgttatcgaggaagaaacggggaaacttttgaaccccaacccagttcagacagacaaaccctctaaagccatccttctgcagatgttggagttatcgcccattgacacaccagcagtttcagataaccaagatacagtatcgaaggaatcattgctgctactttgcactgaaaatgcgatccgtttgttttccttgggccacgcaattcagggcacaaagaagataatcaataagaagaaattgagcagctgttgttgtttcgcctctcttattcatagttcttctaatgacattggacttatactcgtcttctccaatgggaaacttgaaataagatccctgccagacttgtccttgttgaaggatgcctttttacgaggttttgtgtactcaagaaacttgaattcaagtagttccataacatgttcatctgatggagaagccatcttgattaatggagaagagacctattttttctctacgctctgccaggatgagatatacaggcacgtagacagcattagtacagtgtacagaaaagagaactcaaccagggaagactcttcttttgtagtgaaatctcctaaagaaaagaaaaagggtctgtttggaatgattatgaaagataacaaaggaagcaaatcaaaagaaagtgatgcaattggcagcgaacaatgtattgcaacgacttctgaagagctggcttcaatattttcatcaactaactttgctccgccatctgagggaaggaacagttcactacgagatgatgaaaatgccgagctggacatagatgatatcgacattgatgacaacccacagaagccaaaaggtccacatttccctggtctaagcaaagataaaatcagcaagggactccaaacccttaaaggaaagttgaagcccaagactgaagaaaagataagctcgggaaacaaaaaaactgaagatgaaacatcagtgagtcaagtcgatcagataaagatgaagtatggatatgcaaatacaacaaatgatgactcaaccagtgtcacaaaaatgattgggaacaagctgcaggaaaacatgaaaaagttggagaaatatagaatgcttgctactgtcacctgataaaagaagcaacagacggacagttaacgtggaccagtgtgctttcttcagggcattaaccttcgagctgccgatatggcgagcggcgcccagtcattctccacaatggcaaaagagctactccggacaacaaagaacgagaaggggacctcataatcacctacaccaatttcccctcctttggtaacagcagggacttcacatagttattttttgccgcggcaatgtcgactctaccgtctacactcgaatgaggattgataccaaatatttgttataaagaaaggtgttttcaaaggaggcccacaaagcttcatctaggaactcgacagtggagacgatagggatcattctggaaaggctaggacc

SEQ ID NO: 24432 - DNA, 158 bp, Zea Mays
cacttgaagaactttgtcttctcatttacatcagttctcctattgtttgcctgctaagatctatccagcacagtaatctagcgtctatttcttaacaagaaattcttttataaatttgcagtagcttacctgccttctttgcatctcgttcacttgtg

SEQ ID NO: 24433 - DNA, 340 bp, Zea Mays
ttaggtttcgagtgtgaaataaaaactataattgaagctatgaatgtcatggagttggatgatgatgttgggacttgagatcttcaagcaagcatggattgcttgcactatcttatgtcatttaaaaaccatcttttattgtaatagtctatcgtgttgaactgtcttgtgctatattagactcttgtgtgatgtgaacttattcctattatatttgaactaatgtatggtgtgaacttattgctatactgtgttggtctatgtaatgctattgtatgatgttaacttatttctatattattatgttggaccattgtgttgtatgatgtgaatttattgc

SEQ ID NO: 24434 - DNA, 2047 bp, Zea Mays
tccgccgccgttgacacctggcgaaatagatgagtcccctgtctccgtcaatcccacggatgagaaaagttaggggataagatgcagctgattagggatttcttcgtttgtggaaaaggaaagagagctaggacatgcatacagtgaaatcaaaggcttgaaggtgacggaagctctgaaggacaaggctattgctgagctgagcaaggaactaaagagacaggacgagaggatgagaagtatggagaaacaacttgagcagaagaatctagaagtgaaaagactaaataacgagcgtaaagaagcattgtctgcgcagttcgctgcagaggcgacacttagaaggatccactcttctcaaaaagatgaggaatcagttccattcgacgccatcatagcgcccttggagtcagacataagaaaatacagacatgagattgcagtgctacaagatgacaagaaggcactagaacgacatctaaagttgaaggaggtggcgcttgttgaagcaggcaacattttgcacaccgcgcttgaaagggcactcatagtagaggatgttcagaatcagaacattgaattgaagaagcatatggagatataccatgaagagaataaattgttagagaaggctaacagacagaaggtgctagaggttgagaagctcacacaaacaattaatgagcttgaagagtccattctcgcaaccggtgaggttgccaatgtggtccacttctaccagaatcaagctacaaagttgaatgaggaaaagaggacccttgagagggagctagctcgagcaaaggtttatgtcaatcgtgttgcatccacagcagcaaatgaatggaaagatgactctgacaagctcatgccagtcaagagatggctagaagaacgaaggctcctgcagggagaaatacagcgattgcgtgacaggataacagtagcagagaaatctgcaaagattgaagcccaacttaatgataaactcaaaaggaggctcaagtcgcttgaagaggatatgagaaataaaacatccaattcgtctacaaaagaaattaataaacaagccactcctaaaagatcattgtctcaaccaaaacaacctaaaacaatgagagtgttacctcaactatattcacctgaagtcgttgacaagagaaggcctatatctcaaccaagggcatcaatggtagggaaagtattgaagcaacctaattcagaaatcgagcctacaaagaaaagtacagttgttaagcgatttgatagccctggaaggagaacaatttctagtaaagaagagtgtcccatgaaaaatcaactatgggcatcaaaaaccaaaacagatgttattgttgggaaagagaacaaagtacaaaagccaaattccaaggcacgtttaaatgcttcacattcacaaggccatgtggacacaaaagtatttgatggaaatgatgaatatggacttcaaaatagtgaacatcatgaagccatggcaaatgagagaaatgggaatagctcgagtgatgaaagtagcccttagaacaacaagacaagttggagtgttggggtttacttttgcatgaagacacaaaatggaagcacaaataacattattatgtacagatgtagcatgacttattttaaaggaagcgtgtgcccatctacatctattttattctgcccgggagattgcttgaacaacaaaactagttgtggtgtcatcattttgttttgtctctttgttctctcatgtacatacaaactatacctcaaactttacaaatgtaattttgtgcgactattgaaaaaatcaatatgtgcttttttgaggaattggttactttataaaataaaaaggtgtctaatgtaatagaagcaacagagaaaaaagtgaagggtgtgaatcaataaaaccatggatgttgaatgttgatgtttctcgttagctttctcatttgtaaccatgtttgagtctgtcctatcctatttgcctgtctttgagttccatttaatataaagccacacaaatccaaatgtacaagag

SEQ ID NO: 24435 - DNA, 2952 bp, Zea Mays
tccttgaattcgattcgaggtgtgggactgccgaggaagccttcagaatttcattctgaagcgggcgggcaggcagtggatcccacattggaggagtccgacggggaggatattggtgttccggaagttggtatggtgttcaataatcacacagaagtcaaccgattctaccgccggtatgcccgccgtgttggctttggtgtctcagtaaggaggtcttcgttctcacgagaagggacctgcttatatctggagcttatgtgctgcaaaggagggaggccacgttatgagccgaagtttcggaaaagggcttcatcgaccactaactgcccagccaaagtacgagtgaagttgtggggagataaattgttgcatatagagttggcgatccttgatcataatcacccagtgagccctgcaatggcaaggtttttgaactcttataagcagctctctggccctgcaaagaggcggttgcgtatgggtggccctgggactatgcctgttgaagagtcaagcaagatgcccatggataagctgggggagcttgagcagcttctgtttggtgagagcaagcacaacagctttgtggagaggggtcgtttgaagctccaacctggagattcggaggcccttcggcttttcttcactcggatgcaggccaaaaatgccaacttttttaatgtcattgacctggacgatgaaggctgtaccaggaatgttttctgggcagatgcacggtctagagccatgtgtgagtactatagtgatgtcatcacacttgatacatcatatgtggctagtaaatatgatatgcctcttgcaacatttattggggtgaatcatcatggacaatctgtcttgatggggtgtgccctgctttctgatgaaacagcagaaacctattcatggctacttaagtcttggatagcatgtatgtacggcaatcttccaaaggctattgtcactgactattgtaggggcatccaaagtgctgtagctgagattattccgggagtccgtcatagaatgtgtttgtttcagataatgaggaaggccgcagaacgtttaggtgggctgtcagagtacagagctatcaacaaggcgatgcataaggctgtatatgattctttaaccattgatgagtttgaagaagaatggaatactttaattacatatagtgggcttcagagcaatgactggttaagatcactttatgaatgtcgatcttcatgggttcctgtttttattaaagatacattttgggcaggaatgtctactacacaaagaaatgaaacaatcactcctttttttgatggatatgttgatttgaaaactaccttgaaacaatttcttgtcaagtatgagatggctttgcagagtaaatatgagaaggaggcccaagcagattttgagacgtttcataagcaacgcccaccggtatcaaaattctatatggaagagcagctctcaaaagtatacacacataatatgttcaagaagttccaagatgagattgaagccataatgtactgccatgtatctttaattagtgttgatgggcctgtctctacattcaatgtcaaggagtgcattttctttgaagatggtaaaaggactatgagtaaaatttttgcagtgacatacaaagtggacgaaaagaatattagctgtatatgtggaggtttccaattcagtggcatactatgtaggcatagtctctcaatgctcaagtttcaactggttcgtgaaatcccacaacattatattcttgataggtggaagaaggattttcgacagttgcatgtgatgagacgccctccaagcgatcttgttcctaacaatcgcatggatcgatatgactatttatcaataagatgtttgcaacttgttgactctgcagtcctatcagataagtatcgccttgctttgaggttggtaagggagacagagaaatttctgctaaatagcaacacacatgatgatacacaaccaaggatcaagtctcgtgttcctaaagtaaataaaccaaatattgtgactggccaaaccatggtgggtgcagctactggaaatggaaatgatggtctcaaaggaccagaggctacagcagtcacgcaagtaccacaatcccaaaagggaggagcagaaaaaggaatagttcctactggctacattggagtaccagctaatctccaacaatttgtaggcaatcaaacagcatttcggccaagcattgtgtacatggtaccgagtggtgttgatccacatgcttttggaaatgttatgatgccagtgatgtaccagcagatgttccaggtgcctccgaagccaaatgagaccgtgcaggatacttcagccaatggaaaaagtaagcgacctcgcggtcagaagctcacagagacatcccaacaggcaaatggaaccccagcatctgcatctggctagggtggactactaacattttgaacaggatttctgtacatacgttgacttcgttgacttcatgccgtgagaaattttacatatggacgctggcactaacaattacctcaatgttgtccaaggtatctggcccaggaccggaaattatctctcgcacactttctttttgtgtgtggctgatttctgcaagacaggttccacctaatgtacaagtccccttgtcctttttatgctatgtaaatgaatgttcttggaacagctctatcatggctcatgagtacggtgtcagttgccttcgaattcccattgtcgataccagatcgatggctaatgcatatagaaatataaaggggacaaattatgattatatctttcttggcattgaagcgtgtcctgactggtcattgggtacttcggcaataatcagggcataccaaaggagagctctattggaagttttgttgttctctcggtattcagagcaaagctaatttattcaaaactaac

SEQ ID NO: 24436 - DNA, 3364 bp, Zea Mays
taaagtattgttgggcttcctaggaaatgaatgttcaactttaatggacttgcattttaagatttgacttgttcatgacatatccatactccatcattatcactgttgtttctaaacataattaaaatactgatattagacagtaactaattcttagttttattattatgcaaacataggaatgagctcaccttataatgagcagctgtatccgaagttttcatgtcgtcatcagtatgtcactgtagataccacagcaactttggactgaatatgcatggacttccaaagatgaaaattttgcatgtgcagtacatttttacttacgttcttaatttcttgcaagctagaatgattattcttattttaatctctgcatggagcagtgaggttcctaatattgttggttcttgctgtgtagaggctatgtgataatgatccaggggtaatgggtgcaactctatgccccctctatgacctgatttcggaggaaccaaattcgtacaaggatttggttgttagtttcgttaacatcctcaaacaagttgctgagaggaggcttccgacttcctacgattatcaccaaatgcctgcaccatttattcagtggtgataaacaagcaagtggacatatgtacactgtattgggcgacatattcaagaagggtgacactgcgagcaacattggcaatgctatactgtatgaatgcatatgctgcatttcatccattttcccaaaccctaagatgctagtggctgcagctgaaacaacatcaaagtttctgaagagtgatagtcataatcttaagtacatgggcattgatgctcttggcaggttaataaaaataaatccagatattgcagaagagcaccagctggctgtcattgattgcttagaggacccagatgacactttgaagcgcaagacatttgagcttctttataagatgacaaagtcaacaaatgttgaggtgattgttgataggatgattgagtacatgatcaacataactgatcatcattacaagacagaaattgcatcacgttgtgtcgaactcgcagagcaatttgcgcctagcaatcagtggttcatccagaccatgaacagagtttttgagcatgctggagatcttgtcaacatcagagtggcacacaatttgatgcggctaattgctgaaggctttggagatgaggacgaaggtgctgacagtcagctaagatcatcggctgtagattcttatgtccgcattgtcggagagccaaagcttccttcttctttccttcagataatatgctgggtgttgggggaatatggaacagcagatggaaaacattcggcttcttatattattgggaaattgtgtgatgtggcagaggcccacctcactgatgacactgtcaaggcgtatgcaatctcagcaattctgaagatatttgcgtttgaaatcgctcttggaaggaggattgatttgctgcctgagtgtcaaacattggtagatgaattgttagcttcacattcaacagacctgcagcaacgggcatacgagctacatgctttactaggcttgggcaaaaatgatgttgaaagtgttatgcctgcagatgcaagctgtgaagatattgaggtcgacagaaacctctcatttctagacagttatgtgcagcaagccttggaaaacggtgcatcaccttacattccagagagtgaacgctctggtcttacaagtgttggcagctacagaagccaagaacaacaggaaacatctgcccatactcttagattcgaggcctatgagatgcctaaaccttctttgccactagcaacttcacaaaccagcatgtccacaccaaatactgaccttgttccagtttcagagccaggctactataaggaagaccatcaaacatcaaggcctcaaccaccaagcgatgcggtttctggtgagtttggtgtcaaactccgccttgatggggttcaaaagaaatggggaaggtcaacatattcctcttccacaccctcaagctcgatgtccagtcaacaaacaacaaatggggcctctcattctgatgggggagggccaagttcacagccacgggagtcctcatacggttcgaagagacagcagggcacagaagtctcagcagaaaagcaacggctggctgcttcgctttttggttcggcagcagctagagctgacaggaaagcacaagcttctcgaaagacagggaaggacagtccctcaactgagaaagtagctaccactaatgtggctgcccagtctgttaaggagcaagtaatcccagctgctgcaccaccgcctgatctgctggatctgggtgacgagacagttccatcgagccgtccatcggctgaccctttctcacagttggtgggtcttcttggaccagcatctgctgctccggcgctttctgggactccggctaccactaccagtacttccaaagcaccagatcttatgtcaatcttctcagatgatgtaccaactggagtgactagtagtgggtccaccgatcccactccaggtgatgctatttcggtgagctcccacaaaggagcgacggcagtggcaccaaagaagggctcgagccttcaagatgccttgcaaaaggactcgactgcacggcaagtaggtgtgacaccgacagggaacaaccccaatcttttcaaggacttgctaggctaaaggggacagtaaggcacaccgtatgctccgcgtggcctctttgggtagatggagttcatctccgacatgtctcgatcactgaaacagcgatgatctcgctgtttgatcagcgtaggaaaagggttgcaacttgcaagggctatatttgttctcgagtcacaagacacgacctgtcctccttccagttgggaggggggttgcgctgttgagatctgtgaatggttgcgggtatttttcctttaacctcttgtgattttgtgctgagactattgtacatgtgtttacatgacgtgtaatctgtacatgagaccgtggtacagaagcgtgtgccggcgcatttttgttcagctgggctagatacactacaattgctgggcactggaaagtaaaacaatgaaagaattggtgtcattctctggctggaataaaaatataaaacggtaaatgtgtagtgttgtttattgttgatgaaaacagtcgcagatttgtttttgcaacttttaactgttgagaagtaatgcaattctttttttttcggttccattcaaacctacttgctgcgtagggccatggcccatggggcattcagtattttctctcataaaaaggtctactactattcttttctggttctatttagtcgagatcgttgtttttgt

SEQ ID NO: 24437 - DNA, 918 bp, Zea Mays
ccactaatcaataataataattatgaaattaattatttttgagtttactagcagataacaatgtgtattattactataaatatggcagtgttttttgaaactccaaaaacaaatgtaaaaaaagttaaattgctcagttaaaagataaaaagaaaactgaataggaagaatgataagagagaagataaaataatatttaaatatgaataaaaagtataaatagcggggctttgagagggggaatggtaggagatactataaggaaagttgatcgagaagtcttggtagacatggagcagatccagtactccgagaagtactacgacgacacctatgaatacaggcacgtcgtcctcccgcccgaggtcgccaagctcctccccaggaacatccttctctccgagtggcggttggtgggtgtgcagcagagccgcgggtgggtgcactacgcgatccaccggccggagccgcacatcatgctgttccgccgcccgatcaactaccagcagcagcaggaggaagcggctgccgcgcatgtgctgcccaagtgaagcctctgctggcgaccaggaatgttaaaaacccctagccctcttttcatctctaaaaggggcgtagctgttgtgttgattaatccctctggctgttagttggaaacttgggatctagttgggtcgacttggtgtgtgcgtggcgatctgtttgtgctgacatttaatctgtgcgatgtgatctttgtgattgtgattctggttagtagcgctggaatcaggtttaatctgttctatgtgagattaaaattgtcaccatgcatttcaaagttcaaacatgctgaggaagaaactatcctaggatcttggctgtcattgagggcgcaagatatcatttgacgatatggtacatctggatatgtggtag

SEQ ID NO: 24438 - DNA, 744 bp, Zea Mays
gctgtgccgtcgccaacatctcactgcaggggaagtatctcgacggcacgctccacctgccctcccatggatccgcccctggccggccactacctcaactacaacacgctctagcggcatccagcaggagctggctgcggatcccgcaaacggtgccaagaccgtgcgcaagccggtcttcaccaccgtcaaccagttgcgcccccagatgcatggccacactcttgtcgtctgcgtcgtctccgcccacaccatcatcgacaaatcttccatgcacattggtcgcacctgcatcgccaagtgcctcgtcggatacaacaccgacaccgtcctcatcacacccgcaacaattaggagcctgacggaggctaagggagaggaatcagtagagcaaatcagcaagatgagacagatgtgtagctgctggtgtttctccactatcgcgacctcactgctcaagcatggcctatatagagtgacgagaacaccatggaacggagttgtgctgttgtggtgcggagtaggagcgtctaagcgaggagagaatcacaggcgatttctctcattgttgttttggcgtcgtttctaattctatgttgaaacaaagtgtttgtctcattagggcgtgtctcctcgctttttctcgcataagaatccagtaaaaaggttctccaaataggctctttgactactacagttcatcgattcgattctcccatctatatcctttgtggttgcccatcc

SEQ ID NO: 24439 - DNA, 672 bp, Zea Mays
gaagaaagcaatctaacagagagtcagctaggagatcaaggctacgcaagcagcaagaatgtgaggaactagcgcagaaggtaactgacctgaccgtcgtcaacggcacgctcagatcagaactcgacgagcttaagaaggcctgtgaagacatggaagcagagaattcacagctaattggtgaactggagcagtccgaggcgcctagcgttgtgacgactctgagcatccagattgacacaacgaaggcgcatcatagaagcagtgaccagcatggtaataaaaacaacactggtagcaatgggtagtggtagttttggagtgtggcatccgtgagctaggctttttacctctaggtgaggcagaaagatgagatgaggtggttaatatttagctgcaccatcgcccatcgtcatcagtccttgttgttctccttggaacatcatctgtgccttctctttacctgctcacaagcaatctgataccaacagagtctacggcctgtgtatattagccatgtatgatgtgtatgcgagatgtgggcgaacgaactgctttgtaattatcagactaccagttgtgggcttgtgcctgcctgtacagcaatggttgaaaacgattgacagaaactagttcatttggtagcaataaaggtaccatatcagttatatt

SEQ ID NO: 24440 - DNA, 1849 bp, Zea Mays
gttctgttgagtttcagctttgagatttggattgtcacgtaattcgtttccctgtcctccccctctcgctgagctgagcccacctactccctcccaccacttgcattcacacactcgattccgctgctctctccctcttcctctcccccgcggcggagccataaaccctaggcctcgccgtcgtcggaggcgccgccgtgatgtcgcactttggaaggacgggtccgccggacatccgcgacaccttctcgctgctcgtcctcaacatcagcttccgaaccacggccgacgaccttttcccgctcttcgagcgctgcggcaaggtcgtcgacgtcttcatcccgagggaccgcaggaccggggactcgaggggttttgcgttcgtgcggtacaagtacgccgacgaggcgcagaaggctatagatcggctcgatggccgtaatgtggatgggaggaacatcatggtgcagtttgcaaaccacaaaggaagggtcaaagagggggttgagaaatcaagagacaggtcaaggagccgtagtccaaggccaagagacagagatgatagaaggcgaagtcgcagcaggagcaggagcagagaaaggcatgtccatgatagagatagggactatcgtcgtcggagcagaagtagaagccgaagtatgagttcaagccctgaccacaaaagtcatcgtagagcaagagatgatgttaagcgcaagagcagaagcaagagtagaagcaggagcaggagtagaagccgctcataccacagttcttcacctgcccggcgcagtgctagtcctcccaagagcccaccgccacagaggagccccactcctgaaaagcatgccaatggaaaagattcacctctgtcacgcagtgtatctccatcaccgaagcgtgcaagctcccgcagcccaggcagcgatagcaaggaataaagcttgttgatctggtgatgcttaaagagcagtcttcccatgggattgcagaacgttgagaaggctgtttgaacatgatggcagtagcaatctgcaatcaaccgctatccaagttatctgttcgtgagaggggttgctgtttaccggtagaatggtattgctcgggaccgactatggtggatgatgtcttgctgttagtctttgtcattggtgttgatatggggatgacacagctgatgatgtgacggtgctgatattgtatcgatattgatgctgatgctgcttacagtgaccatcttgatgcagtctatatttttgttcaagaggttctgaatcaaatcatgaaattccagatggatctcatgattggtaagaaaacttgtacaataatgccttacatgctatgttggttcttacccctaccctactttggcaaatgctttgcatcagttctagttggaacaaggtgcagactggcagagatgctgaggggtgtgtgtactcatagtaacaatggtactcgtcgtcgtcgtaatatggctaataatctctacgggaatggaggtatcagttatgattagcgtgggtcctgttgatcatgtggtggtgaaccaatttattttggtccttctctatcatattgttttattattctgctagtgttgagtgactcgaatcagatgctctagatttattcattctcctaagcaccagtaatgaaatccatgaagacaatgcctctgtaccaaggctcaatattaacatgtcatctctgtctggaaatgtatttgtgaaatatggtttgtacggtacctgcccatttcgtttgtagtagagcacttgactataatatcagtacgtttaagatgtttggtgtgttaatgaaggtatgcaatagatgattaact

SEQ ID NO: 24441 - DNA, 3518 bp, Zea Mays
cgcttccgtcgccggcgagcctccttctccgcaaccaccgacgccgccgcgaaaggggaagcgatggggttcttggacggcttccgtcccgacacgctgctaaagcgcgtctgcaagtcgctgctcaagaagcggctgggggatctgatcctcggcgacctggacctcgatcagttcgacatccagcttggccacggcacgctgcagctcaacgacctcgctctcaacgctgagttcatcaaccgtaagttatcaggatcccctattacgctgaaagaaggatcaataaaatccttgctagtaagattcgctgctagctgcgagattgttgttgaagaattggagcttgtgctttctccatctgttgcaagtgaagttgatgatgtgcatactgaatgctctgtctctggtagtactagtgacacacacactttagtcaagatccaaagaaatgaatccgatagtaatcagtgttccacttctgtatctcgagatgtggatgatggtgtaaagagaattgccaatgccgtcaaacggtttctgacaagctttaatatcaagttaaagaatgcctatgtcatatttgatcctcaaaccagtttgagtagtagatttccagaaactagtcgatctctagttttccgaattaaagagttggaatttggaacccaacttggtctatttaaactggacaactttttaactttccgtgaggcagtcattgagttgtccagaacacattcattgaagcttctctaagattagattcttccttttggaagcttgaaatatctgattcccaatttgacattggtacatgtcatgacacaacttatggtcttattggtttgggatctcaactccagcagctatatggtccagatatgcaggatgctttagatcatctgcagtctaggtggaatagtgttcagcaagcaaacaagcaaaatatggctgctgatgcatcagacaagtctgagagcagtttggagattttggtcgattctggggattaccagtcagatggacttcttgatgatattattgagaatgcttttaacacagaggattgcatggacaccaatttttgggagaacaattaccatcacttatttagtagcagtgagacggatgatggatttgagctgaatgcggccacttcacatgtatttcctatatctactccagaaggcaatgttactcaaatatcactagaacagaacgtctgtcctgatcaaatcattgattcatattgtgtgcctgaatttcatcaatcattatcaactctatgtgatgaagagcataaatgtacatctggtgacaattctcatagaaccctggaaagtgaagatgctggatggtataacaatgttcccttaacaatagttgagaatcatgttttgaaaaagaaaaacgagcaagtacttcaacacaaagtgtcttctgtttgcagtttgaatcctgatgaatattgtaatctgaaaggaaaggttcatattcatgatatagatgtaaagtggcggatgtatgctggagatgactggttattacctcagaaagatttgactagcttaacatgcacagatggaagaaataggagctcttcactggaatttactgtgagagggctcaatatccaagttgacatgtatccaaatggggatgtttctatatctaggctatctgtagctgctgaggacataactctttgtgatcaaagtatccatgctccatggaaactggttcttggatgttacaactcaaaggattacccaagagagtcatgctccagtgcattcaggttagaattggagtctgtgaggccggagccacaggctcctttggaagactacaggctccatcttgagattttgcctctacagttgcatcttgatcaagagcaacttaacttcctaataaatttcttcaagaatgattcatgtaacaatgatcctcatttgcattgcgaaaatgatactgttgatgtgaagagcacaagcaatggaagcaatatggttgtggatgaggcattacttcctttctttcagaaatttgacgtaaagccacttattctgcacattaattatataccccgtcagtttgacccgattgccctaagcaagggaaattacgcagaacttctcaacattcttccatggaagggaattgatttgaagcttaagcatgtttctgcaatgggcatttacggatggaacagcataggtgatacggtagcagcggaatggttggaagacatttctaaaaatcaggtgcacaaattgctaaaagggcttcctccaataagatcactagttgctgttggttcagggaccagaaagttggtctcgttgcccatcaaaagctacaagaaggatcggaaattgctcaagggaatgcaaagaggcgcagttgcttttattagaagtgttaccattgaggcagtagggcttggagtccatttggctgcaggagctcatgatatgcttgtgaagacagaatgcgcccttacaactgttccaccacctttagcctcatgtgaagtgaaacgaacaaagcacaacattagagctaaccaacctgaaagtgcacagcaaggaatgaaacaggcatatgaaagtttaactgacgggtttggaagaacttcctctgctatcattggcaatcctattaaagtttataaccgaggggctggtgtcggatcagttctggctactgcaatctgtggagcaccagctgctgcagtagctccaatctcagcatctgctcgtgctttacattatgcacttcttgggctaaggaacagccttgatcctgagcataagaaggaatccatgtacaaataccagggaccctcccaagcatagacgtcattggtggtcggttcattctttggcgagccttacaccatctccctgaaactggttttaggagctcctttgccagtctcgtccaatggtgaggtgcaaacttgtacagtgtgtacagatcgtaagacagattatatttggcatcaaagccacacactaaattgacacataagggtttaattagcactcatattttgcaccacgaaggcacgtggaagttttgtaatccctcttcgttgcatgactgcccccgatgtacataatgtggttgctgtgtgggttgtgcggatgtaaattatcttcatgactgtccccaatgtacataatgtggctgctgcgtgagttgtgcggatgtaaatatctcttttgctttggttgcgtgtgcgcgcgcctctggtccgctgttcaagagtgtgttttgagctgctgctgctggtgtcatttgccgcagcccatgaacctgatcattctggctttctagtgttatcacgctaaaatatctgatatagaagttgtgcaatattaagtctagcgcctgactccttcgccacgatccaacggccttcgcgtcgcttgccacgcacgcctgcataccgcacacggctgacctgaagcttgtataaatgtaacacatcaagacctaatacgtac

SEQ ID NO: 24442 - DNA, 5003 bp, Zea Mays
cttgggcgcagtgtcggtttcctaacgaggccctttcaagcccggcccgacagtgcatgcggccagctctctggctccttccgtcctgcgctgcgctgcgctggaatggatagggtgtctcgcagctccagacggccacgtcggccagccgtcggccactcgcttcgactggcaggctcctacccttgcagacaaaaaacgcaaacacgaggacgaggacgaaggttcgttcagttcaagaccagacgaggaggaagagaggcgcgcaagcggtccggtctcatggcgcccttccccgccctccgctcatcgtcgccggtggccgccgccgcggcgccgtcgctcggtcgcgtgtccggccacgcatctgcggcgcccagcaagaggcgcgtcgtctcctgcagggccgtcagcagcaggtcgctgtccatcatcaggtgcgagcagagcgcgaagaagggcggcgggccggacacatggctgggccgcgcggccatggtcggcttcgcctccgcgatcgccgtcgaggtggccaccggcaagggcttccttcagaacttgggcgtgggtactccggcgccgacgctggcgctggccgtgtcggggctcgtcgtcggcctcgccgtcttcttcctgctgcagtcgggaggaggcacgcgagactgacgactgatggaacccatgagctgagctgagcacgcgtcgaacatcgtctccccactcgacatcagtcgttgctgtaatggttggtgaagcgaagatgaaaacccaggacatatatcagcatcatgtcatgtgtaacaaagacgacaactctcatgtgttggtgttgtctgctgctgttgtacgacatccgccgctcgcttgtacgaccgtactgcacttcatctgccggccgggcgagcacagccgttctttaataacatgacgggcgcatgcacacgccagctgactcttcatgtcgattgcgtccagacaattttgttaggactggtttgttattaggagcagacctgccgtttccatgtgcttgcttcacggagcacggcagctctgtaaacggcagactcgacgtagcttgcacgcacaggggttttcagctaaaaaatcctctagcgacagttcattggttgcccagttcaccgactgcctttataaacagggagctcgagctcgagtggtagcagcacaggcacaagtgcggtgccataagtgacagccacctcagtctctgtctgtggagctctctctcgcgcgcgttgccatctcgcaggttcttcatctcgtcgctctgttcaggttcatcggctggcgttagcgtttgttctctctcatacgactatttcatgcgtcctctgctgcatctcttcgattcatccgtagtatcttctttttacagctagtttgggaacccattttcttaacaattctatttttttttcaaaaaaatgaactaattttctttaataaaataaaaggtttctaaactagtccttaagtaaaaaaaaggggcggtcccgagcaaagtcaaacggtcccgagcaagcaagaaaccgtgtcgtcgattctcttttctctctggctttccgtggcagcaagaagaagggatcaaaggaccggacccgtccgtccgtccggccggcctcctgatcgcgtcgcgcgcgcccctcgaaaagccacaccccgccgtctgacctcgtggtgaccggtcccgcaggcggcgacaggagatggacggggagcaggcggcgcggtgggcggcggcgcaggagggggttcccgtcggggcggaccttgtcgcggcggcgctgcggcagctgcgcttcctcgcggcggtggaccgccgccggtggctctacgacgagggcccgctgctcgaccgggccatacgcaggtacaaagcatgctggcttccgcttcttgacaagcacactaagggtgtggttgtagatggtccattggttgttcctcttgattgtgagtggatatggcactgccatcgccttaacccggttcagtacataagggactgcaagaaagtgtatggcagaatactgaacaataacaacgttgagtcgtccactcaaacaaagtcgacacttgagtcagaaaaagtttggaaagagctgtatcctgaggagcccttcgaattgttgttcacaagaacctttgacactgccgtggatgtcaaccctgcaggtgcagaggaggacattacctatgatctggtctcggctgttaagagacaatcctctttctattatcaggttggaacaccaacaatgcatgatccacggtttctccaagaagctctagctcgatacaaggcgtttctttacctgatcaagatgaatcaagaaaaaggattgcagcgcttccgtgtaccaacctatgatgtggatctgttgtggcacactcaccagctgcatcctattacctaccgcaacgacatggtgaagcttcttggaaaagttctggagcatgatgacaccgatgctgatcgatctgaagggaagaaactcgatgttggatttaccgagactactgaacagttcgagagtacctttggtgtaagatactggaaggctggatgtatgtaccgtggcaacgtgccatctcctgtgacatccactcctcagacattcagtgctgaggttggtactgggtcttacatctgcaaagcccagaaagatcttaatgcccttgatgtaacagttgtagagttatatttacaaattgtagacatcaagaatttaccatctgctgttcaaaaagaaaatgtgtatgtacggttcgccaagaatcaatcagatatgttcatcagtgacggcggcaggttggatatctcaacagttacagggaagaacaccggagtttgtttacagtgtgaacctaccggagaactcattcttgcagtaatggttgatcaattatcaaagaaaccagaaccgatagggaaggtttctttcccactgcacgatttgacagggcctgattctaagctctccttcgagaagtggtttgaactgaaagctcatggatggagccattctctctcaagtcatgtcttttgccacattccatcaaggatcagaacacgggcagctggactcgtttcgtaaatgattgtggtaccgagcttatccgtctccagataagagagcacaaggcgaagaatagcatggccgtcgttcgagaattggttggagtattgaagtcaacaaaaaagcaaattcaacttgcagaattcaaggaaaacaagtggaccctaaaagactccaacttgccaataagtcatggcactgatggcagtctactcgatctcaaaggtgacaaccatctgatcaagctttatcggggaaggaaactggaatacgagcgcaaatgttgcagcgctcactctgaggacgtatcagctgttactgctgtaaagttctgtgctgaacatccatatggcaaagccgttgccttgctagacactgaagctcagcttatcatggtgaacgaggattggctcctacttccatggatctccatatcagtcctgtttatggacggcgatggcggtacgaaacttggcggcggtgccatggttcagaaaggtacagtgtttggatccgacactagcatggtgctagagacacagaccgtcggagcagggagcgtggcatccaatctagcacaatgtggcacttgcagcgccgtgttcggtggtgatgataaagaaatggcgaactgcaaggttgagcatgcgagctctggcgcttctcgcacggttgttgcaagtggtgagaatgggcacactgagactgctggctgtggaggcggctgtggtagcaattgtggacccatgatggctgaagaccccaaggccggcaatgccaagtccggaggctgtggttcggggtgtggtggtggctgcggtggcgcgggaggttgtgggaccatggccaacgaaggccaatccaggtccggaggtgttggcaccttgttgagctccaacgccatgggtggtgagggccagcaggcccattcagctggctgtggctccggctgtggtggtggctgcggcagcggcatggtcatcgaaggctccaaggttaacaacgttaacgccatgtccggcggctgtggctctggttgtggtggtggttgcggcagtggcatggtcatcgaaggctccaaggccaacaacgccatgtccggtggctgtggctctggttgcggtggtggatgcggcagcggcatgctcatcgaaggctccaaggccaacaacgccatgtccggcggctgtggctccggttgcggtggtggttgcggtgccctgttcaacgctagcactgctgccggagagggcctgcacaataagtcggctgggtgcggcggcggcgggtgcggctccgggtgcggcggtggcggcggctgtggtagcggcatggctatcgaaggcttcaaggccaaccacgccaagtctggtggctgcggctctggctgcggtggtggtggctgcggcaccctgttcagctccagcgctgcggccagccaaggccagtccagatccggcggctgcggctctggctgcggtggtggaggctgtggcactggcagcatggtcgctgaaggctccaacggcgggaacgccaagtccggcggctgtggcggcggttgcggtggcggaggtggctgcggcggcggaggctgtggcgggggttgcggcgccgtgttcaacgcatgatctcggtggagtggaggcatttgtgcagacatgcagtcgtcgtcgtctactgctagataccacatgctacagcatactgtgtattgctgtgcataatctactaaataaaaggaatgaataaacaatggatggatcggctgcctccgtggcgtttctgcaaacgaaaaatctcggtgttgttgggtgcagggatgaggatgaaaacgatttcaaacggtccgaaacgatatcgtctatttaacggttggttaagaaattacctgattta

SEQ ID NO: 24443 - DNA, 189 bp, Zea Mays
gaccgcgacgctccttgttcgattccgcatcagcgttattttcatatgattaattgtgtatgtgtgttgttttgtttgtgttttgtggaggagaggcaccccgtgttttgcgagaaggcaagccgctcaacgctcgtcgacatgcggagctatgcaaaaatcaaatcgccaacgttcttacaaacaccg

SEQ ID NO: 24444 - DNA, 2760 bp, Zea Mays
ctcccttctcacgcatcgtatgtggtggatccactgcggattttcctgttgtagcacttgagtaggacagggagcaaccgccaccatagctgttcgccatttcttccatcaacaccaacatgagcagcaacaaggaaagggccaagaaggcattgaacgccatgaagctgcttggtttctctaagaagcaggccaccccagtactcaaggaactcctcaacatcttcaacaacaactgggagcccattgaggatgagtgctatcgtgccctcgctgatgccatcctcgataggcaagacaacaaacaaacccctccctcccaacagggcaaccaagcagcacatgcgcactcggagcacgatcggcaacaatatgtttctgctattcacgatgacagaggcgaagatgataatgaaacgcccctggtgaagaggcccaggatgggcacggctaatttcagggcagagttgcagccatttgagtctggaccacagcaacccactgtttcaacccaaggtgctctgtctgtttcgccacaaaacagtcgtggagtaactaggtccttgactgtagtgctgcaagatgctgggtgtgaatatcctttagctgtcgatgattctttcatcgtgaaagaacccaaaccagaaccacaaattgatatagcagaaatcaacattggtgaccatttaactgaaccacaagttgatatagcagaaatcagtgtcggtgaccatttaactgatcgagattttctgactggtcctgatgccatacagctcagtgatggatcttcaggttctggtgcaagaggcagcatggtcaaacaagctcaaagtctgggtaggagcaagcaaaaagccccattgtgcaagaatggggtagggtctatgattcaaaatactcaggagacatcgtttgtggaggtggatgttgcttcttccgccaatggcgaggtgaagatgtcattgaaatgcagcttggaatcttcgaatttcagcattagtatggaggaggttttcaaaatggttgaggagaaatgccttcactcatacaaggtgctacctccagatttttctattggcaagctgatgagtgaggtatgccaatctgttgtgcagttgggcactatgcattctgaggttaatagggacagtggcagcttgcataatgaagtagttgctccttttgtgaagccaattgcttgtgaggctgctgtggacataaatgataatgtggctggtggatcatcagtgcttgattcctcagaaccttgtttgcaaaattcgcttgttgcttgggatcctgagtttgctcattgtaagcaaaaaacaacccatgataccactgatatatccaaaggggaagagcgggtaagaatacctatagtaaatgaatttggcagcgagaaatgtcctccatccttttattacgtaccaagaaatcttgtcttccaaaatgcttatgtcaacatctcgattgctcggattggtgatgaagattgttgtgctgattgttctggcaactgtttgtcatccttagttccatgtggctgtgcaagagtgacggggggcgaattcccctatacaccagagggcctgcttaagacagaattccttgatgaatgcacctcagttaatcatttcccacaagagcatcataggttctactgtacagtttgccctcttgaaagatctaagaataaagcctcacctggtccgtgtaaaggccatcttatgagaaaattcattaaagaatgctggagtaaatgtggatgtggcatgcagtgtggaaatcgtgtgattcagcgtggtataacatgcaaattgcaggtgttctttacacgcgagggcaaaggctggggagtacgcacagtagaggatctcccaaaaggttcctttgtctgtgaatatgttggagaggtactaacaagttctgaattgcacgaaagagcaattgaaaatgcaagaaatggtaaacataagcatcaagtactcctggatgctggttggggttcaggtgtattgagggatgaagatgcccttagccttgatggttcattttatgggaacgttgggcgatttatcaaccacagatgctatgatgcgaatttagttcagatccctgttgaagttgagacgcctgatcatcattattaccatctggcatttttcacgaacaagaaagtagaggcatttgaagagctaacatgggattatggcattggttttgatgatacggaagggcccagtaaaccattcagatgcatgtgtggaagtagatattgccgcgatccgaataatctgaggaggatggctagagcagctgcaaagcggaagtaggcggggaagctgaacttggttggagattagcacatcaacttttgctgtggtatttggttccgtatttgatgtgcagcagcatcacatcagttagtacttagtattagtgtagatagatggagatgagggcggatgttttggacccttgcccgtggctgagcaacacgattgcgaccttaacctacggcatattggcatgtaaattagcctgggattgagtaggcgtagaaagaacgcgtaatagtacttagttatgtcatgtcatcttggtagagggcaagttaaattacatgccatgtcgttgcatcatctatgccatgctgggttggatgcttgtgctgaatgatttgttgaagcgactagcctaggcacttgtttttggcggtatcttctaaaaaaatttcttccctatatgtcattt

SEQ ID NO: 24445 - DNA, 1551 bp, Zea Mays
ttcgaacaagctctactccggcagcgtcgacgaatctgttcgcatctgggactgcaattccgccaaggtagcttggttctcggcttccgacgatgtatctgattatgcacgggttaccaacaatatctctgatatgcacgggctaccaacaatatctctgactatggacgagtaacgggctgcttccacggaggttccagtgaggaggttgtcattgttcgtggtggttcatgtgctgattagcaatgtgtgcaccctatggaaccaaccataaccgaatggctagccttgttgctatatattggaggctcttcgcctgcttcggttacccgtttgcttggtatcagtttgtggcgctatctggttggttgtcacttggttgatacatatggttgcatgatctgcaagtgaatcttcagagattacagctatctcattagtggatagtcatgcatttatgtaaaaaaatagcaatgagaaaaaagaacaaagtaaagaaaaagagaaaatatagatagagatatgtgggagtatatccaagaggatggaaaaaaaatataatctgttatcatattacaatttttgttcttaatgtttctgcaatagtgtgttgatgtcatcaagatgggaggcaaggttagctgcatgatcacccatggcccatgggtactcattggaattccaaagtttgtggaggcatggaacacaaagacagggatgaaactaagatttcaagggccttctagtctggtttgttccatggctatcacggatgagatgctgtttgctggtactggagatggtcgcatcatggcctggagatttcctgctaaggaaagtaacactgaaccagtgttgatcctcagtggccatcaacggccagtgatttcactgtctatctcggcaagaagactttactctggctcactggacaagaccatcaaagcatgggaccttacaactcggcagtgtgtccaaacactctctgagcataaagctgctgtaacatctgtgctttgttgggatgagaagttattatcttgctcccttgacaagactgtaaaactctggactctgtcagagtcaggaaaccttcaagtcaaatatacccatgctgaggagaatggtttgcgcacactcttcggcatgcaccgagttgggaagacgccagttctcttgtgctccctccacaacagcaatcgcgtccgcttgctcgacttgccatcgttcgacgggattggaacactgttgtccacgaaggaagttaggaccatcgagcttgcggctggtgggctgctcttcaccggagactgctccggcgagctgaaagtgtggaggtgggcgcccaaggactaggaggcagtagctgatgtgcatcaaatagtgtagctgtagcctcattgaagaataatagccactgacgtgctccatcattgtattcgtttccatgtaaattatggctgctccccctgatgatgtagcacatacggccaattttgtgaggatgcaaccctggtatcatgttcccatgcgtctccctttaactgccct

SEQ ID NO: 24446 - DNA, 5105 bp, Zea Mays
aagattgtgcctatatcgattgttctagttttgaggcaaataacatcccacggtctatccgttacctatccatttccatgcaagatcattgtgctcagaatttcgaggaacaaatgggaaaactgaaagaaaagatatacattaacaatttgcggagtttgatgatatttggaaaatacattatgttacatctgctcaatattttaagggacacatttaaggaaataagacgtcttcgtgttctatctatattcatatactcccatagttccttgccaaacaacttttcagagcttcttcatctccgctacttaaaacttttgtcaccttattactcagaaatgtcattgccaaacacggtctcaaggttttatcacctgaaatttctagatcttgaacaatggggaagtgatcgttctttgcctaaggacattagccgccttgaaaatctatgccattttgttgtttcggaaaagattgattccaatgttcctgaggtggggaaaatgatcttcttacaagaattgaaagaattccatgttaataaagagagtgttggatttgagctacaagaattgggtaaactagatgagcttggagggaagctcaatatatacgggcttgaaaatgtgagaaccaagaaagaagctaaagaggccaagctgatgtcaaagaggaatttagttgagttgggattaatttggaacatgaaacaagagtccaccgaagatgatatcctagatagtatccaaccacactctaatgttaggagtctttttattgtaaatcatggtggtaccctcggtcctagttggttgtgcagcagcgacaccatatacatgaaaaacttggagactctacatctagagagcgtatcgtgggctaaccttccacctattgggcagttctatcacttaagagagctaaggctgagtaaaattgttggcatatcacagattggacctggcttcttcgatagcacgacagaaaaaagtgtctcacacttgaaggcagttgagtttaatgatatgccagagcttgtcgagtgggttgggggagctaactggaatctgttctcaggaattgaaagaatcaagtgtactaattgtcctaggctgacagggttgctggtttcagattggtctatttcttctatataagacagcactgtatggttccctaatcttcatgacctttacatttatgaatgcccgaagttgtgccttccacccttgcctcacacttcaaaggtatcccgtattcatatgggagacttttcttatgaaggtcgtaccatgttgaaaattaataacccctctagatttgccttcgaaaatctgggtgacctagagacattggtagcttgggatgcactacccttgtcctttatggatcttaaaaagctacattccttgagacgtataaatgtcactagatgtgaggaaacatttttgagaggactggatgatggtgttgtgctacccacagtccaatctctctaccttggacgatttacacctaccaaaaattatttgtcaaaattattcaaatgttttccagcactttcttctttgcatgtgatggcatcaccatcagatgaggacaacgaggaagtggtactgcattttccaccctctagctcgctgagagatgtcaacttcacagggtgtaagaatctgatcctacccatggaggaaggagctggattctgtggcctctcgtcgctcgagtcagtgaccatacacaaatgtgacaggttattctctcgatggtccatcggaggacgagcaactcagactcagagcatcatcaaccctctcccaccctacctgaggaaactcttcctttcttatatggaaactctgcctcaggaagctctgctcatgaatttgacatctcttgagaaactcacactatgtaattgtcttggctgtgagcaaagcaccgagcgaatggctgtactcgcgaatctaacatctcttaccacgctatatttatataattgcagaaatatcacaatggatggattcaatcctcacatcacatccagcctcaagtatctatgcgtgtacaatgagagaaatgatggaactgatccgtattctgtagcagcagatctacttgtagcggtggtgaggaccaaaacaatgcccgacgtttccttcaaactggtgggactttatgtggacaacatctcgggagtgcttgttgctcccatctgcaagctgctctccgctaccctcgagacgttaaacttcagtaatgattggcggacagagaacttcacgaaagagcaggacgaggcgcttcagctcctcacgtctctccaattccttgagttttataactgcagggctctgcagtccctcccccaaggactgcaccgccttccttctctccacggaataactatctatgggcctcaaaacattagatcactgcctaaggagggcctccccgattcactacgaatactacgtataactaactgttgtgctgagatttatgaggcatgccagcaattgaagggaacaaggccagatataaatgtacttgcctccaaagctcgtgtgcaaaattgaatacctgcttctgcatgtcttcacagtcagctctgcttcaacatgcctttcactctacaggtaaatactgtgaaaacatcttcctatacgtgagatagttgatcttcatcgattctacagccaggatgatgtcttattggatgatgtgttggtcatggttggcacaaaattcagtagcgttcaaggcaataaacgagaacaagcatgggatgtggaaaattttagaaagtaaagacaagtgaattcttgacgacgttggcttggcaccttagtttgagtacataatgaaagaacaaccttttagcaaccctggagcatctagaaaatatcagtcatgtaactatcgttaatcatttgaaaaccactggaagacaggagatgtagcaccacaagccattcctttgatcatttgaaaaccattgcggctctttctgattatatcaaccagaagggctcacaattgtggataataaggcatccagtattatagaggaaacaaaggaaattcaaattagacggaaacctgctagtccaagttcttatatgccaaattcatcagtagatacacatacactctacaccctaatcttctttgttatgacatttattgtttttttcatgaactacgtacatcttaattttcaattcatctagaatactgaataggtgatgattcatcaccaaattgataagtgaatattaatacatctgaaacctaaaattaaatatatattatataagttgttgttaatgttcattccatttttgaacacttgcatgaattttagttctctgtttcttttgaaaaattctgtgttgcaaaaatataaatttatatgaaaatatattatatggtgatgagaagtttgagtttagtatatggtttcatattagctatacattgttggtactatcggcttgttctctttttgtttgaaaaaaatactatcggcttgttcttaaggacacataaaggactagttcggaagcaagagaattagaggagagatggctaaaatccccttcctaattaaataggaagggaatttgagcaccctcaatcccctctaattcccttgctttcaaactagcccaaagagtgtcactgcatcctctgaattatgatatattgaacatggtgttataattgtgaaccgatgagtataacttattttctccatattctgaacaacccattacttaaacagatttgcatcctactggagacattgctggcagaggaattgagactggcataggagaactcaatatatgcttgtgaataacgcatccagtgaaagatagtagattttcatcaattcactacccaggatgttgtcgcattggatgagaatgacatggaagacggcgaactagaggaagacaacaacctcatctaagctgaaaatgtgttgcctgtggttgaagaaaatctagcagatgaacaacactgccttccctgtcctctctagacctgaatctctctgatggtttggattcgtccatgattgatcctgtacgatgaaggatcagctcgtccaacgtttttcaaggaacgaactcaatctgaggaattaccttttcattggtcacctggggtactacgaggaatgacttcacgatagacgactcggttttgcgacgcaaaccaaacgccatggttaggctcagatgttggatcagatgattcctcgtggcttcgtgacgcaaaccaaacgacatggctaggctcagatgttggatcgtatgatttctcgtggcttcgtgacgcaaaccaaacagcctgtaagtccgcacaccttatctatcatggtcattgttgagctgatcagtaattggagtcgtgtgataagcttaatggacctcctatttgtcgtgatcttcacagatcaacaagtgagcggcctttgcatgctgcatgagatcaagcaagccgccgactggcaatgctccacctgccattcagttcgttggtgaggtattaatcaccagccatgttggcacttggcggcatgcagatggagcagaacatccaggtgaagcggacagatacatgatcgatcatgagttggcgcagacacaggccagacaaccagaggctatattccaattcatacattccatgataagcaaaggaagatccaagacaacacaaatatacaaatagttagttatacaagcaaaaatcctgttgttttgtgcctcccattttctagtccagaattaatatgacaatttttcactgaaactggttggatcagagaccaggaaaaaaagggaaatgacaactacagctgtgttttttttttcaaagaaggcagctgcccgtcgatgatgtgctcacttgaggatttcctctgccttttcagtgacactgcttcatccttttcagagtcaaatgaatctctacctcatttcactgcacatacttccaaactgatttgctgtaacatacttgagtttcggtatgacattaatttttaactcataagagaacaaaatcagaagaaaaaaaaacaacaa

SEQ ID NO: 24447 - DNA, 1313 bp, Zea Mays
cccacacacacacactcgcgctcgacacgcaggcgacggtggcggcgatcaggcccggtatctcagcacggccgacagtcccaggctcgacggcggcgtcagcggctccccttcccgcctctagccagtggcctcgtgccctcggctccggtcctctgcacaccggccggagaccctgcatttctttatacgatgagctggagatttcctctattcggttcccagcagcagcaatcagatccaaatttccaggacattcctatgcagtcttggtaccctacctcggttgtaggtttgtcttcatctccagccacacctacctcttctagctccagtccacatcaaagagcttcaaataatctgcagttttcatcccgtgggcaaccatctcctgctgaggctgcagagataattgcccatttgaaggacaagagtattgaggagttacagaggctattgaaagagaaagaggcatataatgcattctttaacacattcgatcaagtgaaaacccagaacaatgtgcgtggcgagcttagaaaggagacattgcaacttgcaagggaaaatttagaaaaggagcagcggattttggagcttgggaatcagtgcacaataattagaaccacacaactggctgctgctcaagaccggcttactgatttggagaggcaaaaggatgatattatgaggtcctattcccctgctgcactactcgacaaactccaaacgtcgatggcaaagctggacgaggagtctgaggagctgcagcagaagttcctggcaaaggacatcgacttcccacacttggtacagaagtacaagaagctccgcacggcttatcacaagcaggcgttgctccatctcgccggccagacataactccactgacatccggcctgcatcatgtcaactttgctgtattcctctgcttggccctgttttattgctgcagcttcctatagggcttgccaaacactttgcacgatttgttggatgataataaagctttcgtatgcttcatgtttcgtggatgctggctctggtgagaggggaattggagggaatccatggagaaattctcttgctattcaaaattgtcccatgatctcctcttattagggtaaattcttcttagggtctgtttgtttccgttcattttgatgaattgtaatttaactaacacagtaggctattttttagaatgtgacatttcacaactttctaaagtgtatatataagcttatctcaaattcatgaggtgaaagatgaaaattaattccatagatttacatgctacttttcgaatgtac

SEQ ID NO: 24448 - DNA, 1741 bp, Zea Mays
gtgcctccctccccacgaaacccccttccccaaactaccttcgccgctctccttgatccgcaattttctcccacatctctcttctgcccacttgcctccatcttggcctccccctccactccccacccccgaacatccggcgccgtccacacccttgcaccccgactcccctcgtccttcgtggccacgatgggggcgtccatggcatcgccttaggggcgatcgatctgggagaaagtgctggagcacgtggcgtcgtaccaccagcagcaacggaggcagaagctacgcaagagcctcacctacaccggcagtgagttctcgttcgctgtccggggtcgtggggacgaccccgcctccacgtccgttggggcacagaacgaggacatgcctcttgagcacgtctttaaaatcattagatccgatggcaaaagtgtgtgtttatggttcctgagtcagatgatctttcttcagttttagatgtgatagatattagtatgaaagataaaactagaatgctatgtctgtcaaaggagctttcttcagtttcaggtactgctctgctttattagccatccagccgatggataatttctatacgtgtatcgccctgcactttcaaacacttatgttcattgtttccaatcacatattttttcttcttctcttagatttactatgtggttgtggtctcagtttggcttgtaggttaatttgtatactcatgtcattttagtttttctgtgtattttatgttgatttagtatgtcttaatttagttactttcaattcttgatgctaataatatggatagattgtgacactactttctggcttgagcagaaatgagtttgttgcatatagcagaatatagtttttgtagctggcaacaatgaccgctctttggatgatctaaaaactattctgtagtcaggtagttaaatatagctgaatatacattattatgttttattaatcttatttgttttttctgtcaaaagaacacacctctccatctttcggtgctaggtggatcaccgtctaaacaatccaccaccagaaccgccctaccccaagatagctccatctcagtcgttgtacccattcaatggcgagctggtggcagcgatgtaggagatgatccatgacgaggtgcacaagtacatgttagtggacgacacctgccaaagatacacaatttctactggtacacattttattttttcatgtttttcagttggagaaaacatttaagacaatattttctcgtttgttctccatatggggcttgttccacgccacttgaaggaagaagggaatggtggtgttaagttcggacaatacatctacacatcttggagcatcggcatcaatgttttcaatcttctcaaatttcaaattattctggtctcttcgtgcaaccataaaagtttattaagtcacttatctgagtggtctaaaagtctagcatatttttgttcctctgcctgtcgagacggatcaactgacatgaataatatccagtgaatactgcaagagctattcatgatctgccgtgaactagctagtatgatataactcagtttgtggagtgctaatgcacaaacaggaaataggatgatacttcatgtatatttttttatttcatgaaaatgaactataggatactgttcacaatccataccaagcttctgcagttatcaacatgttttctatgttcaaccttgttaacatattaaaa

SEQ ID NO: 24449 - DNA, 1355 bp, Zea Mays
gtaccacgcgacgtcaaatacgggcacaactcgtgaacgacggcggcgcctagcggcgacatcgtccccctcgactcctcctccatccccgatgcggcgcgccagcctgcaggtgcccaattgtctaaatttctacaactcagatgagaccaaaactcctactccaatatctaatcagatttagtcccataagttgtctgagttattgtttggtccatcagtcgccttctatagcaccgaaagcaccccccgtattttgcggggggaaacggtgttctttcggggctacagattagcttattacctccatgggtaaaagaaagcggtcgttgtgtcaacaagataaccataatgattctctagccagcaaaataatgagaactagaatcccagatcttcctgaggacatttggtctcatgtacattccctaatgccaatgcgtgatgctggccgtgctgcttgcctatctcgtgcctttttacgttcctggagacgtcatcctaatcttatctttaataaggatacgattggcatgaaaaaaaattcatatggagagaatttccaccacaaaattagccgcattctcaggaatcactctggcattagtttgaaaacattcaagcttgactacagtggcatgtgtgggttcgatggaactatatcttgacagttggcttcaggctgctcttaatccagggattgaagaactcaccctctggttgttccatacaaggagaatatatgaattcccatgctcacttttatctgatggggttcgaaattcacttcggtaccttaaacttcgttgttgtgctctccgtcccacagttgaacttgcccccatgagaagcctaacaagtttacatttgtcctttgtgagcattaaatgggatgggttaaagcgcctcctttccaactcccttgctctggaggaattagagctagtatgttgtgacaagatcgtttgcctcaagataccttctgccctgcagcgtctcaacagccttaatatttttggatgctcggccctcaaagtgctagagagcaaagctccaaatctctctagtctttctcttttacattttggaggcaggctagtcttctcacgtgtgaaaacattgcaaatgaagaaactaatcactgaaagtaccgtctatgatgctcgtaccaggctgccatccactatgcccaatcttgaaactcttgtcataaactcatttgattgggtatgtatgtatgtgtgtgtgtgtgtgtgtgtgtgtatatatatatatatatatatatatatatatatatatatatatatatatatatatatatatatatatatatatactatttaaagatagatgtt

SEQ ID NO: 24450 - DNA, 1354 bp, Zea Mays
ctactactccatttggcgcctatgcctatcccatccgtttctccagtttcgtcttccccgctcgctgcagctccactcagagcctccgttcccaactcgaatctccccagatcctccgcatcatctgaaaacccagatgcttctcctccagcccagtgcagtccctgcgcctgctctgcgggggaggcctcggccacgtcggcggctggtgccgcctcccctcgcctccgcgcccgcttccatcgtcgtcagctccgacgaggacgcattcaccaggtgctccgggtacctgttcgaggagggcgcggccaccgagtcggagctccccaccgcgtacgacctccccggcatcgcggccgtgtaccgccgccgcccgctcctcgtgctccgccgctccctgcagatcggcacctccttcggccggtggttcgcgctgcggtacctcgatcgcgtcaacgagcgcgccgacgacatgttcgagcttcgggcggctcagctcaggaggatactcttggagcttggcccggcatttgtgaagatcgcacaagcagtttcgtcacggccggatgttgttccacctgcataccttgatgagctctcactacttcaggaccgcatagcaccattttcaaacgatgttgcttttaatattatagagaaagagcttgggcttccactggatatggttttctctgagataacaccagagcctgttgctgctgcatctcttgggcaggtttaccaggctaggctccgctccagtgggaagattgttgctgtcaaagtacaaagacctggagttcaagcagcaatttcattagacatatatatcttgaggttcctagctagtcttgcaaggaaggctgccaagttgaacacagaccttccagctgtgcttgacgaatgggcatcaagcctattccgggagatggattatagagaagaagcaagaaatggacttaagttcagagaattgtttgggaaatttagagatgtgtcggttcctgaaatgtatctggaacagacaagaaggcgagtccttatcatggaatggatcgagggggaaaagttatcagaagtcagagatcaatatttggttgaggttggagtatattgttcactttcacagctattagaatatggattctatcatgcagatccacaccctggaaatcttttgcgtacagttgatgggaaattagcctacttagattttgggatgatgggagaattccgacaagaacttcgtgatggatttattgaagcttgtcttcatcttgttaaccgtgattttgatgctttagcaaaagactttgtaacccttggcaaatgcaacttatctttacaaatcttg

SEQ ID NO: 24451 - DNA, 535 bp, Zea Mays
cggggtgcaaattcaccgttatcttgtaacgatcaatgaatttcgcaaaccatgaaacgaacgataatagtagcacctttgagcactgctgctgaaaatgagctgcgccgaattgccacctgaaaccccagctgtgaacggagaagggtcatctgccgccaccgccgccgctcctggtgccgggtcgaagccgaaaaagaagatatgctgcgcgtgccctgatacaaagaggctgagggatgagtgcgtcgtcgagcacggtgagcctgcttgcaccaagtggatcgaagctcacaagcgatgcctccgtgctgaggggttcaatgtctgaaacttgtagtctgtcgggctcgctttcctagaaccgtaggaaatggaaacattagaaaaatagagttatacaactagtcataataataccttaatgccaggagttatacggtaaggggaaatcacgatgtgaaaattatgttggcgatgaaacgtatttgagaatgagattgttgaattttattcgctaaatcattgcaacgca

SEQ ID NO: 24452 - DNA, 1396 bp, Zea Mays
cctagtgttgtgagagtgcttgcttcggctggtcatgagttcaatatgtggtgttttgcaggggccaaaggcttgaccttgctttcggaccttgcctttgtgtttaatccagtgtatcattgatcatcaagctcttccccgcctcctgaatttattgacacagaaccacaagaaaagcattaagaaagaggcatgctggacgatttcaaatattactgctggaaacaaagatcagatacaggctgtcataagtgctggtattatcgctcctttgttgcaactgcttcaaggagcagagtttgatatcaagaaggaggctgcttgggccatctcaaacgctacctctggtggttcccatgagcaaatcaagtacttggtgtctgagggctgcatcgtgccgctgtgcgaccttcttgtttgccctgatccgagaattgtaacagtttgtctggagggtcttgagaatattcttaaagtaggggagcacgacaagaccatgggcgcaacaggtgacattaatgttttcgctcagatgattgacgacgcggaaggcctggaaaaaatcgagaacctacagagccatgataataatgaaatctatgaaaaggctgtgaagcttcttgagacttactggatggaggaggaagatgatgcaatggctactgctggggaagctgctcctgctgtttttgactttagccaaggtggcaaccctcctggtggtggtttgaacctcaactgaatacagtatttgaccaaaagggtgttaattccctcatgacaacctagtctggtcgattccatgtgggataatggtttgtggttggtccagtaaattcgagatttcaagggagatgggttagcattattcccaagctgtcatggatatcagtatcgcagggtctgtaacaggaccataatcgtcgaacatgagtctgggtttttgagcaggctactctctagggtttgcgtcatttatgttttatatctggctactgtatagcctgagtctaattatctgcaatgccgtaggacattcctgagtggtttggttttgaggttcctcaggaatggtctgcgttgcaggttgtccagagttgtaaaccttcaagtggtttgagtatattgctcggccttgctttactacggtcgatccaacctgttggaggccaaatgacttataaaaagctgttggcagctgcattgttggcggttggtgataaaatttgtagggaaaaataaggcgaaggttttgacttttgaagccaaattcaatttcgagttccacgcagtaacggaggctgatacaatgccctttacaactcaaatacaacaaatttccgctcaacagttatgtgttttttttgacatttacaaagcaatacctcggtccaat

SEQ ID NO: 24453 - DNA, 666 bp, Zea Mays
caccacccaaccgaatcctcaaccgccgccgtgaaccgcggacctgactccgcgcgtgcttggactcaagttcgtccccggctggtggggtcccacctatcatcatctagcgccgtcggggtaaaaaccaggcagagctcacggtgaattctccggcgatggcttgcgctcctcaacggtctccgcccatctataaaaccatggcgtgggttttccctcccctcatccttctcctctgtgtaccgcgcgacctatgagagtgtgggcatggtagaccgaaccggggcggaatccgttcaccgccgtttggccttctcgccagcgtcttgctcctcgtgacagcaccggaggggccgcctaggaggagggagtctagtgctgacctcgggcagaggtgatggccactgtcgcggcggcgattcctcaccgtcgtggtcacggtgtcgtagttccgctccgcgccgtggactgggtcagctacgtctccatccctggtgaagaacaggtaccacaggatgaggcgcatggaggatgctgtgacgagttcgtgagaggtctaggccgtcgtctcccagtcaactttggggttgttggaccgttgtttccttataatgtaattatttatttattttgtatagaacttgtattatatagtaaagatgtgac

SEQ ID NO: 24454 - DNA, 2087 bp, Zea Mays
tgcctcccgcgatctcgctcgtgatattccagccccgccgccgccgtccccgcccccatccgtgacaccccaccatcaccgccgcgccacgcgcgacaactccatcccccgtccgcacccctaccccgagcatcgcagcgcctcccgcacgaggtcgttgcgcttgtcgatctgatggcggcccatggcaaaggagcaggtagaaaatggccgatgccgaggatatccagcccctcgtctgcgacaacggaactggcatggtcaaggctgggttcgctggcgacgacgccccgagggccgtcttccccagcatcgtggggcgcccgcgccacattggtgtcatggtcgggatggggcagaaggacgcctacgtcggtgacgaggtgcagtccaagaggggtatcctgaccctcaagtacctcagcttacacatcacattattccccacattacagcaatcagtgcaacaatcagagcatttatttaggttctgcaaaccgatcatgacaaaaccaaaggtagctttgaagccgcagactctgtctccacaacctgaagcccaagcacctcatgatcctcaaacaccagagcaacaacaaagcgggactggtgtaggcgtgtagctggtgagccgggtagtgaaggaggtgtgtaccaggcctccagtgagcaaatgggcatggtgccggatgcatctgcggccggtggcaggaaggtcgagctggatggggacatgcgatggacatcacaggttggcccctccagtgatccatctcaaacactagccagaagacgaaatgaatcgcaaggggaaactaacatgcgagagaggaggagctagccacaaccaaagagcttggttcaatacttcaatggctagaataatgaacgatatgaagatcaggtagcattatatatgtcaataagaagcagaggagagaagcagcccacatcgcaggagacaaggacttcacttgtttggccagttcaggacttcaggatgttgtcgatgatgtccatgctatattccctcgcttcatgcttaacaatgagggagagactaagtgaggggctgaaggccgttggtgctgtcagaatgtttttttggagttttggtggatgatgctcagtgactgcaatgcaaaggatccttctgttttgtatattgaatgagattacatcactgtttttttcttagcgatatgttgagctcatgtgctcgtttatgttagtcgatctctggctcttgtagtaacttggaaagcttgctgctttttttaagggcatacatgcctgtgatgtgtggtcatgatcatttttttctcctgttattttagttgtcgtatcataaatgccatgtttgcattggtgttccaacatgtcaatattattgaataaatgtttgcattggcggcagcggggacgacgctaagtcgagcaatggcgaagcggcccgtggtggcagtaacggtggagagaagcagggggatgaatccaacggtggcgggatacttagcgctgtggcttccaggattggcgtggtcgtgtccagcgccaacggggaccgcagcggcagcgctgaggatggtgccaagacgagcgctggcgacgctggtcacggtagcaagggcgaggagaaggggcgtggtgtgaacggtggtagaatagtcgagcagatcatttccaatctgccctcagatgatcaggcgcctgatgccgatgaagcttccttgctcatcgccattatcgaagattagctccatgttccgaaggctctctaggtcgtcctcaacgccaggatcaaatcatcagctgagccggagactgaaaacaataaagaaaagcaagcagctggtcatagtaaacatcatgtagcgaggcttagcagattgcttttttttcccgttagaatcagtccacatgtcctcgacacgggctagatttgttctaggattatttttccagtagtaagccatgtatccatggacagtccacagcgcgacgtctaatgtaacatcatcaaggttcttttgactatcccataagaaaccattccttaagacaaccgatattgtgagttgataacc

SEQ ID NO: 24455 - DNA, 3061 bp, Zea Mays
cggaagcatccattccatcccctctcaatcgcctccgcggctccgcctccccctcccccaaatttgaaacctccgaggcggacgcgaggcgaagccgtgcgtcggtcatcgagacggccggctgggcgaccgcgccgccgcctctctcctctcgttgcgtgccgcgggggttgcccgcacttgggcgcgcgctcgggcgcggggttggatgcagctccgccgacgtaggtgctcgtcgatcgcgtcggccacaccgggacgtaatcatgccgagtgataaagcaaaagctccaaagaagaagggcgaagaggatcctggaatcccgccagctccctgtgaaggagaaattagccatgagccacatagacaacggtcactcaatgggaggaccactggtccgacccggcgttcaaccaaaggaaattggacacccgaagaggatgctatattgtcccgtgcggttcagacataccaagggaaaaactggaaaaagatagcggaaagttttccagacagaaccgatgtacaatgtttgcacaggtggcaaaaggttctaaaccctgaattggtcaaagggccatggtccaaagaagaagacgaaatcatagttcagatggtaaacaaatacgggccaaagaaatggtcggccatcgctcaagctttgcctggacgcataggaaagcaatgccgggagcggtggcacaatcatcttaacccagccataaacaaggaggcatggacgcaagaagaggagattactcttattcatgctcataggatgtatggaaataaatgggccgaacttacgaaatttttacctggaaggacggacaatgcaattaaaaatcactggaacagttcagtgaagaaaaaggtcgattcgtacatatcttctggtttactttcacaagtcccatgcctctctctgattgaatgtcctgcacaatgtgactctttatcggctatggaccaacaaaacaacggaggtactgattgcaatgaccagaacactagcgtggtcttaagctctgatttacaagtaaatgtggatgccaacaagaaagaagcacatgactctcactcgtccttgtgtcaaggggtatgctatccttccacagagactgtaggatctgttttgcctgatgacctggagatggatatggatgaaggatcaggaaactctatttttgcagacgatcaaactctttgtagcacatcaaatcaagaacaatctatggtgccatttgttgttgcacaggaaatgcctgtctctgtgctatcaagtgtttctagcgctgagcagaaacggcacttaatctctgatgccaaaagcttgaaatccgaactttggaaagatgtttgtttgcaaactcttattacaggagatacagatgaccctgatgcttcttcaagattaaataacccagattcttctaaaatggacaccaattttttgaaagaggcctacccattacacacaccaaatccatccagtgtgattgaaactgtatatgaaccgatggcgttggtgacaatctctcccccttttatatgttcagatggtttgtctttcgcacccgaaaatagatctaagccaggagaaatgtcagactgtgaagcagagatggtcacatgctcaaacaatttttttggtaatgccgagcaatctgctaaacttgccagcagtgatgacaggccagaggctttcacaatgactgagagcactacaaactgtgggggtgaacaattgacagatgccaaagaacctgtggccagtacagcaaaagaacggttatcgaaagacatcgagactatgccagataaaaagaagggtgagggggctctattctatgaacctcctcgattccctggtttggatgtcccgtttatcagttgcgatcttgtaacttctgctgatctgcaagaatttagtccccttggaattaggcagtggatgcggtcgaccatgaatgtcccaactcctttaagattatggggctctccaacacatgatgaaagcccagatgcactaaaaactgctgctgaaagcttcccatgcacaagttcaataatgaaaaaaagacagagaagtctattgtcccctactccagatgaaagaattgagaagaaatctgggattgcaaagggggtgacggacatctcctatatgataacggccacatgttccatgaatgcaaccaatgatgaagacattgttactgaatcagctgtgtgtgctaagcaaccttctttgaaacatctagacaagaagcttgagttctctgacattaacaaggaaaactctgatggagcatctgaacaggccaaagatgcacaaaacacacaactcgtggatgagcaacattcctcaccaaatgttgtgaatcctaacactgatctacaagacaatatacaacctgtacagattcttgtagagcaaagcagcaataaccttatttcctctgatcatggtgcaaagccatcctgtaaggaagtgattagttcaaaatcaaagcctacaaaactacttgttgaaaaatcatcaccatgtatcaacgtggattacgaatatgtgaatttattggctgataccccaggtatcaaaagaggactcgaatctccatctgcatggaagtctccttggtatatcgatatgcacatgcactttcaggccgaggcgcgagtcctggatttcgacgaatctcccgcacctgcaagaacagcagataagaaacttggcagctgtcaccggagatctgttagctcacccattcttccttcccccaaccttagaagtttccgataggtacaccatatatggcatcatcgtacattacccacctgcatgtattggtgaactctattgttattatgtctccttagagcgcgttgttgaaactattggagcgtttcctttctttcgttactctattgttattactattattatgtctctcagcccggaaacaggcatcagtaccagtgaactgttgaaactaccctaatcattcaaattaaattattatattgcccgatgcatgtagcttcttgtgacaacaa

SEQ ID NO: 24456 - DNA, 4007 bp, Zea Mays
ctttttcaggatgcactttctacccttttctctctgtacattcgtgatcttggccctgctgttgaatttggagatgcacactggcttggaagacagggtattgcattagcgctccactctaccgctgatgttttggccgctaaagatcttcctgttgtcatgacatttctcatctcacgtgccttggctgatccaaatgttgatgttcgtggtagaatgattaatgctgggatccttattattgataggcatggaaaggaaaatgttcctttgctatttcctatttttgagagctacttgaataaaagggcatcagacgaggaaacatatgatcttgtgagggaaggtgttgttattttcactggtgctctggccaaacatctatcaaaggatgatcccaaagttcatagtgtcattgagaagttgttagatgtccttaacaccccatcggaggcagttcaacgtgctgtctcagattgtttgtccccacttatggtatccaaacaggaagagggtcaaactcttgtttctagactcttggatcggatgatgaaatgtgaaaaatatggtgagcgacgtggtgcagcttttggccttgctggtgtggttaaaggatttggaatttcttccttgaaaaaatatggcattgctgcaacattgcagaaaaatttggaagacagaatgtctgcgaaatctcgtgaaggagctttacttgggtttgagtgcctgtgtgagaagctcggcaaactatttgagccgtatgtcattcaaatgcttccattcctacttgtgtctttctctgatcaagtcctagcagtgcgtgaagctgccgagtgtgctgctcgggcaatgatgtctcagctcactggtcctggtgtgaagcttgtccttccttcacttcttaagggtctagaagataaagcatggcgtactaagcaaagcagcgttcaacttcttggtgccatggcatattgcgctcctcaacagctatctcagtgtcttccaaagattgttccaaagttaacagaggtactaacagacacacatcctaaagtccaagcgtctggacagacagctctccaggaggttggaagtgtcataaagaatcctgaaatttctgcactagtccctattcttctgtcagctctgatggatccaaatgcccacactaaacactctcttgacatccttcttcagactacttttattaactccatagacgcaccatcgcttgcactgcttgtgcctattgtgcatagaggactgagggagagaggtgttgagactaaaaagaaagctgctcaaatagttggaaacatgtcttctttagttacagaaccaaaggatatgatcccatacattagtttgctcctaccagaagttaagaaggttctagtggatcctatacctgaagtgagggcagtggctgctcgagctctggggtctcttataagtggaatgggtgaagaaatcttcccagatcttgtgccatggttattagatactctgaaatcagataatagtaatgttgaacgatctggtgcggcccagggattgagtgaggttttagctgctcttggccaagattattttgaccatattcttcctgacatcatccggaactgttcccaccaaaaggcttccgttcgtgatggacatcttacacttttccggtatttgccaaggtccttgggtggtgttttccagaattatctgcaggctgttcttcctgctatattagatgggcttgctgatgagaacgaatctgttcgtgatgctgcactttctgctggtcatgtctttgtggagcattatgcaactacgtcattacctctgttgcttcctgctattgaggatgggatcttcagtgataattggcgtatccgacaaagttccgttgaacttcttggggatctcttatttaaggtcgctggaacttctgggaaggcaatccttgaaggtggaagtgatgatgaaggtgctagtacagaggctcaggggcgtgctattattgaagtacttggaagggagaaacgcaatgaagttcttgccgccatttatatggttcgttctgatgtcagcttgactgtccggcaggctgcgttacatgtctggaagacgattgtagcaaatactccaagaactctgaaagagataatgccagtacttatggacacacttatttcgtctcttgcatcatcttcctccgaaagacgtcaggttgctggaagatcacttggtgagcttgtaaggaagcttggtgaaagagttttgccctcaattattccaatcctgtcacagggactcaaagacccaagtgctagcagaagacaaggagtttgcattggtttgagtgaggttatgggcagtgctggaaaacaccagctattaagttttatggatgaacttattcctaccattcgtactgctctatgtgacagcacccaagaggtccgtgaatctgctgggttagcgtttagtactctgtacaagagtgctggactgcaagccattgatgagattgtcccgacattgctacgggctttggaagatgatgatacatctgcaacagcccttgatggtctaaagcagattttaagtgtccgaacagcagctgttttaccccatatattgcccaaattagtccagccccctctctcttcatttaatgcacatgcattaggtgctctagcagaggttgctgggccaggtttgaattcacatattagaactgttctcccagcattgattcttgctatggatgatgaagatgtggatgtaaaaaactcagccaggaaagctgctgaaactgttctgttggttattgatgaggaaggagttgaaactttgatacctgagcttctaagaggaatcactgacagtcaggcatcaatgaggcggggctcagcctacctaattggtttcctctttaaaaacactaaactatatttggctgatgaggcttctgatatgatgtcaaccctaataattttgttgagtgatacagacaaggctactgtatcagctgctttagaagcattttcaagagttgttgcatctgttccaaaggaacagctcccaacacacataaaactagtgcgcgatgctgtctctacagccagagataaagagcgtagaaggcgaaagggtgtgcctattcttctgcctggcttatgtctttctaaagcactgcaaccttttcttcctatatttcagcagggtttaattagtgggtcggccgaaacaaaggagcaggcggctgaaggtctaggagagttaattgatgtaacaagcgagaagactcttaaggaagttgtagtgccaattacaggacctcttatccgcatccttggtgatcggtttccatggcaagttaagtcagcaatcctatcaaccctgacaatcatcatcatgaaaggtggaattgcacttaagcccttccttccacaacttcaaactacattcgtgaaatgtctacaggataacaataagtctgtccggacgagggctgcagctgctctcggaaagcttagtgctcttagcacacgggtggatcctttagttagcgatcttctgtccatgttgcagtcaggagatgaatctgtaaaagaaagtgtgctttctgcactcaaaggtgttatcaaacatgctggcaaaagtgtcagtgctccaataaggtcacggggatgtgctcttcttgaagatctgctgcaggctgaagctgatgatatccgcagttgtgctgcaaaagtgattggcacattgtctcagtacatggatgacagagagattccagatttggtgcaaatccttttggaagtgggcacctcatcggactggtgtaccaggcatggtgctttgttagcattatcatccatatcaatgcattctccatcaaaattatgtgatttggcatcctttccatctctggttgatcttctgaaagattctcttaaagacgacaagttccctgttcgtgaagttgctacaagaactctggaaggaga

SEQ ID NO: 24457 - DNA, 826 bp, Zea Mays
gtaaggtgcacgtctatcttcctcccgtcttttgtcccacgacgttgtcgaggatgccacagacgagcacgaggtagcctcccaaacacatgtgtttttccacaaatccgcctcgcgctccttgccaccgatggcgagatcgaattagactgtgtgggcgtgggcgtgcatcaaggcctccgtgggaggcgctcgtccaacgaagagtcagttgtgtggaggtcctagaaggcctagatgtcgtcgccggccgtgaggtcgacctgctcgctgccgcggaactttcaacataacggacgtggcgtcccaatgatgacgacccaccaccagagctcgacgaccatagggatccggggcactggacaggaggtaggagcgaaggcgatcgaggttgtgtgggtggatggtgatggtggacatggggacgaacacggataccctcgtcccggcgtcgatgtagaggcgtgtgtggagataagagagtgtatttaaaaatatatcgggggaggttgaagggtcgttttgaaagctaatacacgacggaaagttgtttgaaaatttatcttgcttgcacggttgcttcaagtggttggtttatatatacttcacatcgaattacagacatgcatcaagttaattcttccctgtaaattataaagttagattcctagagacgatatgagttgtgacttttattccgagcagtcattttctatctactgcgtgataagagaggggcgtcgttgtagacgggtacgggtacggtactcatatgacagcacctacatttgtcggtgatgactgatgaagatctgactgagcaatg

SEQ ID NO: 24458 - DNA, 1455 bp, Zea Mays
ttgtttttgggctgaaggagctgtggcagcagttctagcatcaagacatccatacatgtgcagacatagcacaacagcacacaaacaacttcgaatacacatcaaaatttctcggtaaaatcggtgccagcatacacattgtggacgatgcacgcgaaatgtcactaatgggaacagtaaccttaaattgaggaaaggatatctctaattccagtctcccttgtttgcaaatcatcttgggactcctatcagtgaccatggcaatcatatcaaggagaatcactaccacagtaggcaaaatgagaaaccactgggattgcacaatgagacctggaaggtgtaaactcaggactgtcctgattagactgccctatagtagcacaagaccaagctcagagggcttgatgccattgcgaatacggtagttgtagaggtaatagtggagctgcccatctccaggaccaaacttgagctccttgaggaacgactcattctccatgacatcgagagcattgaacacatcgtaattcttctgcttggcaacaatcagagcatcattcatcagctgctgcaatgcagttttggtagagacgttgtaatatgagtatgcggctttgagcgttgcatagttagcattgttcagcaccgacgagggcagcgtgtaaaagctgcagaaatccgtgacctcatgcgtctcagggctctccacaaggtagctgtccacgacatcctcttgcggcagcagccagtgctccacatccacctcatcaaaatccggtgccaccacgaacctcgcaaggtaagccctcagcagccgtgtgaccgcagcaacatcccgcagttccattctgcggaacccaggggtgagcggcgcgtcaggcagcttgtatagccggaccgtgcggctcattgtcatgcgtggaccaaggcgagagaacccaacatcgataagcttcttggggttgagggatcggtgccagtagcggcaggtggtgatgggggttgggaggacgacccccgcggtgtatgcagcctgccaaatgttctcctggtggacgcggcgggtgacctcccggatgagcacgggcgccaggcgcttggatcggagcttcttgtggacgcagaggaagttgatctcggccatgcggacgacgtcgtcccgagcgcggatgcgggccgggacgcccgagatgaaggcgacgagcttcttggactccttggcgcgaacgccgatgtgccaggcccggaagaaggacggcggcttgagcgcccagcggaggaaggccggagagtagttgaagcggaacatgttctcgtcgtcctcgacgtagttgtgggcaagcagcgagtagaggtcggcgaggagcgcgtcgtcatcgaggtcgcaggtgagccactcgaaggcggcgggtagcgggtaggggtcggcgcgcacctcggagagtggcgtgggcg

SEQ ID NO: 24459 - DNA, 3429 bp, Zea Mays
taaggtccctgtcccgagcggtggcggttggtgggaactgtgcgcggtgcagttgataaacttctagctttcctgtgagggacgggcgaccttttcccgtgcgtgcgtgaaatcgcccagcctacgggactgattgggcttgaagttgtggcgcgtacgagagatgcctcatgccagagcttctgttattagagactgaagttctgcaagcgcgtgctgctgctctggagttttagcagctgtgttgagtggttgggagccatggagtcacggatggatcagtacgaggttttggagcagattggtcgcggcgcctttggtgctgccatcctcgtcaaccacaagacagagaaaaagaagtatgtgttgaagaaaatacgtcttgcaaggcagacagagcgatgccgcaagtctgctcaccaggagatggctcttattgctcgcttgcaacatccttacatcgttgagttcaaggaggcatgggttgagaagggctgctatgtttgcattgtgacgggatactgtgaaggtggcgatatggctgaattgatgaaaaaagcgaatgggacatacttcccagaggagaaactactgagatggtttgcgcaattggcattagctgttgactacttgcattcaaactttgttttgcatcgagatctcaagtgctcaaacatatttcttaccaaagaacaggatattcgtcttggagattttggcctggccaagactttaaaggcagatgatctagcctcttcggttgtgggaacaccaaattatatgtgcccagagttgcttacagacattccctatggattcaagtcagatatatggtctcttggatgttgtatgtatgagatggctgctcatcgacctgctttcaaggcttttgatatggctggactgataagtaagataaatcgctcctccattggccctttgcctactttctattcttcatctatgaaaacacttatcaaaagcatgttgaggaagagtcctgaacatcgacctactgcatccgagattataaaaaatccatacctccaaccttatgtgaatcaataccgtccatttgctaatatattacatcctggtcgatcaccagagaaacctggcaccgattcacggagcagtcagaaaagtatgtctgggagtcagtgtagtagcatttctggaactggcagtgatatggatagcatacaatcaaatgaaagaaacacgtcaggactagcttcaagttccagcaacaccattgataccgagggtgctgaaactactgaacttcagagacataaagatactgcttgtcctggactcaagagacaagattcatcaaaatccgtacaagataatcaacatcctggacatgagaataagcaaccaaagataattaagaagatactaacaactctaagagaggagagcaaatttagggaaagcaattctcctgttagagctagccgtgtaaagctaaattcacctagcaatagagaacgctcatctgacgactcaaagcaaagtgatatttcctccagttcaaggtctagtgaagttatgtcacatgaatcagcaaatgcaagctgtgaacctgtcaaacgaggacatgcatctcctcccttgaagcatttgtcaccaattgttgagcattctccgaaggttaaaattaaagtagatgagctattacatccacaccttgccaagcaggttggagaagttgttgatgcagctgcagggaaggttaagaacagaacaccgcccatttttattaaatgcaccagtattcctactcggaggcaaggagtagcaagtccaagccgtcaacacactggggtaaagcgagctcacaataaggtcatggcagagcatgcaaggaatccttgtcagcatctccatagtccaagcaacgctcttgtgaaacttccaagtgttccaatggttcctccaagtcatctagaagatcttaagagaaaaccagacaatacacgagcaaaatctgctcctcctagggctttagcaaccaaggaagacaacagtgcttgctccagttctacgattggtaatgctgaaaacaccaaccagtctgaaccgtctgaacctgactcaccaacttatttggtctcatcctgcaaatgtttgatacctgacactatcatacaaaagcacggcataacaagtaaaaaaagttcagaaatcatcacaaccaattgtgagaagaaaatgactagtaatggtgatcttagtctaagcgcagccatggtgcaatcttctgatattcctgaacaagagtttatttgcaaggatggaatgctctccagtcaggtgggtcagtgcagtgaaacagttactgtaccaagcgatgaagacaagttcacagtgcgggaactgctttcatcagtaccagatctttgttccttggtcccaacaacaatgatgaacactgagccaggaagaggacccactctcacccagtcatcagagaaaccatcgggtcctcatttaaatcctcctccagttgaggacattatacatgtcataagccacagcagtttccatgtgaatggtgagcaggcagtaaaagaaactggatcagagagcattgatgttgacaaacgtcttaacatggtaagagaagagataggtgtaagaagcaccgagccaaacctcataccttctggacctatagattctgatacggtgaagccaaatgtagtagaagctaatattacctttcagaaaccatccagtacagatgccataaaactgccaaccataccggaaggaaattttagtactctggagaccaacaatgggtttaagcaggaagcagctccggctaaggaaatactagatgtgacatctttcaggcagcgagctgaggctctggaaggtctcttagaactttctgcagaattactggaacacagtaggctggaggagcttgcgattgttctaaagccatttgggaaggccaaggtgtcccctcgagaaacagcaatatggttggctaaaagtttcaaaggcttgatgaatgacgaagcaagccgcagttcaacgtgagtacgcgtagcttttgtgccaccctttttactttggttgatttctgcttgtgctctgaagatgctatggttgtcttgttcatatctggcttcttggtatcgtgtgtcggtgtttccatttcgatagttattcattctttacagcacatgttgtaaatagcccagatttgtgaacagaaaataatacatgccagaaatggtgttaatttacatggttgaagtaacagagactaatttgatcaattattgttttgcctacgtgctcctctgaaactatcagaattctacgagaaaaggtacaaaattgtgttgttgcatttgttgtcagtatacttagtttctcaactactcttagaacatcccacaccac

SEQ ID NO: 24460 - DNA, 1434 bp, Zea Mays
cttggaagaattttgggatgaggagcctagcgggttccaaaagaactagaagtacagattggttgaacttcaaacaaatacaaagagctatgcatacaagtggtggaggcctggtggtaaattgtttatcaagatcgctagagcagttaaatttactcctattatcttctgggatagatttggcaggatcaaggtcgttgtcgtctccaggtccatcaaatgcgacaaggtcgagcgcacgcaattcagctccgaagtcatctcctttcaacagaaagatgcaagtaacaccaagtcacttgcctttgatggttgatacatttcactgtatatcattgcacgacagatccatttagtacctttttctgagttaaactacttcaaacattgctgaagactacaaccagcctacagttgttgtaattgaagcgggtcaagacatagcatttgcaaagatttagttcattctcatcactctgcaatattcgggttctctactatgtgtaatctcatatcaagattaatgagtatcgtgatcgtataattttgaatcctatcaacccatatggcaaggcaaagaaaaatgacagtggacatcattctagattttacaaaatcaaaggagcaaccagacatggctgtcatgatctaagatacttcaacgtgattggatcgaacccaaacatatgactaggagaagctccaaggccactttgtcaagggtctctgcaatgcacctactggtgcatgatttactggaggttgtgcgcatgaatgtgccacacattggtatgggggttggagttgaagcaggtgattttcaccaacattggtttgcgaactggagttgaagcaggagacatgattgttattcctatcatgtgcacactgcctcctcgctgtcatttgtcgtcactctcgtagtcctgataccggagcatggttgccaggggagagcagtccaaggcaaatttgccatgttggagcagtcacaggagccaaggggctgcagtcacaggtcctgctagccaggatggagcaatcataggacctcctagcagtccaaggaaaatttgcgaggtggagtagttgcaacttttgaaacccacgtgataacatgctcaagcgttcgtatgataaaaaagatggcacataatcaaaagaagatctcatgttctgcgtttgtgaacctgtttgtattttttgaacttgttttgtgaacctctatttgtaaacctgtaaaatctgaggttgtgaatagatttgggtaacttcatacaagtggtggaggcctggtggtaatcctggatgcatataaagcgaggcatgcaatatccatagcactcgtttgacagaaggcaacaccatcaaccttgtcctccacctttaaactagcatgagcaccatccttcttcacatttatattcatgtccc

SEQ ID NO: 24461 - DNA, 932 bp, Zea Mays
ttataaaacctagctcctcaagctccagacgcagtcgaccgccgcagaccgggagtagtcgacgcgccgtcactgaatcctcagatcacggctagccgtaatcacgccactctgctgactcccggcgagtgtaacattttccttcagccatgggcaaggagaagactcacatcaacattgtggtcattggacatgtcgactctggcaagtcgaccaccactggccacctgatctacaagctcggcggtattgacaagcgtgtgattgagaggttcgagaaagaggccgcggagatgaacaagcggtcattcaagtatgcctgggtgcttgacaagctcaaggccgagcgtgagagaggtatcacaattgatattgctttgtggaagttcgagaccaccaagtactactgcactgtcattgatgcccctggacaccgtgacttcatcaagaatatgattactggcacttcccaagctgactgcgctgttcttatcattgactccactactggtggttttgaggctgccgcaaagaagaaatgatgtgtctggctggttctgtgtttgcttgagggatacctagtggaaacgtaaaatatctcgtcttgttcacgtcattgtctgaactatgctcgcaacgtttgcctggtcgatttagaactgttattttcgttaaaaccagagtgttatttaagacttatccgaacatctggtgagccatatatggttactagttttgttactacccttgttggtgttgtgtgcttctttagcaaatgtgctgtttctaaattgctcattatttgctcgtccatacctgtctgctgcgatcaaatttctcttgcgcttaaatcttttaaacaaaaaagctgccaaatcgcatatcaaggatttagaaattatgattcttccgaaatgtttttttgataaata

SEQ ID NO: 24462 - DNA, 1908 bp, Zea Mays
ggaccaatgggcctagagcccctagacaggcagtttccatgcctgctccaggcccaggcaaaacagcaccggactgcggctccaccattgccgttcctgtttcttcgaattcttctcccgttcaggcgtccatccctcttttctctcgtggcgacgaagacgaccgacgccgacgctgacgccctacgccaggtgccaggttccgtcgggtccttcgccggcgaagagcatccaccaggcgacccagtgctgttctggtgcggtttcattgcggaagttttgttgtgggattttccggtggcgaagatgatccgactacccatgtacgcggcgttcagcctgctggcgacggcttcggcggcgtactacgcgttcagcagccgggagcagttctacccggcgatggtgtcactcatacagaagcgggaggcgtctgttgccatcttcttctcctttgaatatacgatactagcaacatccactttatcaacatttgtgaagtacatattctatgtcagtgacatgctaatggaaggtcaatgggagagaaaggcagtttatacattttacttggagctcatcagtgaccttgtgcacttgtcattatacatgctcttcttcatagctatcttcttgaactatggtgtcccgctgcacttgattcgtgagctatatgagaccttccgcagcttcagaattcgcattgcagattacatacgttacagaaagatcacttccaacatgaatgaacgctttccagaagctacatcagaagagctcgatgcgagtgatgctacatgtattatttgccgtgaggagatgactacagcaaagaaactgctctgtgggcatctgttccatgtgcattgtctgaggtcatggctagagcgccaacacacttgccccacgtgcagagctccaatcgttcctgcagataatggacgtgctgcatcatcacgacaacatggagcccaggctggggttcaacctggtactgccactccatcctcagaaggagcaccaggtgagaacatgagcaggcgccaagcaaaacttgaagctgctgctgcagcagcttctttatatggaagatcttttgtttatcctccagcaaacaccctaaacaggtctggttctccccagcctacatcaagtgcaccacaatctgaagccagtagctccaatcatcagtcacaaaaagaccaagaaacacagctccaaaacagcagcgatggtttagtgcctctgccttttagtgcagatggtgttgttggttcaggaacaagcacaagagatcttgaaaattcactgcagaaggcacaagaaaactttattaagagccagattgagatgttacaaatccaactgcaaatggtgcagcgtggcgctgctgggttgagcagtagcgagaacactgagcacacagaagactgactgaatctgtaaacaggcactcctgcatcgtggagtaataatgagaatactgagcacacgcagctgaatctgtaaataggcggagatgaggatggggataaaagaaagcaatcaaagaattggctatacctgggggaaactgatgttttgcctggattttggtaggcttgttgactatgctttcctgttactgtgttagtgccttcttgccagcgttagatgtttctctacgtgtggtggtttctgtaggttgggtacatctaattgctagtttaattatacgattacacaaaattcttgtaccgagggaaaatagaaaggataattgtacaaatgacttttttgtgtgcatatccatgatatcgggattgtctgtagattttgtgtttactggagtaaaacagaaaatttggctgctgattggatgttgaacagagtggatctggcatgcctaatactgcagctaaccgagcg

SEQ ID NO: 24463 - DNA, 2857 bp, Zea Mays
gcattttttaggtagcgtgcagacttcatgttataaaaattcaactttgtgctgcattttttgggtagtgtgcagacttcatgttataaaaattcaccgtttgagccttagctcccaaactggccagcctggtcttcgggtcaagtccacaggcggccgtacagcatcgacaaccattattgctatatactattattgtccgtactgcactatcgatcgaacacacgcacccacagacgcatcactcatgttacggatagccggcagcaatcaaagtgttcgtctggctacagtaaattcttgcgtgatttgtgtatagggccttcaccatcatttgctgatcgatccagaactggttgataggagtcagaagaaatgtaacaagtcttgtatagttctctcttggtagtccaaagaaaaggagaaatcaatacaaaggttaagtctgacttatctgccaagcaaaatgcctgcggcattggtgccttaccggcaggacgagctcaagattctccgcggcgacgataatcctggaccatacaaggagcacgaccgcgtctaccgttacgactactacaacgacctcggtgagccagacaagggtgaagaccatgcccggcctgtcctcgggggcagccaagaacacccgtatccccgtcgctgcaggaccggccggcgtccaacagagacagaccccaactcggagagcaggctgtttctgctgaacctgaacatctacgtcccgcgcgacgagcggtttgggcatctcaagatgtcggacttcctcgggtactcactgaaggcgatcatcgaggctgtccttccgacgctggggacgttcgtcgacgatacgcccaaggagttcgattcgttcgaagacatccttgggctctacgagccgggtccagaggcgcccaacaacccactggtagcagaggtcaggaagagaatccccagcgagttcctcagaagcattctgcccaatggtagccatgaccaccccctgaagatgccccttccaaatatcatcagatcagatgtgttgaaaaaggctccagagtttaagtttggctggaggaccgacgaagagtttgcgagggagacgcttgcaggcgtgaacccagtgctcatcaaacgtctgacggagttcccagctaaaagtaccctggacccaagtcaatacggagaccatacgagcaagatcaccgaagctcacatccagcataacatggaaggcctgtcagtgcagaatgcactgaagaagaacaggctcttcatcctagaccaccatgaccatttcatgccgtacctcaacaagatcaacgagttggaggggaacttcatctacgccagcaggaccctactgttcctgaaggacgatggcacgctgaagcccctggccgtcgagctgagcctgccccaccctgatggccagcagcacggcgcggtcagcaaggtgtacaccccagctcactccggcgctgagggccacgtctggcaacttgccaaggcttatgcctgcgtgaacgactccgcctggcatcagctgatcagccactggctgaacacgcacgcggtgatcgagccgttcgtcatcgcaacgaaccggcagctgagcgtggtgcatccagtgcacaagctgctgagcccacactaccgtgacacgctgaacatcaacgccctggcacgccagacgctcatcaacgccgacggcatcttcgagcgcaccgtgttccctgcaaagtacgcgctggggatgtcctccgacgtgtacaagagctggaatttcaacgagcaggctctcccagcagacctcgtcaagagaggtgtggctgtgccggaccagtcgagcccctacggtgtccggttgctgatcaaggactacccttacgccgtggacgggctggtcatctggtgggcgatcgagcggtgggtcaaggagtacctggacgtctactaccccaacgacggcgagctccagcgcgacgtggagctgcaggcgtggtggaaggaggtgcgcgaggaggcgcacggcgacctcaaggaccgagactggtggcccaggatggacgccgtccagcggctggccagggcgtgcacgaccgtcatctgggtagcgtccgcgctgcacgcggccgtcaacttcgggcagtacccgtacgccgggtacctgccgaaccggccgaccgtgagccggcggccgatgccggagccgggcagcgacgactacaagaagctggaggcggggcagaaggaggcggacgcggtgttcatccgcaccatcaccagccagttccagaccatcctgggcatctcgctcatcgagatcctctccaagcactcctccgacgaggtgtacctcggccagcgcgacgagcctgagcgctggacgtcggacgccagggcgctggacgcgttcagaaggttcggaagccggctggtggagatcgagaagcggatcaggacgatgaacgacagcccgacgttgaagaaccggaaggggccggtggagatgccgtacatgctgctgtaccccaacacgtcggatgtcaccggcgagaagggcgaggggctcactgccatgggcattcccaacagcatctccatatgagcctcctcactgcctgagcggatggtttgtagatgttctgttacgctgtgtgtaatgtgtcgtttattcgttggttttgtcagtctcagggtagggaatggagatgttgattggatccatgatctgtagggttgagagaggagtcacgtctggagaatgttgtcaatgtgtgtttctttcttgttaagaataaaagttcgtcagctcatttatctctactacttattaaagaataaacaaaagaaa

SEQ ID NO: 24464 - DNA, 273 bp, Zea Mays
cacgtactcactcgaaggtgaggcacagagaaaatacaataaaacataaaaccaacatgaaggagtattaaatttattacaacatcatcggagtttttgcaaaagtagtgatcattgttcgaaatgcagcggaataaaactaacgataactaaatggagagatggggaagcctgtcccatcactcctcgtgctcctcctcagccgaggtagggtcccactcgactgtctagcccggtgataagatggacgaccaagtcactccagcaaccatg

SEQ ID NO: 24465 - DNA, 1920 bp, Zea Mays
cccataggcgaggtgttatctctctgtccagctctgaagctcacttagtcttgcaattgctaaagagggtgagctttcaattggaactattgatgatatccagaagcttcatatccgcacaatcccccttaatgaacaagcacgccgcatttgccaccaggagcaatcaaagacactagcattttgcagtttcaagtacaaccagagtgtggaggaaagtgagactcacttaatacgtctgctagatcatcagacttttgagtccctgtgtgtgtatcctctagaccagtatgaatgtggctgctccatcattagctgttcgtttgtggatgacaataatgtctattactgtgtgggaactgcatatgttatacctgaagaaaatgaaccaaccaagggccgaatccttgtatttgcagttgaagatggaagtttgcaattaattgtggagaaagaaaccaaaggagcagtttattcgttgaatgcattcaatgggaaattgttggctgctatcaaccagaagattcaattatacaagtggatgtcgcgcgaggatggttcacatgagctgcaatctgagtgtggccaccatgggcacatacttgccttgtacactcaaacacgtggtgacttcattgtggttggcgatctgatgaagtcaatttccttgctggtgtataagcatgaggaaagcgcgatcgaagagcgtgctagggattacaatgcaaactggatgactgcagttgagatgcttgatgatgaagtctatgttggggcggagaatggctataacttattcaccgtgcgcaagaacagtgatgctgccacagatgacgaaagggccaagcttgaggtcgttggggagtaccatctcggagagtttgtgaacagattccgccatggttcactcgtgatgcgccttccagactcagagatagggaagattcctacggtcatctttggcacaataaacggggtcattggcattatcgcctccctcccgcatgaccattacaccttccttgagaagttccagtccactcttgtcaagtacataaagggagttggaaacatgagccatgagcaatggcggtcgttccataacgacaagaagacagcggaggcacggaacttccttgatggtgacctgatcgagtcgttccttgaccttagccggagcaagatggaggtggtgtccaaggctatgggcgtttcggtggaggatctgtccaagattgtggaagagctgacgaggcttcactagtacatggatacgcagaagctttgcttgtaacttgatgcatgtacatcctctttttgccatctatttttgtgctgtagcagttccatgagctgcctcagcagttgccgcgggccgtgttggcccgaagctgtagcctgccctgctttattggttgactcggaatactttttgggttgtgccagtttgttgagattgttttttttcttttattctatgttgaatggaaagattagcggtgaatcctgtcatggtcctatctgaatatattggggtactaggagccagagagatgaccgaatgactgtcttgtaggacctggttcattccaggcccaattcaatcgggcagggtcagcaacccagccctttgtttaaaaaatgtatccggtgttcaaaggattgctcagatgcacatattaatgctgtatccagtgggtattgtaaaatagggatgttgaattgtagatgatactgtttgacattgttgcagagtggagccctgaaattgaggatgagatacgagatggcataggggatctgttgatggtctaaatctggaacgatctctaacgttcaaagggttgctcacgtgcgggcctaccaaaaggactcagatgagtcatcctgctgctacatctgctgggaagccttccgaac

SEQ ID NO: 24466 - DNA, 861 bp, Zea Mays
cctctcccccgagcatcccaaaaaatactcggccactgcgctatctcgcccaccaagccagcaccagcagcggcgcgcgatggccaccgcgccctacgcctcctccctcttcctggcttcctcccccatctccaccgcgccacgaatccgcgccgggccctgccctccgtccgcccagccatccctgcggctccggccgaggccgtccccggcagccgcggccgccgtccaggcggagcaccagcccgcgttgaccgcggcgccgaagccacccgcgctaccgttccgcgtgggccacggcttcgacctccaccgcctggagcccgacctcccgctcatcatcggcggcatcaacatcccccacgaccgcggctgcgaggctcactctgacgacatcggccagattttcccggactccgacccccgttggaagggcgccgattcttcggtgttcatgagggaagctgtgaaattgatgcatgaagcaggctacgagctgggcaaccttgatgctacgctgatcttgcaaaaaccaaaaattagcccattcaaggagacaatccgatcgaatttgtgcgacctacttggggcagatccatctgtggtcaatctcaaggccaagacgcacgagaaagttgacagtctaggggagaacaggagcatagctgctcatactgtagttctcctgatgcgaaagtagaaagaacaaatggcagctaattgtatcatgctacacggaaaaggttgttatcttatacttgtgattgttgagtgatctagccagtatggaaaatcttcatgtggtagaaacaataaagctgattgcaatgagaatttttctgtatttcacttgtgctgtca

SEQ ID NO: 24467 - DNA, 1974 bp, Zea Mays
tatgtaatcctttctcctcccttggtctataggggggagtagggcaacgagaaagcgattcagatttgaagggttcggcttcatagaaagggatattagaaagtgatccagatccagattcaattagggttgggtttgattcagactttagaatccctaaccttctaagggcagacataaaggcgaactagtgatcaattgatacttgagattcttccagagagttttttactgaagctagattatatctgcaggaaagcagatatcgttttggttgctgcacgttcatatggtctaaccggtttggtcagggttagcgtaaaggagcattgtgttatagaatcaaaaccagaccacttcttggatgatttgcgacttcacaacccatggactgaactaaagcagtttgcaaaatcaattgacataaacgataaagatcctgttgtccacaaaaatactccatacattgttatccttgtgaggcttgcagaaaaatgggcagatgcacatgatggtaacttgccttcaactaggcaagaaaaaaaggaatttaagatgaagaaaattacaaagaagctgtggactcttcatataaagtatcagtcactccaggaatcaataatgagattcgtcagataattgatgatgactctgcggaagtcaattcctcatcgtcagatttttggattttagtggctgctttaaaggagtttattgcaaaggagggcaacggtgagctacctctggagggaacaatacctgatatgacttcccttactgagtattatgtaagcctacaaaagatttaccaagctaaggcagaatttgactgtcttgccctggagcatcatgtaaaggaaatcttaaagaggattggtagagatccggattcaatttcaagagcatatatcaaaacattttgtaaaaattctagaaaactaagggtttctaggtatcgtagttttgaggaggaatttagctctccgtttgtccctgagattcagaggtatttcaccgatgaagactacagttacgcaacgaacttctatattctactacgtgctgttgatcgattggctgccaattatagcagattgcctggaatcttcgacaggctgaagactgttgcggcttcagtggcaagtgagatgggtttgaatggagcatccttatccgaagacctgataaccgagatgtgccggttcgggggtgcggagattcatccagtggctgcttttgtcggtggagttgcttcccaagaagtgattaagctggtcaccaagcagtttgtgccgttgccgggaacattcatatttaatggaatcgacctcaaatctcaagttttgatgctataacatggatgtggaacgttgtctgtgtggactggatttgagttggcccagattttgtgccagggcacaacgctgcaaatggaatctgtttgcccaacgcgtagccaaatatgtgttgcatgatattttagagcctgtttgtttcctcgcaggattatataatccagcttagtttatatagattatataatccaatttatataattttattagagatggctgtttatacaaattattagtgggtacaaagctaaacaataatataaaataagcacctaatgatatgcttatgaattatcataatctaggtacctagattgtacttcctccgacttttttatttgtcgttgtttagttaaaaataaactagcgaacaacagatattccactttagttttgtttatttgcttcttaacttatgtaagttagattatataatctacacattaaacaaacagccaaacagggcttgcgtcgtatgattgtcattctcgccaagcaccttcccgccacccccacccacccacacgaatcagagaaaagtggttcattgagagttgtcactctgctgtaatttatcaatacttgtcgtatgatttatgcaagcgcttcctagctcacg

SEQ ID NO: 24468 - DNA, 186 bp, Zea Mays
aaaatagcatatataacggttatgcataaaaccggggcttgccttttatttgacacttagatagtgtttgctgggggagatactcgctcggcgagcatccactagttaagtccatccttccttggttcgtccaccgactgcatcttgtgggtggcaccacatcacttgcacgatcgtcatctctcg

SEQ ID NO: 24469 - DNA, 178 bp, Zea Mays
gggtaatccttgagctgaaggtcctcttgggagaaggtaattgggatatgagaccatcttgacttgatgaagggtccctgtacctcgacatgttgtacccttctctgtgcctccttcttctgcttcttattggccggttctgagcatgatccgcctgttattgggagcaccagcttcg

SEQ ID NO: 24470 - DNA, 1656 bp, Zea Mays
aaatccgacacgcacggcacgagcacgacagatcgggcgactggagtcatcgccgccgggccggtcgcggtcggatccccccgctccgcctcctctccttcgattcgttgcttcccgcttcaaatccaagccaccaccctttccttcccatggcttccgacgccccggcggagcaaccggcgacgcagcagaagcccaccagggtctcgctgtcctatgaggagatctccaagctcttctccctccccatcgctgaggcggcctccatcctcggagtctgcaccagtgtcttgaagaggatctgccgcacccacgggattgttaggtggccatatcgtaagcttgtttctgggaaagctggggatgacacaaaaggtcctgatagcgacaaagccaacgaactccttgaggtatcaaaaatcgcgaaacaaaaggctcccagtgcatcaggcccatcagtagtgtcatcaagcacttcccaaggagcggcaaagtctcaacagggcaattctaaggcaggacagttttcagtttcgccaccaacagcgacacagactatgtgcctaccaaagatggaagccatgaaccccatgaatcaacaacacatgagccatcaaagggcatgactgatgatgacgagttggactggggagcagatgaagcggaagctgaagctgatggcactgttacggcagaggcatcggcacagctgtgctcgctgagaaggaaagcagtagatgacgggcgcaaactattgaatggtcacaaccgcaggggccaagaattctctaggctgaacaaaaggcagaagacagcgctagcccaggtatttggggcttcactgccagaatgttgtattactcgtgtctagtgagtgaagaacaactgtagctgtgttttccctccttctccagaccctcatgtaatctgacccgttattagcgagaagtgtgaaatcttctcactgaattgaagaatggcaggagcttgttttgtcttccttatcaacaagttgttgctgccgcttttgtctacgtattttctctcatctcccatgtgtgtacgaggagagcaccttatgttatatctgtgaatgcaggtatatatgtacataacagctgtgtttcttctttgttttcgataacattgcattttgttctttgatttcaagtcaaaactgttaaacacttgcacaaaaaactagcaaagatgtcctcaaaaggaatggatctagaagataggcatatcaatccattgtgtttggttgatggaggatataacattctacacacatccaagtgagtgttgctgcccataatttatctctttctgtatttttccatatgaagacccatggatgcaaatctgaaagaaatagcgttctttcttctgataacatgccccttgtcgtcaactgtaggttgcagaatgcttatgcttctaaaagttattgtagtttccaattccatgtgttttaggcatctgggtgacaattatacatgtatgtttatattttatttcactgtatctttttttatattttgtagttgtggctaattctgcatttatctcatcattgtatcgatacagaaggttgtgcataagaatcaccgattcgatatgatcatatgaaagttgaatgcatgtaggtctcag

SEQ ID NO: 24471 - DNA, 910 bp, Zea Mays
aaataggaaacaggaaaggagacccgcgcgcgccccatcgcctcgcctcgcctcgcctcgctttcatttgccgtcgcttcggtgtgaatgacatcgttgacaagtacagtacacattctaagaatctggggaaatcacatcagcagccttctattgatttgaatgtagagcagagcaaatacagcggcttgaacgagcaacttgctgaagaaactaatggacttagacagatgagaggtgaagaccttgagggattgagtgtagaggaattgcaccgaatggaaaggaaacttgaagcaggactgcatagagtgattagtacaaaggaccagctattcatgcaacaaatcggcgaattactgcaaaagggcacacagctagaagatgagaacaggcgtctaaaagaacaaatgcctcaggtgctaacggctggcacaattaatggtggttgctgctgctgcagaaaatatcctcactgaagacgggcagtcgtctgaatctgtaatgactgcattgcattcaggaagctcgctcgactgtgatgatggttccgatatttccttgaagttgtcgttgccttgaaaggaaggaccatcgcatcgcatgttatctgcatgagtggggctgacaccagtgcttctaagaagacaaagactgggatagtcccattcgcggcattatattggtttaaccagatgtgctgtccttgtgcatgtctgtacttcaaagtggctaacgcgaaatttgtatatataatagtgtatgcgctgcgttatcttcgttctaaaaatctgtattgtttcgttgctggcgctatattgttggtgtattatatatatgcacttaactgttatctatactattctattaaaaatataatatagacatctgatgctaccacggcttcgcg

SEQ ID NO: 24472 - DNA, 441 bp, Zea Mays
aagacctcaaaccctaaacgggtattctaacagagacataccgggatataagtaaacacctttactccttaaaagccttgttcggttatatggattgaatgatattgaaaaaaattatgaaagattctgatttggttgagaattaaactcactccatctcacccaatctaagtaacccatataaagaatggaatggtaaccagaaaataacaactcttccagtgaccttaaccataaacagtagagacttggacagtggacaactagaaaaattcttcttcacataagaccacgaccattatttgttgcttttgggcaatggtggtgtttgcttgctcgtctcagccacagactctttcttgcgcatcgctatcactggatccctgcaaaaaaccacggaaacatgatgagctcaaatatagctaacaaaggcgatgcaaa

SEQ ID NO: 24473 - DNA, 3495 bp, Zea Mays
ctgacacataagaaaagagcagcgagcaagctgaaggtgaaagccacagcagctcgtccccttccccccacttcttcctcagataaggagaggccccaggccagagaaaaaagcatcgaatttccccccgttaattggcctgagccctcagccgtctaccagcagcagctagaggcagacaagctaggttttactgcttcattgagcacaaagatccgctgacctcttgctcttgatatgccaccaagagtacaaccagccaacatgtatattccttggtgttcaagctggattgtctttgttgacgtcagagctgactatgggatatgctttgcaacagtggtacctaatctgctaccatatgctatatcccacctgggaaagaagatggaagggacaataaatgcctgcatagcaggatttgcacttcttagttatgtgcttggcttattggttagccagccacaaattcctctcacgatgaatgtaatattccccaagatcagtggtgagagtgcttactctctgatggcgcttcttggtgcaaacataatggcacacaacttctacattcattcatcagttgtccagggtcagaaaaagtcatctgcagttggtcttggagccttatttcacgaccaccttttttcaatattgttcatttttactggaatctttatggtgaactatgttctaatgaactctgcagcagcggaatctactaatactcttctcattaccttccaagatgttgtagagctaatgaatcagatatttgtaaaccctctggcaccaactatatttttagtggttcttctcttctccagccacatcatctcgctgacatctgctatcggtagccaagtgatttcacaccatttattcggtataaaccttcctctttctggacatcgtctcctactgaaggtttttgccatagttcctactctgtactgggcgaaagttgcaggagctgaagggatataccaattattaattatatgccagattattcaagccatgcttcttccatcttcagtcgtcccactttttcgtgttgcttcatcaagatcaataatgggagcccatagagtgtctttgcatctggagatactggtttttcttgcatttctccttatgctattttcaaatatcatatttgtggcagaaatgctatttggcgacagtgggtggatgaacaatctgaaaggatatactggaagccctgtggtgctcccatataccgttttagttttagttgcacttatatctgtggctttttcactgtacctggctgttacaccattgagatctggaagtcatgaagctgaatcccatgaatggtctgtgcattctcagagagaactcttgaatacttctcaagaaagggaagatgttaaggtggacaatgttacatatgaggaagatcaaagatcagatgttgtcccttctcccagggatgtgcctgacagccatccggaactggccttggactatattgatacttctgacactgctgtagaatctgatcacgactctcaacaatctactgcttatgcatccactgctcctgaaacctgctcctccccgtcgtttactcgcgaggagtcaaaatcagttgttgcagtcaactggccggagcctttggagaaggttcctacttctactgtgatggaggaaagcacagtagaaaatgtggtctctaggatcacgactgaaagagatgttttagtagaaacagatgttgtctcgggcaaggataaggaagatatccgtactttggagtctgagaagtcaattgttgatagcaccccatatgtgtctgatgacggtccgccatcccttactttcagcaggggaaagggctcagatgcaggaaatggcagtggtagtctctcaaggttatctggtttgggccgtgcagcaaggagacagctagctgctactcttgatgagttctgggggcatctgtttgattaccatggtaagctcactcaagaagctagcaccaaaaagtttggtatcttgcttgggatagaccttagaacacctagcacatctgtaagaacggataaacaagctgctgaaatacttaagagcccactggtgagagactcaatgcggggggcagcttttttgtcaagctcagtggacatgatgtcccctaagaatgaaacgtcgaatttggaacttgcatatgggcttcagaggggacctggcatgggattgtcaagctggtctcagggtatgcagctaccaaatacacagctgcagagctcaagcaatagcctacttgagcagagtgcaagattaaactcaaattttagttcatcttattcagacaacaatcagttctaccaacctgcaacaattcatggataccagctcacatcttacctgaaacagatgaatgccagcccaagcctttactctagcatgccgctggacccacaacggcttccaaaatcatctgtgtctgctgtgccaaactatgctgattccatgatgcatgctcgtaatcataacctgcttgcttcactgggtggtactactacacagcttcctgcaacatcccgcgtaggctcaatgatgcctgaaagatcgtattatgatccttccagcgttgatgggaatgaaaacgctggttcacctgcttactcaaaaaagtaccacagctcacctgatatgtctggaataatcgctgcaagtagagctgcactcttgaatgaagcaaagttgggtgctgccattggaccacagtcatacctcagcaggctggcggcagaaagatctcaatatgcaagctcaacagccaggcccgcggctccattagcatttgacgagctttcacctcctaagctccagagtgatatcttctcggcgcagtcaagcatgagaccaagtgctagatccctttgggctaagcaaccatttgagcaattgttcggcatgtcaagtgcagagctcagtaaaggtgacttcaatcttccaggcagatcaggtggcgtggccaaggatgatttctcttataaggaatctgagacgaagcttcttcagtccctcaggctctgcatcatgaagctccttaagctagagggatcagggtggctgttcaagcaaaatggtggttgtgatgaagatctaatcgaccgagtcgctgcagccgagaagctattgatgcaagggactgccgagaatcaactgctgcttcatggtggtgatctccagcaacattcttccgaccaggccggcatccagtacatgcgcacgcttcccaactgcggggaggactgtgtttggcgcgcgtcactcgtcgttagtttcggtgtctggtgtgtccgccgagtgctggacatgtctctggtggaaagcaggccagaactttggggcaagtatacctatgtccttaaccgtcttcaggggtggacaatcatctgaaatggcattacaatatagaaaacaaaaggactggcccaggattttcccgtatttatg

SEQ ID NO: 24474 - DNA, 2211 bp, Zea Mays
aggaataaatgccaatgtactgtgtacacctatcctgaaatgaggatgactatatgttgctttaggataataacatcactgccatcactctcccaaagtcgctatgtttttctgtcatagtttgttgtcctgaccaaattttttaatttgttgtctatttctcttaggttgttctttcaataagctgtatctttctctcgtatgcaatgtaaatttcaggtatttgtgaaatatgagtgttgttttggtctcaaaataaatccacaaaagattttagcatcttgctatagaggagcaacggtaccaggacgcgtcaaggttgacaaagctatctgggaccacttttgtaattgccaactcttcactgattattttcctatatgttgctccagaataaatggatcatagtgcggtggtcatgggattgggatctgctccgtatttgcagggtgaagccttcgtgtctcctcgagggaaagtcactgacctttcttgggacgtggaccactgacggcccccgtcatcccccatgacggtgatcctagggtgaagccttcgtgtttcctcgagggaaatctaccagtgcgggattgatttagtcagcaccattggacacagggtttagttccattgcctggacccatcaatgaatcatggtgccaaggtcttgatggttcgacttcaaggtactgatattctccaggactattgttagcatcccttgtggtccatctgcattagcagtgaagaaagtcgcatggggacttgcttgatatgttgttattgctcagacatggctgagaaggaggaaacaaagggccgctgccctgcctgccacacacgttatgacaaggatatgatcgtcaagatggccgccacttgtgacaggacagtggcagataaaaatgcggagaagaagcaaaaggcccaaagggttaagccaaaggcagcaccaacagcaacaacaacatcaaccgtagaatctaagaagcatcttgctactatcagggttatccagagaaatctggtgtacataattgggctacctgcgcatttatgcaatgagagcgtacttgagcgtagggagtactttggtcattatgggaaagttttgaaggttttagtttcccgtccgactgggcctccctctcagcaggcatcagcaaacagcagtattagtgtgtatgtctctctgaattatacggtgtacatgcatgatctgttcatacttcatatgaatttagatttatactttcagtactggtcaattagcctgatggaatatcaaataactatctactgattctatgcaattgcatgtttcaagtttctaatgctgccttgtaatactggaacattggtattataagaaagtaaattcaaacttcaatattgttatgtggttttctattgaacctggtgaaaatgtgataattatgtccatatccttgcaagcagttcagtcatttaagtttaatctaggctacttagcagtgtgattttcctgtagcctcttgatttgcatagccgcacagcccgtgcttgaaagtaacatttttatcctcattgctgacattaggatatgtattgtattattggtgtgaaattcaaagaatcagatagatgcaagatatctgtttgtgggataggatcagaacccaatcctgtgtgtgcagatatagataaaaatcatcttttaatgaaatgtctatttttttctcggtttgagtactttatattgttctcctgggatgtgttttttttctttatgggtgatttctcttggaaatcctaggatagtgtttcgatgtattctgaaactttgttgtgccagaaacatgcattgttttatcattaaccagaattgagttagggattatcattaaggcattaaccaaaatggagttaggatgtctttttttgtagtgtagaaaacgttgtgtatactgaaatgtgcatgcttgcaacatgtctaatatagattatatttgagtggtatctttgttgaagaacatgtgaaattagagttctggtggtcttctagaacacacactgctcctcatctttactttctctacataattcttcaatatgttggtatgttcccgtgactccttggtttagctatccttatacatgcatgttgttacataaatcaattagtttttccctgaaggacaggcctggtgcagtggtgagaggcctttccac

SEQ ID NO: 24475 - DNA, 437 bp, Zea Mays
ctccagagggcatcagtggggcagggccagaaatgctccttcgtcagtcttcagatcttcaaggccaagaaattgttaatacgaactttggaggtgatactggagacgcatttgaagcacatgaatggagatatgttcggacatttaacggtatcagaatttttgaagatattagtattacaaacccaaaggttggaaaggttatacttctgaaatctgttggggtggtcagtgcaaaccctgataccgtgtttgaagtggtcctcgatcttgataaacataagcgatatgagtgggatatgttgacagctgatttggagttggtggaaagaattgatggatactacgatgtggtttatggaacctatgaacccaaatatttaaattggtggaaatgccagaaggatttttgttttcttctcgacaatggtttcgtg

SEQ ID NO: 24476 - DNA, 165 bp, Zea Mays
ggaaatcattgggtgttggatagtggttgtactcaacatatgaccggtgatatgaggatgttcaccgaaatgagtgaggaaggttgctcaacctatgatagcatcacttttggagacaatcgcaaaggaaaggttaaaggtttgggtaaaattgctatttcaaat

SEQ ID NO: 24477 - DNA, 1303 bp, Zea Mays
atctccacctatcaccttcgattcctcctaacctcgccggtccacctgcaaccgtgacggttcttgttcttcttcccacccagcgtgcgctccctcttcctcttccccttctctctcggcgacgactgggtggccgtagctgcctccatacgcctggtgccctggtcttcttcgggccattcgccggccgcgagcaccaccaaaagggagagcttcccaggtagagctgtttctccgtactctagcagatggcaaggataaagcctaagcaattgctaatccaaagcaaaacaaagaaggctccatctcgaatcagctactctactatcatcacatggaacttgattgtcatattggttgtgctatctctctatgctacctacagccattggcatcaaaggtctgcccaagacttcgaaatggagcttcatgaagctgagcttgctgtgagaccggaggatccaaaaatgataagtagaccaagatatgcggtaatgaacaccgcaaaaggcccaattactatagaaatatacaaagatgcttctgctgacgttgtggatagatttatcaacttgtgcaagagtaatcatttcaaaggaatgccatttcggcatatcataaaaaattttgtaattcaaggaggtgattttgattttgatggagcttcccaagaatggataacgaaagctaaagctagtggaaaaaatgatctcagtccaaaacatgaggcatttatgattgggactgcaaagaatcctaataccaaaggatttgatttgtttatcacgacggctccaattcctgacttgaatgacaagcttgttgtatttgggcgagttatcaagggagaggacatcgttcaggagattgaagaagtcgacactgatgagcattaccagccaaaggccgccataggcatcatcgatatcgtgctaaaacaggagccttgagcctggatgcacatgatgacgttaaccacatgccgacggacttttctgtagttggaaaatctatctcatcgagttggtttttgttttggtgccttattatgtgttgttgcgtggaaagcagttgtgacgcttgttccaggagtcgttgcagcagcgtttgtgtataaaatatattcacagggtttttggctgtcagcatgcgcgagcatatgctgctacaccttgtatcgtggttgtggtaacagtaagcaggctattctctgctattgctaccagtaatcggtttgggccttacgatttgcgaatgaatccaataaaatcagcgcacgtgcttctggtcgttaaaaaaagag

SEQ ID NO: 24478 - DNA, 7390 bp, Zea Mays
gaagctagttacaggcggcaagctgctttttcaagctctgatgcttctgccgacagggttgacaggctccagttgggatatgtctctggtgcaagagtgctgaagatgaaggagaggagctctttatgcgaaagtgcagccgatggaaactggggtttgaaatataaaaggaaaagaagcaagttaacagttagcccatctaatgagaatgaggctacctcaccaacatctgactctcgaatgagccatggttccaccaaaaagaagttgaagcatgacaataacatttctccatcagccaagaagataagagggcacgatgggtattttttcgagtgcgtagaatgtgatcttggtggcaatttgctatgttgtgatagctgtcctcgtgtttaccacttggaatgcctcaatcctcctcttaagcgtgcaccccctgggaagtggcaatgtccaagatgccgtccgaaaaaagttagcttgaagctgttaggtaatgcagatgttgacacttctaaacgtgaaaaaagtacaaggacatatgcaagtacggcatcagatagtccaccttcgcatacaaaagtctcctttaagaccaggaactccacacaagacaaaactggattaaacgaacaaggaaaagagtcatctggtggcacaatgaatgggggtgaaaccagtacgaagaataatgaagttgagaaaaagaagacactgatattacatttgaagaagcgttcaaccaaggaattgtcagagaacactaaaccctcgaagtcagaatttgttgaactttcagaagagaaaattgtaaaacatggaagtgttttgaaactcaagaaacatccacatcgtatggacttgtctccaagtaaatctaaaaccaggaggcaaagtagccagagagagagtaaaagatctggcacaaaaaagattaaatattccatgtctgatgatgacagtgtttcctcatcagaaccatcgacatctcttgataacagtgaatcaccaccaaaaagaaaacactcagatggaaaagcaccttcatccagtaccaagaaagggaaaaagaaagtgaaatttgttgagaaaaagcactctgaggagcagggcgtggtaggtgacaaaatgatgactacccaggaggatcagcaggtcgatcgcatcctaggctgccggcttcagatgagccaaatcaacccgccgtcccatgcttcattggagcagtttgaatcagctaatctccaggtggatggtatggttcttccacatgcttccgctggcattcctaataggcctcatgatggaacagagtcttctagaaatggtacaattgaggatatatgtgctgatgaatcagccaatcatagtggtcacaatttagaaatgcgaaaggatacggacagtaaatcccatgaaaaggagtcacataagcgagaacaagtcaagaagatattatcagtatgttctggtgatgagaccaatataatgaaagatgatcaagtagtcagagaaaatgtttcagcttccaaaaaaggtgaagatgagacatctgatttgccagcagaaaaggatgataccatacttccagtcaccagagcttgtacaatgatcaggaccaatcaagatcatacagatgaaagtaaacagcatgggaaaatagaacaaataacaaataaggactacaatgatgctggatatgagttcttgatcaaatgggttggaaaatcaaatattcacaacagttgggtttctgaatccgaggtaaaaatattagcaaaaaggaaactagaaaactacaaagcgaagtatggaatgagtttgataaacatttgcaaggaacagtggtgccagccacagcgagttattggtcttcgtgcttctgtagatgaagtggaagaggttttaatcaaatggtgtggtcttccttatgatgaatgcacttgggaaagatcagatgaacctaccctgatgaaatatagccatttggtcactcagttcaagaattttgaatgccaggctttggataaagatgtggtaaaagattatgcaaatgcaaggaaccgacatgagcttaatgtgttagttgatcagccaaaagaacttcagggcggcatgctcttccctcatcaattggaagcgttgaactggctgcggaaatgctggtacaagtcaaaaaatgttatccttgctgatgagatgggtcttggaaagacagtgtcagcttgtgcttttctatcatccctatattgtgaatttaagattaatttgccatgtcttgtcttggttcctctttctacaatgcccaattggatggctgaattttcatcttgggctcctcatttaaatgttgtggagtatcatggttctgcaaggtcaagatctatcattcgccagtatgagtggcatgcgggcgatgcaagccagattggcaaaacaaagagatcgtacaaattcaatgttttgcttaccacttatgaaatggtgcttgttgatgctgcatatcttcgttctgtctcatgggaagttcttatagttgatgagggacatcgcctgaagaattctagcagcaaactctttagtttacttaattcattctcatttcagcacagagttttgttgactggaactcccttacagaacaacattggtgaaatgtataacttattgaacttcttacagcctacttcttttccttctctatcatcatttgaggagaagtttaatgaccttacaacagcagaaaaagtagaggagctgaagaaacttgtagctcctcatatgcttcggagattgaaaaaagatgcaatgcaaaatatccccccaaagatagagcgaatggtacctgttgaattgacatcaatccaggctgaatactaccgtgctatgcttacaaagaactatcaagtactgcgcaacattggaaaaggtggtgcacaccagtctttattgaacatagtaatgcagcttcggaaagtctgcaaccatccctatcttattcctggaactgaacctgaatctggttcacctgagtttctgcatgaaatgcgcataaaagcctcagcaaagctaactttgttgcatttgatgctaaaaatattacacaaggaaggccatcgtgttcttattttctctcagatgacaaaacttcttgacatccttgaagattatctgactttagaatttggccctaaaacatttgaaagagttgatggctcagtatctgtggcggagcgccaggcagcgattgttcgctttaatcaggataagacacgttttgttttcttgctgtctacacggtcatgtggacttggtattaatttggcaactgcagatactgttatcatatatgattcggatttcaacccacatgctgatatacaggcgatgaacagggcacacagaattggacaatcgaacagacttctggtttacaggcttgtagtacgtgctagtgttgaagagcgtatcttgcaattagccaagaagaaattgatgcttgatcaacttttcgttaacaaatcagaatcacagaaagaagtggaagatatcattcgctggggtacagaggaactctttggaaatagtgacagtgtggatggtaaagataacagtgaagtcccaggtcctgttgctgatgttgaatttaagcatagaagaaaaactggtggcctaggtgatgtttatgaggacaaatgtattggtggttctaccaaacttgtttgggatgaaaatgctattttgaagcttcttgatagatcaaaccttccatcatcaatggctgaaagcactgacggggatttggacaatgatatgcttggtactgtgaagtcaatagattggaacgatgagctcaatgacgaccctggtaccaatgaggatactgcacctattgacaatgatggtagcgagcaggcatctgaatcaaagcaaggtgctaccaatcgttcagaagaaaatgaatgggataaacttttgcgtgtcagatgggagcaatatcaaatagaggaggaggcatgtcttggtcgaggcaaacgtttaaggaaggctgtttcttacagagagacattcgcaacacttcctaacgaagctttaagtgaggactctgatgagggagatgaaccaaagagagaatatacagcagctggactggccttgaaggaaaaatatggaaagcttcgagctagacaaaaggaaaggattgctcagcgacacattatcaagaactatgctgatgataatcttgaagagttcatgactccatacgactctattgctaatgaacctgctgaaaatcctttggtaatcgtagaagatctaaattcttcacagctatctggcgcgaaacgtttcagtgactcaactggagaaatgaggcaatcctccaagaaatcaaagagatattctgaaatccctcaagatctttatgccaaaattcctggtaacacagcttcattcaagcaccactcaaaggccactgatgtattcaatccagggaccccaaatcacttgctacctgtacttggcctttgtgctcctaatgctgatcaggtgaactcatacaaaaactcaatttgtgcaccaagcataaaggagcgtaaaagggccagtggtgacattgtcaaacaactgtcaactcctgctgaccattctaatgtgcatagaaacgaagctcaatcagcttctgataaggccatctttcctggtgcatctgaggaggctttgcgaagaataagtaacatgattccagatagttattttcccttcagtcatattcctcctatatcagggaagggggttgatcctgttgaaaatcctggaccctccattgcatcatttcaagggaatctgggtcttccaaacttcagtctggaagacaacgctccacttaagcatattaagcctatacctgatatatttcctagcctgtcactgggtgctcataaggattatattcgtagttctgtcccagagttgccagatggttcattgctgccaaacttcatggcagatattactggtacttcgaagcaaaagtcatttatgtctggtctacttcctgggctgggtcttagcccagggcaaccaatacattcggctatgcctgataatcacaagaaagtcttggacaatataatgatgcgtgctcagtatgcgtcaaacaaattcttgaagaagagatcaaaactagattattggtcagaggatgaacttgatgctctgtggataggagttcgtaggcatggaaggggaaattgggatgctatgcttagagatccaaagctgaagtttttgaacaaccgaactagtgaggagctggccttgaggtggattttggaggagcaaaaaattatagatgaacctatgtctacatccaccaggcgttctaactcagcagcatttcctggaatatctgatgcaatgatgtctcgggcactgaatgaaagtaatttctctaaaatgaggatggagcagcctaaattgcagtcccacttaactgatattcagttaggttcgagtgatatcctatccacatttcctcatgttgacgctgctagttacattaactcaggggagggtggcccatctcaaataccatggcaggattttaagcatagatcaagttatgctggagattttcctgccggtgcatttgacaagttggagaaacctgatgttggaccgatcccgccatttatgccaaatcctttcatgactgacagcattggttcacttcccataaacagaaaaaacaatagttccatcccgcatagtgaaatcaggtcaagttctcgtgagaacattctttctggtgtttcggatggacagatcaacttgcttcatgagatgcagcgtcgtcgtcgtgtgaggtcaggcaaagaacccattgagatgaatctcaaccacatagaccactcaaatctccagcttgataatactagtgaccttggaggtttaaaaccaaacaagttacctcattggcttcaggaggctgtacgtgctccttcatctaagccacctgaacgtgagctaccagcaacagtttcggcaattgctcagtcggtctgccttcttcttggagaacaagaaccatcaatacctccattcttgatcccgggaacacctctttctcgcccaaaagatccaaggattaattcaaagaagaaactccgcaaggctcagcaatctaactctcatgtagagcattcaaaaattggatctggtgagggtgattgtgtcactaccccagcacccccatccattgaagcttcacctgcacttcctgtcgattgcgatgatggtgagccttcactcaacttgaaatctgcatcgttgtcatcttcagctggcagcaaggggctagatgaattacctcccacatttaaagaagcaaaccaaaccgtggatggctcagaagctgttgcggccaagtcagatgctcctgaaattggttgtcaggtacctggttcctctccattacatgacaaaggtagtgaatcctcggggtcgccagtgaaggacactcctgacgctggaatcagattgccaggatcagataactcagttatggcattttctgcactcccacttgttgatgaagcacctgggacaagcagcagagcagctgacacgcctgtgccatgtgatggcaatgagtcgaaagaggatgttccactagacaacgctgaaagcaccaggaaactggagccgaacggatgaactggctcctcttgcgagcatggatgcatcgcatcgagtttctgctaatacagccgacgaagatgggtggatgaaatgatcattagactcgagctagttagctcaacattcctttcttttgcgttcagcataacactgggattttccctctcccaatgtttccagtgttgatctcgtgttgtgtaatgctttagtgcaggtctcgttgcagataggatgaaacgcaaagggctagtggtacttagcagtagttgggcactagtccgtcgggggagcaactcgtggaaacctgtatacaagaaatgtatattttgctaatatggtgctggttgggtgtgtagaaggtagaccgctattcgtttatttatgcgtatatggtttagtaatttgccatctgtctagcggtggctgtaagagtagacgtgatgatgatattgcctagccttgactcgttggcctccatgcctagccgaagagaagctgtgttcatactgacataactgacatactgagcgacttttgactgtttttttttatttcattagcggcaacgaagccaagaaccatgatcttcactcttttgtccccaccccccaaaaaaaaccccggaactctcaactattgttgtgcactgtaatttacctcttcaaattagaaaagtgatgttttg

SEQ ID NO: 24479 - DNA, 3567 bp, Zea Mays
tccacctttgtgcaatagttctttccctccagattttggttcacagggtgaaatatttcttccttttgaagaaaacagatcatcaaaggttggtgtaaggtttgataaaaaaattctgggaggaaacaatcttggaggcaattgtgaagttgatcatggtttgttctgttctgttgattctttatgccccgacattccaggatgggaggttacgttcaaacatccatttgatgtgatagttgagtttatctctgaagaaattcggcatggccctttaatcctttttctgaaggacacagagaaaatttgtgggaataatgattcctatcatggtctgaagagcaagctaaaacattttccagctggcgcttttataattggatctcaaatccagcctgacaatcgcaaagagaaggcaaatgttagttctccttttctttcgaagttccggtacagccaagctatacttggcctcacattacaggacattgatgggggaaatgataataataaagaaacatcaaaggcaataatgaagcatttgatcaaacttttcccgaataaagtgacacttgaggcaccacaagctgaaatggagctttcacggtggaaccagatgttaaaccgagatattgaagtccttaaaggaaatgcaaacatttcaaaaatacgctcttttctaacaaggcttggattggaatgcactgaccctgaagcgatattggtcacggatcgcattcttacaaatgagtgtattgataaaataattggttttgctttgagccatcaacttaagaactgtacaaatccagacccccctttgggtagtgtgcagtttgctctatccagcggaagtcttaagcatggcgttgacatgttgaaaagtatccagtctggctcgaagagcagcaccaaaaggaaatcacttaaggatattgctactgaaaacgaatttgaaaagagccttcttgctgatgtcacccctccacatgaaattggtgttacctttgaggacattggagctttagaaagtgtcaaagatactctgaaggagttggtgatgcttcctttgcaaagacccgaacttttcaaccgaggacaacttatgaagccatgtaaaggaattttactttttggcccacctggtacggggaagacaaatgctggctaaggctgtggcaactgaggctggtgctaatttcataaacatatcgatgtcaagcatctcttcaaagtggcttggtgaaggagaaaaatttgtgaaagctgtgttttcactggcaagtaaaattgctccaagtgtaatttttgtggacgaggatagataatcatgcttgtaaggatatgttgcacttgaactttccttcctgcccttgtcattaagtcagcctttcaacttgggagttgatctgcaatcttatcaacaaggggctggtgctgctgtctagtcaacttgtgaagagataaagggagccccaggttgatggcatgttgggaaggcgggagaaccctggagaacatgaagccatgcggaagatgaaaaatgagtttatggtgaactgggatggtctgagaacaagggagaaagaacgtgtattagtacttgctgcaactaacaggccatttgatcttgatgaggctgttgttaggcggcttccaaggaggttgatggtgaatttgccagatgcatcaaataggagaaaaattcttagtgtaatactagccaaggaagatttggcagacgacgttgatctagaaactatagctaacctgacagaagggtactcaggcagtgatctcaagaatctgtgtgttactgctgcacaccgtcctattagggagattcttgaaaaggaaaagaaggagagagcttcagcagaagcagaaaatagatcattgcctccgtcacacactagcaatgatgtccgtgcattaagaacaagtgatttcatacatgcgcatgaacaggtgtgtgcaagtgttccctcggattccagtaacatgagcgagcttgtgcaatggaatgatctctatggagaaggcggatcaaggaaaaagacaacgctaagctacttcatgtagcttaggttataaatatattgggagaagtgccctggcacaaagcagcaatagttggaggcggtgcagttggaaaaaaaaagctatgctcatctgccagacatccatatcaaagagaattgatggttcaggtggagcggaatagaatggaatggaatagtatacatacacatggttgctgcctctgctctgggccatgcatcatgcatctggacaggacggctatcctggcttgcagttgccctatgcagttttgagtgcaatggtcaccatctgtgaagcacggataccacagagatcctggccccaaccactcttttcacaaatggagctgaggacctttggagttctaccaaaagtgatcttaaatctttgttctttgactttccgttttgtgaacggaaggccccactctgctagtatggattgttgatcctccgtttctctggtactgactgaactgctcatacaaaactcgttcaacaggcagaaatgctgcctggtggccttctagagtgcttctttgacgccgcagagagcacatcaaaaaaaatgtgtttgtttcgaacgatttgtgctgcattccattcacggcgatatcaggtgccgttgtttgtgtttggttccgcaatcaagggagtgaaagccattagcacatccaatcaaacaaatagcgatatctctttcactgtaccagttagcgctggtctcggatgctattaacattgctgttgtctgtctcggaaccaaacaccgcctaactcgtcggctgttaaatatttctgaactgaattactgcacttggttggggtttcatgcttatcaagttggcttatatagccaacaatactttgtgcagttctgcatcctctgcctgcttatgcgcgatctcattggctgagcggtacgaagataaaacggtagctaatccgaagcgatggcttctctttttctttctacggtattttgtctctatgaattacagttacagcagtcagaacagctgatttaaaaccgcagcgaaaaggctgattgccttgcccatttttgggtgggtggaggttaatacagatttctgtaatttttttactttaatattgtttgacatattgtgcaaggcaaatgatttcctaatgatttgttctacttgatattgtaatccatattgacctatatgctatgctcagttccttagagcatctccagtacttgatattgtaatccatattgacctaggggaaaaaaaggagaatttaacctgatgacactggtggactatgctatgctcagttccttggaacatctctagtagttttgtaaaaaaatctctctaaagacagatgtaaggagttgctacataataatagggagtaaaaatatctgtactctcatgtagtctttatttttagttaccaaatattataaattatgcctgctgaaactcctctccctcacgttatagaaagttttatgtttttccaatcaaac

SEQ ID NO: 24480 - DNA, 149 bp, Zea Mays
ggggggggaggtgaacctgcggaaggatcattgccgtgacccttaaacaaaacagaccgcgaacgagtcacccgtgccgccgggctccgggcccggcacgctgcccccccgaacctcccgcggggaaggggggtgccgcgaaaaagaac

SEQ ID NO: 24481 - DNA, 1294 bp, Zea Mays
caatgctaactgtcatggagcatggtgaaaagctctctggaatggcacaccttagggagttacaaaacacacttattcagcatggctcaagcacccatttttcacctcagtcgaaaacccaaggtactggtgccctttggaaccttattcagttggttggtgagaaagctcgaagaaacatggttcttttaatggatcgtgataatgctgaagtgttctacagtagggtttctgatatagaggatctattttattgtttatctcatgaacttcaatacatcattagtagagaagaacacccttctgttcagatgcaacgtgcacttgagttagcaaatgcttgtatcaccatagttcaggcagcatcacactacaagaaggatcacaaggaatggtatccatctcctgaaggactgataacatggaacagccaacctgttctacggtctggaatctggaatttggcatccttgattatggagcttttgggagaatcaggagctgcagacatgtcaatgaaatccagtctatggtctcagctggaaggacttacagatattctactggaggcatatatgtgccttttaactgcccaatttgaacgtgggcaggaacatggtgtgctagtgcaagaatattgtgaacgaagagatgaacttctcagatccctctacaaccttgctaaacaaatagtggaggccaaataccaggagtcaagaaatggtgcggacaagccagatctgaaggaatctatacttagagaggttatttctcctattttagcgacagccaaacgacatgaagggtaccaaacactgtggcagatttgctatgatctagatgattcaggtctcctccgcagcctaatgcatgatagcgtagggcctcatgggggattcagtttctttgtctttaaggagttagtcaacagaggagactactctaatctgttaaggctaggtgaagaattccaggaagagcttgcaagctttctgaaagagcggagtgatctgctgtgggttcatgagatatgcttaaaccagttctcatctgcttccgacacccttcatacctatgctctgcgtcgtagtcctgatggagatgccagcttcacaaccagcagaaagccactatcctttgctgaaagaagacgtcttctttatctctctaaaattgctgcaacagcaggtaaggacattgattatgaagtgaaggttgcacggatagaagcggacattcggattctaaaactgcagaaaattgaagggagtatgcaaagtgaatgcgattagac

SEQ ID NO: 24482 - DNA, 1311 bp, Zea Mays
cgcggcctttcaggcactccctggcggcggcccctagccagcctctcgcgcgtgcgcagccggcaccctgtggctcactcagcagctgcgcgcggcaggccagcagtggtagtggacagcggcagcggctgtgctcggcggcccctgtgttgatgtgcgctgctcagctgctgtgcccagcggccgacacctctgcggctctcctttgctcgacgtcgagcgagggagaaattccagcaatgcttgtcgtgcaactgccgccacctgaggtagcgggtgaggatgagagcaatagccgtggtgtcttcgtggagttcatgaccaaggtcgctcagttcaatgagcttgttgaatctggggagcgattgcttgggagatttcgtgaggagcttgagtattttcgtaggccgcagatttctaaggaagcagatgtaatgaatcagatacttaaatcaaactgcactgtcagaatgaggtcctatattgaaactggctgcagggtccactgccaaaacatctcaaacattaatcagctgagctcatgcgaaaatggacttaaagatcatataaagaaagttaagaccttgcttgaagagcttgaatgtctggttgagaatgtctatggcatcacactaacagccagtttaagtgctctggaagtttcagacagtcagtgccttgacagcatgctaagtaccgatcgctgctccgtggagtgaaatggaaaatgggtgacagggtgtttgtacacagcaggaggacagaagtgcagatcggttggacagggatgtgtcgtttgctacagtaatggtcatggttcgcaacgcgctgaaggctgactacacgatgcaggtaaattgaagtgccaggatgtgcatttgctttttgcgctttacattttgcctttctcttatcttgcctacaggaaaagattgtctgtgcattgtccttgaaaacaccatcatcagagctcgagggatactgcctcatgtggaatttacgcccgtacatcgatgacgatgtgatgcgtcttgcgtggaaaatgtgtccttagtaggcgcaaggttcgtcattctagcaacaagtaccagaagccggtacggattaaagccaagcttgtttaagctgtttgtcttcaaaaactcacagcagttcacgattacccaaaacattgtttgtattgtacatttcactgtttgcatatgtatacactatattaaagccccctcaaattttcttagatcaaaccaccgtcctctcttccctcgtacccatgtgtcagggatcaaaagagataatggagccagtcag

SEQ ID NO: 24483 - DNA, 1692 bp, Zea Mays
gagcgggcctagagctctaactacgccgtatgtcatttgaacgcgtatggttatattcggatctcacgacgagaggctacaggcaaaaagtaaaagacatagtgcaaggtgctctgtttccagaggttggtgtggataaaaggactggatctgctggtggaactggcgggcaagtagttgttcgagacattgaacttttctcctattgtgagtcatgcttgcttccattcagcatacagtgccatgtcgggtatgttccctcaggtggaagagtggttgggttaagcaagctttctagagtatctgatgtctttgccaagagattgcaaaaccctcaaagactagctaatgaaatctgtggtgcactgcatgctagcattcaacctgctggtgtggctgttgctctgcagtgctggcacattcctttaccagaaaacttggaatgcaagactttggaaggttggattagaacttcacattcatctcgctctggagtctttgaaggtgaaagcagcactttctggagtgacttcttggctcttgttaagcttaggggcatagacgtggaggctaaggaccgtactgtttctattccttggtgccctttaaggtctcatgaggttccactctctaacgggctctgcaagaaaaactcaactaatggcatggtttctgctgttacctcgatgctcttatcactcggagaggaccccctcaggaaagagcttttaggcactcctcagcgttatgtgcagtggctgatgaagttcaaagcatgtaatctactagacgtgaagctgaatggttttacacttagtaatgttagcttatatgagaggacaggtggaggcacaactgatcatggagcaatcagatcggagctgcacttgccattttgtgctcaatgtgaacaccatcttctgcccttctacggagtagttcacattgggtactttggcaatggaagcggagaaggcattgatcggtcgcattttcaggcgttggttcatttctacgggtgcaagcttcaggttcaagaaaggatgacaaggcagatagctgaagcggtttattcagtttcgcacaatggggccatggtcgttgttgaggccaaccacatttgcatgatctcaagggggatagagaaaataaggagcaacacggcaacaattgcagttttgggccagtttttggccgacccttctgccaaggcgtgcttcttacagaatgttttggattctgttggttctgcggtatgaatcgtatcgcaagcagcaaagaaaaaaatgtctagttggagtactatccagcaattgaaatttttagcaatctactggtctagcatgattcttctcgggtgcaaatttgtcacctgtgggactgtaccgaggatgtcacaagaaagcaccaaaagggttttggttctctcgtgttgtaccatgtcacttgtaaggcacttcaaataaaaaagaaatagtaatagttacaactgtgccaagaaggatatagtcattcgtacttttagatgttgtcaaaattgccatttgttcttgaaattttagtggagattactctggcttttgttgttgtaccgttgaatttgatgttacgccgatcgagatcagtaaaaaaaaaaaactcagatatctgttcgcttgaccatggtccaacgaaatgtaattcgttcttgca

SEQ ID NO: 24484 - DNA, 1194 bp, Zea Mays
aacagatggaggccggcctgcgcgcgctaggccaccgctacttcggcggcggcggcggtggcctcggtgggttcgcggccgcgcgtgccacccggctccggcgccagcgccagcgccgcatggccgccttctgctccctcgctgttaatggagatgggaatggcgccgcgggtggccccgtggggagcggcgtcgaggtggcgcgcgccaggaggatgctccatgtcgtgctcgtctcgccgctgataccaggaaatacagggtccattgcaaggacatgtgcagcatctgcagttggcctgcatcttgtcggggtaagccattaggctataaggtagacgacacgaagttgaagcgcgcgggattggattattggccatacgttgttgtcaagattcatgactcttgggaccacttctgtgattatttcatgaaacaggaaggagataaaaggctgttggcgttcaccaaaagaggcacacacatccattcagatttctcctacaggccaggggactggctagtcttcggttccgaaacaaaagggttgcctcagcaagccctcgaggattgctgcagagaaggcctaggcggcgggaccctccggattcccatggtggagacctacgtccggtgcctgaacctctccgtcagcgtcggagtcgcgctgtacgaagccgctagacagctgaactatgaacagcttcagtaccagcctgatgagctcccagaggaggcgcaggagcttttcccggcagaggacatttatgcgtgaaaacctctgcccgagaacaattacacgttacacgcattgatcacctcatttttgtgtgtgtgtgtgtgtactgtttgccgtgacacatgattgagctggagggaccacgcactgcacgattctgttgcgaattcaattccaggccgagtccttgtccagacggtgttgacatgctcattcaaaatggtgtacctgatctgcttggaagaatcgttttagtgccatgtataatttcgcagtcagaactcagaaggtgattagagtatgctgcgatggggtctcgttctgacttcttttttgtgtgtgtactggttactgaaccataagctttgttaactgcaactggacgctgcgtcctgttgcttctctgtcagtgtgtgtggtgaggaaggaaggttggtgcgggagctttactgcca

SEQ ID NO: 24485 - DNA, 1008 bp, Zea Mays
tttaaacctcaattcagtatgcttcttttttttttgcatccgcgcgcgcatcagatggatacacgaatcatcatccccaccaaatgggcatgaacaacaaagaaaaaaagaaaggaatgaaccgagcgaggccaagatcaatggcaatggcagtaggagtggcaatggccgctctcccgcgccgcgcccgcgctcgcgcagggggtccgggcctggagcggcggcgccgccacgccgcaggctctccggagctcctcgtacctgcggaggtcgaagccccgggcgcgcatcacgcgcttctgcttggccgcgaaccggctctcgaagaagccttcgaacgacggctccttcttggtgcggaggaagaaggcgtagccggccatgaagtacatggacgtgacgtagaagcagatgggctccatcacgtcccacgacagctcccagaaggtgagccgcatgaacccggccgtctggatcaccaggtacgtcagcccgcaccacagctcccgccgcacccgcgccgccgccgcgcggtcgatctccgccttctccgcctccatggccctcagctcctcctccctcgcggggtcgatctccgcggcggcggcggcggcggcgtgccgcacggggatcgcgttctcgattgccttcacgaccatgtcgggcctgaggaagacggtctttccgagcacgatgacggatccggactcgtcgagcgcgcgcgcgacggaggggcccgcgtccgggccggcggcgtcgcagcagaggcgcaggaagtcggcgtacggcacggcgccgtcgaggttgatccgcgggaatgcgacgccgaccccgaggtcccggatccggtcggccaggggcatgaagcggtcgggcggcacggcggggcggaacgccggctgctcctgcaggaaccgccggagcccgaacgtcgccggcgacgacgacgacgacgacgcgaagcactgcgccacgggctctcctcagcacggccgccattgctgctga

SEQ ID NO: 24486 - DNA, 133 bp, Zea Mays
tgtagggctttcccaccttcgaaaaggaggaacccttccagaaattctcagtggcccaaagagccaaagagggggtttggaaatagttttcaaccagcaattgacgcgcctcggtatgacctcataagctgcg

SEQ ID NO: 24487 - DNA, 2430 bp, Zea Mays
ctggtcacacacacgcagcaaccaccgagcccagcgcccggcccagccagccagggccaacggcaaggcaacaccctcctcagcccgacgccgacgctcgccgtcatcctcgtaaatccacagcgcgcgcctcccgtcctcccaggcctcacccctagcgatgcgccactcccggcgctcgtgatccatggcctcactccccgttcctcacactcttccgcgggtctcgccagcgatagtgggcgccgcgagggggagggccgcggtgcgcgtacgcactgccaccgcggcattgggcggtgggtgcggcggcggcggcggaatggagcagcgccacggggatgccccgcacagcccagaatccagagggtgacgtgtcggacggggccgggtggttgttcctgtacatgaggttatctacctgctgcatctgcttcactggtcatcagccactgccgctaacctttgtgtcctggcgatcatccggtaaggatgatggataagtaaatacgtgtggaactggatctcgaactggagccgattggacgtttgacagcgatgttctactcctgttctagtatatttcccccctctttaagaagggcagtaggaaggttggtattgtcattctgacggctcgcgttctgttcttttgatgattgttcctggtcgctcggagggttgtcatcattcatcaatatcgtggcggcagataattctggtaactctggatcgtctagttttcccgaaagcatcttaatcgttcacaatgacctaatagcaattcgttccacagtgatgaggaatcttataaatacatgggatgggacgggtggtgttttcaaataaacttgaaacgtgatgcctcaatggcatacatcttatgaattgaggtaaaagatagtgataacttgttagttcatcgttcacaattgacgaaaaaacataataatataggcaggacaaagaaacaaaccactttgatttatgtgtcactttaggatcatggataatattccttacaagaacttttattttttcacagtttcctgtaaataggaatatcagcctttgtgtatctgatgctgtgaagcaaacattcgttaaaaatatgcgtcgcggttatgtccttataagttatgctatgccattttatttactttttactgttgtgcaaatggattgaacaacatgaggaatagagctgtactaaccgtttagtgatatccatcatcatcagtgaaggagaagcctgtaatgtcaaacattgggaaatcgactaatattttatggcacaattgcttgattggacaatctgatagacagaaattgctgggacaaaaaggctgtgtcgtatggataacaggactcagtggttcagggaaaagtactcttgcatgtgcactgagtcgtgagttgcattgcagaggccacctcacgtatgtacttgatggtgacaacctcagacatggcctaaatagagatttaagctttaaggcagaagaccgtgcagaaaatatacgaagagttggtgaagtggcaaagcttttcgctgatgctggtgtcatatgcattgctagcttgatatctccatacaggagagatcgtgatgcatgccgtgctctacttccacattctaactttattgaagtatttattgatttgcccctaaaaatttgtgaagctcgtgatcctaaaggcctatacaagcttgcacgtacaggaaagattaaaggtttcactggaattgatgatccatacgaaccaccaattaatgtaattaagatgaaagatggggaatgcccttcacccaaagcaatggccaagcaagttctatgctaccttgaagagaacggatatttgcaagcttagcatatgtattttgagaagattgatctgattcttgtgtgtccattacttgtggacacaataagatctgttgttggtcacatgaataaaaggcatcaacacgtaggaagtaacagaaggtaccgttcattcagaaacggaaatggattcattcgtttcattgttgatgatatttgtttcgcgtgtattttgcctgcatagctgtgattcatctgcatcagcaattcaggatgcattcggttaactcgcgttgaccgttcgcgtcaattcgggtagttgttctgtgcttgctagttgggttctgttggcaatgtatttgttacaagtaaatacggacaatgtgtgtaatttgtgtatcactttttttcctcttggaataaaaaccgaggaacattgtaacttcttccattgaattcatgcttttggcttttgctgcctctttcattgttgcagtttctgaggcagtaagaacgggtttacgaacccttccacagaaaaagctgccattttatcttgttatatgctcttttttcatacaggaagttatattctcaacttctc

SEQ ID NO: 24488 - DNA, 2227 bp, Zea Mays
caacagcacctcttaatgtctttcatgaagctgaaggtgcttccacagagcaggcattatcatcagctctaacaagtattatggatgcgctgaagagtactgactggaatacaaggaaggctgcctcactagctctttcaagtattgcggtcagttctgggtatttggttacctctttcagaacttcctgccttcgctcccttgagcgtagtaaatttgacaaggtaaaaccggtacgtgacaccattatacatgcaattcagctgtggaaagctattccagggtctcatactcctgaaccatcagaagctgggtcatcaacaaaagagaactactttggagaccatcatgacgccagaagtatacatgatggaggatcaagagatacttcttttaggagaacagatcatgggccttctgtatctgttatcagtggtagttctctcagttcagcaaagcggaggtctcctttatctattaacaaagtagccataaacaatgctgcaaatttgcaacggatgaagactggtgattggcgtgttgaggtgtcagttccaaagcagagtatgataccgctggttaataatgacgagaagggatccagtaaagcctgcagcctaaaagatacaaagagaaatgcatatgaaagtgttgatgtagacagtaagtttgactatgacattgtagatgataaacaagaatgctcctctgtgtcagaagtagccagcaggagttttgagacaaagcatgtcactactgctcaggaatgcactgaagattgtgattcagcagaagttacagaacaatgtcccaggggtcgagaaagtaagagcataggctcaacaattacagatgttactactcatgacacacatagttgttgtctgaatactatgaatgaattggcccttgttaggaagcaacttcaagagatggagaggaagcaagcaaatttttttgatttgttgcaggaatttatggccagctcagcagagaacatgtcagtgctaaatttgaaggtgcacaacttggagaatgctgcagacaaaactgtatatacaattactcagagcgaaagccggtatcatcttcctggctccaagcattttaagaaccaaagcgtctcttctttgcctaggctttcgacttctacacctagatcatctatggatgttaactacaagccaccaccaatctcagagttgaaacatgagaagtggatgcgtgatctaccatctcggggctcaaacatgtgttgtaaagagggagctgattttcgaaaggatcatgttcgcagtaaagttaggaagcttgggcctgtgagcttagagggtaacttgggaagatgtgatccaagctcagcaagaagtcgaacatcaggggttaaagggacttatccagtttcatttaccagttcctgtgaacaatctggactgcgaaatgcattgtgcacctcaaatcaacctggtgagtttcaagatactgatggcatggaacctgcatacatggaagccctgaactgtggtgattatgatgatctgattgacctaatggatagaactggaccagttctcgaaaagttgtcgtgtgagacgacaaatgagcttttgagggttatagctgaacaatttcttaataagaagttctttgacttggcactgccttggcttcaacaggagttcctttctgcattggaggaagctgcaacgggtggatctatggaaccagccttgaggattgcaattgcacagctcggatttaaactatccaaagcttttgaggttggcccatgcaggaaaatctcagccagaatgtgcagagaaaatgaaactatcatgaccaatgcaatgtgagatgtttcttgtctagtatatgctcaggccacgaaaacagtgctttagggagcttaagttaatttcttgtagcagcacaacctttgtaacttgtcgtatgatctgtttaattagcgtgtgaaaggctagaagatttcaatagaggttgatagtttggtagtttaaaacatgcgtgctttggttctctactgtaggactggaaacttttgctgtgtagcaatgtggcatgacttatgtttggtgctttcagacggggccgtacagatttttgcttgaattatctcactctgaaacactatcgtacctaacacaatgcttacaatggaaaagaaatgaaagaaaaaaaaggataaaataacggaagctgtttgtca

SEQ ID NO: 24489 - DNA, 139 bp, Zea Mays
ctggaatcggttcagccggaggtagggtccagcggccggaagagaaccgcacatcgagcggtgtccggtgcgcccccggcggcccttgaaaatccggaggaccgaataccgtccatgcccggtcgtactcataaccgca

SEQ ID NO: 24490 - DNA, 1743 bp, Zea Mays
cccgccacgaggagatgaccgccgtgcaggtaatggttgctacagttcgatgtgatgaaattgcaaacgagaagtttggatgcataacctcagacacagaatggttggatgtggagagtgctgtccaatctggtccagtacctggttttggaaaaaaacttggcaatatcgtcgacgttcacttgcaagagtatgacaaagaagctgtctattttgatgaagctgtaaggaaaggaaaacgacagcatttggagtccagaatactgaatcttgtccaacctgcattccagaaaatgttgactcatctgcgtgtgaaggctctagaaaaatttaaaactggtcttaattcatctttggagagtggaaaaggattcgcagtatctgctcgagacaatactgaatgctctctcaaagaatttgaacaaggctgtgcagtgtttagccatgacaaggattcaattccaagggtctggacaggaaaggaagatgttcgtgcaatagcaaaggaagctcgatctgcggctctcaaacttctgtctgtaatggcggccattcgctgggatgacgagccagataggattgaaagcatcctcacttcaacacttctggaaggctctgttgtatcaaagattgcaagtgctgcttctgctgatccacttgcttctaccacttgggaagagattgctccaaagcatacaatgattaccccgtctcagtgcaagtcactgtggaaacaatttaaagcagaaactgagttcacgattacacaagcagtatccacacagcaagctcacaggcgcggtaatagtaaactgcctcctccttgggcaatcgtggccattgctattcttggtttcaatgagatcatggtgcttattaggaatcccatttatctgttcttgctatttgtgggctacttgatggtcaaagctttggcgatgcagctagatgtcagcagagaattccagaatggagtggttcctggaataatctctgtgtcggtgaagctcctaccagcgatacagaacctggtgaacaaagtggcagccgagcagcaagctgagcaccagcagcagcacccgcaccctcaccctcacactcaggccccaggacccccacagccacagatgcagccgccgccgctgctcctgagcccgagaagccccatgagcgagctgcggaggctgcacatgccgcgcagcccgcgcagcccgcgcaaggtggcgtcgccggcgccatcctcgtcgtcgtcatcgtctgccgtgtcgtcccctaggcacgttggcgaggaccagaagccaagaccaggggcagtcggggcgcctgagaacgaggccaccgtcgccgactcgatagtgtgatccacgcaccagccatcgtggcgcgcgtttgactgctataggtacaaggtatggagtatgaactatggaccttctgctgtctcctatttcaatgcattatgtatagtgattatcgttatgcttcagtaggatatcaaggcagaaataatgcaggaccctcttctgccgtgcaatcctttagtttttgcaaggagagggaggggataatgcatagatggacaattgctacctggcaccatttttcagcatatgtatagaaaggagctacccatttgaaactgaaagtcgtaggcattgtttaattaagtgcgctagaaataccccagccgcattcagctctttttatatatatgctaacaccgtaatctaatgtttaaacgct

SEQ ID NO: 24491 - DNA, 347 bp, Zea Mays
aggagatctgtcacacccggttttgaaggtaaaccgaatgcgaaccatgtatgtgccaggatcagtaattcacgtacacagcgattacataaatgacccattatagcacaatgctttgatttacaataaagagtgagtaataatattacagactagagccatttacataatataaatcaaagtacaaagaatcgaaacgtagccaacgtaaacaaacccaccacaggcagctgactggggaggtcgctagcctaatcctcgaactcgtcgaagtcctggaactcctggagatccgcctcgacaccttctactttacctgagcatagattgcaccaaaggtaacctgg

SEQ ID NO: 24492 - DNA, 2439 bp, Zea Mays
acaaacctcaaacctcagtatcatcatcgccgccttccactccacggttccacgtatcgcaagaattcaaataatttttgcgctctcgcgtcgatctgcttcaagcaagccccgaccggagccatggcttccgccaaggagagctatcgcgccgagctccgcgcctcctcccgccagctcagcgagcgctgcctctactccgccgctaaatgggccgccgagctgctcgtcggcgtagagctggatgcggccccggtcccttcggccgcgatggactccccatcctcctcgtccgcagcctccgcggggcggctattgcaccttcaccgtagcgggggttccagcttccgccaccgaccccgccccggcggcggcagtagctcggaggccgggaccccgctcggtggcgtgtcatacgtcagcacgcccatccccgacgacgacgcgttcgattcgggcggcgacaaatacctgctggccaagacctatttcgactgtcgggagtaccgccgcgccgcgcacgtgctgcagaaccaggttgggcgtaaggcagtgttcctgcgatgctacgcgctctacatggctggagagaagcgaaaagaggcagagatgatagagcttgaaggatcgttgggcaagagtaatgctgttaatcaggaactagttgctttggagaaagagctctcaacacaccgaagaactggctctattgattcatttggactctacttgtatggcattgttctacgtgataaaggatgtgaaggtctagctagaacaatcttagtagaatctgtcaatacttatccttggaactggagtgcttggtcagagttacaatctttatgcaccagcagtgacattttaaacaacttaaatctgaagaatcactggatgaaagatttctttcttgctagtgcatatctggaacttaagatgcatgaagaagctcttaaaagatatgagcgtttgatgggggtcttccgctgcagtggttacattcaggctcaaattgcaacagttcagtacagtatgagggaccttgatgaagctgagatgattttcgaagaactgctcaggactgatccttttcgcgtggattctatggatatttactcaaatctactatatgcaaaagaaagcttgactgctttgagtttccttgcgcacagagtatttttgacagataaataccgcccagaatcttgctgcataattgcaaattactacagtctgaagggtcagcatgagaaatcagttttatactttcaaagggcactaaagcttaatcgaaagtacctctcagcttggaccctgatggggcatgagtatgttgaattgaaaaatagtcctgctgcaattgatgcctacagaagagctgttgatattaatcctagagatttccgtgctttgtatggtcttggtcaaatctatgagatgatggggatgccgttttatgcactttattacttccggaaatcgtcatacttgcaacccaatgatgctcgtctctggattgccatggctcagtgttacgaaagtgatccacttcaaatgattgaagaagccataaagtgctatgagagagctgcaaacagcaatgacactgaaggaatagcacttcaccaactagcaaaactgcatggcatgctggggcaatccgaggaagctgcattctactacaagaaggatttagagagaatggaggttgaggaaaggcaaggccagaattttgttgaagctctgctgtttcttgctaagcattacaagagcataggcaggtttgaggatgcagagcactattgtacaaggctcttagattacactggcccagagaaggagactgctaaaaatatgttgcaagggataaaaaggttacagtcaggatttccatcaatggatattgatcattttgcactgtaaactgttaagtccacccgcagttcctggaacttgacaacaaggagaaccaggcgcctgcatggtgcaaagatgagcgtcattggaatgatccagacccctaacccaaatatcagcatagctgccttgtggagagctctgaatttctgtgggtttggcttccttcaccggacaactctgcctaaggcatcagaatctgtacttggattgcgttgcgtggtaacattgtatgaaagtgagattgttacaatgagtataagaagtttatgtagaagaaggaaatctgacgggttaggcacaattttgtacatacagataaattggaaagctataacagagactctttagttgttgtccttgtactcgatgttgcaactaatctctctctccatttgttatagacaaatccatacacattctttagaaatattttattttcagacacataggtagtgggctgcatattttaatatgtgtagaacatattctgtcagtatttatttggccaaacctcgtatc

SEQ ID NO: 24493 - DNA, 1059 bp, Zea Mays
gaacaaaccagcccggggaagatggtcaaaatcagataccgacttgttttacgagggtcttcgacaaattggtagtgattttgcaatgatacaacaattattccctgataagactcgccatcaggtgcggcagaaatttaaatctgaggagagaaaaaatccattgctagtccatgatgctataactcatcgctcaggagataatttgtatttcaaaaaggtaattaagcagctcaacattgaagatgttgtgctgccagatattaaaagtacacaaaaacaagatggtgcatcaagtgaaagaggccctggaaatgagaatgtactggatgatttatacggggaggaaaatagttcaaattggttgaacgaagagcatgacgtacagatggctgatgtggaagaagagcatggcgaacagatggatgatgtggatctcggaaatgatggtggtgatgatgatcttggggatgtttttgattggtactagtttgatcatggctggatgatgtggaagaagagcatgatcttggaaatgatggtggtgatgatgatcttggggatgtttttgcttggtactagtttgatcatggctgggattaggactcacgatattatgattatgattctgctaatgttttgaggtacctgacttgctgactgttgagttgattgctaactagaggaagtgacagtcgacgatgcccaattgtatcagcatattcttggtgattagcatcagtaccagtggttgtgacagatatgtcctgctggatgccgagttttgcaagccgatggaaggtgtctgtaacgagttatagaatttgtatttttttattaccttgcacacgaatatagtgttgatggatggtagatacgtcacgtttacctttatttatagctactttatcttagttgttgttgctctcatgctctgtgactttaaaagcagtatcggtttccgtagagcctcagttggcatcttttttttttcctggtagccttcctggagaaagaatgcaagattgaatggtgtctatgctcttttttttagctccc

SEQ ID NO: 24494 - DNA, 376 bp, Zea Mays
atctggagaaggtgactagggaaaccagcagatatgagccaacaactcccacttcaaatagagagatgcctccagctgcatttcatcaaaggagagaacttctgagctacgagcaactttgttgcctcgatgatgtcaattttgccaatgctgtcatctttggcaacaaaagctgttactgttatcaaacactgaacttagttctagttactgttttcaatctgaaaattcagaaatacagcagcatcacatggaaccactctttttcttgggttccaaatgcttctaatgcaagttgcttaataaagcttatactccaatagttcctctacaagttttatatagtgaccattaaccaaaacctcttggattccaa

SEQ ID NO: 24495 - DNA, 224 bp, Zea Mays
cttaccatagcagagagagatagggcggggcttggggtggccgccgcacagcaatcgggtccacccggcgttcgagcatccactgagggtttggggagttcctctgtggtgcttggtgggtgcttacggccatgggtagaggaatcgaccatcggggtgaccagaatttctcactgtgcttcggactccgccgcgctcggcgagcagaggacatcgacgtgcta

SEQ ID NO: 24496 - DNA, 3119 bp, Zea Mays
ctgccactcctgctcacctccgccgaccgccatatcctcctctacatccaccgccgctgccgtataggtcccgtcccctcgtcgccgcggctgcgctggtggggagcggagcggacggacggagatccgcccgcctcgggctccgctacgccggctgaagatgatagccatggtgtctgctgttgaagagcttagttggttaacctctaaagaacttggtgagatgctcagggagtcagacaactttgttttgcagtccaagatagaagacggaggtccaaagcaagtacttgtggacatggaaaaagttgtgccctcgcttcctcttcatctccttgctgtatgtttggagcttgggcaaggcccggacttgacctatgtgcttcgtggcatccgttttttgcatagtttgtctgatctagcatcccgccatactagactggagcaggttctccttgatgatgtcaaattatccgaacaagtcatggacctgatattctttctactttctattcttgctgaacagaaggagaataacaatgttggtgcttctccgcttgtgcatgcgtcacttgtagcaggtagtcttcatctgttgacaaattacttctcttcccagtggcatgaacttgtccatattctgcttgcacatccaaaggttgatatctttatggacgtggcctttgatagtttgcatgaagatgtgaggctgttaagtatcagattatcatcaatgggcttcggtttctttcctgttggttctttggaatctcgtcttgctcacttcatctgtcaacagtgtgaagcatcattgcaatttctcttgttgttgtgccagcaaaagctatttcgagatcggattttaaaaaataaggaactctctagaaacggaggcatactgtcactttctcacactatactgaagttagttgtccctgaatgtttgaagcaatcaaccgaccttgttgcttctatttccaggctcaaggcaaagatactttctattctgttgcaactttgtgaggctgaaagtgtctcttaccttgatgaagttgccactaatccaaataacatgcggctagggcaaaccttggctctagaggttctaaatttgctgaagatttcatttggaagaaaaataaacattacttctgattctcatgacaagggtaagatttaccccatgggatctgtgcttatcagtgcattgcgtcttgttgatgtcttctctgatgattcgaacttcagatcattctttttgaccaacactgttccatttttaatccagattctagctgctcctcacgatgaatttgtttcgagttggtgcgctgtcaacttaccaacaattgaggaagatgcaagtctagattatgatccttttggtgcatctgaggtggcactattagcttctgataatatgttgactgaagctaaagctaactattcttgcccttttcgccctagcgtgccttcaatggcatatgcacagacaagaacatcatgcgtagtgaaaataatagcaaatttgcatgtttttattccaaacatatgtgaagagcaagaaagggatctttttcttcagaactttcaaaagcacttggcgtctgggagtcctaaactatcagcagatctgccagcttctagtgattttaaggccactaaagtctgtagaaacttaggatttttgtctgattatgctaaaacattggttcctaatttgttaaatggggaagacttggtgttattaagtgattttgctgataagctacaatcttggtgtaaatcacaagttgcagtaaaggttgtacaaaatgatattccaccagaaagcatggatgccatgtgcccggtgcagcagctcttgccaacacggacaagcactccagcctccaaaatgaataaccttccaaaggatgcacagaacatggaagtgtctacaccagtacccccaataaatccggaaggaaatgatgaggacgagactccaaagaacactgtctctagaaatggtggtttcctgcagaatgcagttggccaagacctagtccatcttggcgttgcaagaacaacaagtggtggcccttcggctgtcgcttccggtgttagcactggacaccagcacaacagaatggatcttgatccagcatccagcagcgtggataatttcaaaacaccagaacttacaaaagaaaacggtctcgaggaggatgggaaaggagagagtagtatgtatgatgagaggcaacctaagagaaggaagcggacccttatgaataatgagcaaatagatgaattagagaaggctctagtagatgagcctgagatgcacaaaaatcctgttctattgcagagttggtcagagaagttaagtctgcagggcccagagatcacagcatcacaacttaaaaactggttgaacaaccggaaagctaagcttgctcgcattgcaaaagaaagggcggagaatgctgataaaccatctacttcccatcccggcgagtcttcagaaagtgccggggaggacaactatctaccccctgcaggtgtgatgactgttctatccaaaggtggtagcctgttgagcccggactgcactgagcaaacgtcgcaggcagagctatccccgaacacgacgatgatggtccgtccattcacgagatccttctcgttggaacccggccgcctcgtttcattagtcgacagcgatgggaaggaggttggcaggggcaagatcttccaagcgccagggaagagcacaacggagagccgcgtttgcgtggttgatgtcactgagctcaggaccgagaagtggagggagctcccccacccttcggaggcatttgggtggacgttccaggaggcggaggcgaggaatggtggcatcatcagggtctcttgggacgccgtcaggttgttccctgtagcgtagcaaggccgattgtataacaagatgagtagagggaaactgtggcctaagtaacattatgttaaaagctgtggttaactgtgttgtattcatgaactaattgttttgagcaattcaggtggttactgattttacatttttactactggtgttagtgtcacctgcaatgtgctgtgagaaaccaatgctg

SEQ ID NO: 24497 - DNA, 747 bp, Zea Mays
gattttgtccatggttaatcatcttcagtggaaaccaaccgtaatagatcaccagcgctggtggtggtgaaaaacgcggaggcatacacctacgacgacgaggtgatcaagcacgccgaggccatcgggaagccaggcttggtggagatcaccgccaaggaggacagcttcgtcttcaccgtagaaacaaccggcgccatcacagcctacgagctgatcatgaacgccatcacggtgctgaggcagaagctggatgccgtccgccttcaggacgacgacggcgaccttggcgagctcggcgcccaccttggtgggccttaggagctttgagcaagaaggaatcgccctgtggccttcctccctcccacctgcctacgtaggcctatctaactgctgtgcgtgctagtcgatcgatcgaaaccgaacggttctgataaaccttatggtgtctaaagctccagatttatggattgccaaacacccagcaccgaattccagtttgatttccttgcccgccttgttttcgtgcgggtgacatctgcgccgtgaatttgcatgcttgcgcgtcttgttattgctctgtggtgtgtgtactatctaacttttgtgtgtgtgaggtgaatgcagagttatttgcaggttccccaggccgggcccagattgatatgctgaatgcaaggcagcatttgatgaggtacatgtagtacgtagtacatactagtaccgatattgcctgcagggattgat

SEQ ID NO: 24498 - DNA, 169 bp, Zea Mays
ggggagcacgagggaagtacaggcgtctgaatgcttggtttgtaggtatatcccaaactctggaattgactgttgagtaaccccattacagtaacttggctagattctgtggcgctccatctaaaattcaatgtcttcactctccaccaacttgaactctacatcatga

SEQ ID NO: 24499 - DNA, 288 bp, Zea Mays
gtgaaactgttcaattagcatactgttacaacaagtattagcactgaatctggacaaaactcgaacatctgctcgaagcgagaactgaatggtagtactgtgaacagcgaaagatgcataacaacttcgtgcatggaaaatttgaacctaagctatacaaaggtatgcacaatccctcatgacctgaaaggatccaaagcgaccatttcagcgctttgtactacagtaagcgaagtcactgctattcaacttaatcacaacacgttaacatgcatgctcagtctaggc

SEQ ID NO: 24500 - DNA, 1926 bp, Zea Mays
aaaaaatctattctccaattctccagttcgtccatacagttcacttctaaagtcatcttttcttgagagtttctgagaagtgtcccagctcacagctaatcatatccttgggcacaagaatatgtcgtccaagagactacatggcgtgtttacccttcttatgctcatggttttcaatgtttcaggggcatttgttggtatcactattggcaatgacatgtcaaacataccaccagcaacagatatagtgtctatcctcaaagcaaaaaagattcagcatgttcgcctgcttgattcagaccatcaaatgttgaatgcccttgcaaatactggaatagaagtgatggttggggttccaaatgatcagctacttcgtgtgggccaatctcgttccacagctgctgattggattaataagaatgtcggtgcttacattccggcgactaacatcacatatattgctgtgggtaatgaggtccttactaccattcccaatgcagcacttgtactcgtacctgcactgcaattcctccagtcagcactgttggctgcgaacctcaatactcaagtgaaaatttcaagtcctcattcaatggatgtgatctcaaaggcctttccaccctctgctgcgactttcaatttgacatggagctcaataatgtctcaatatcttcagtttctcaagaatacgggatcttcgtttatgctgaatgcccaaccatactatggctatgtcggagggcaaggcgtatttcccttggagtatgcactattccgctcacttaatccgaacagtcaaatctcagatcctaacaccaatctcttttataccaatatgtttgatgctataattgatgctacctacaactcaattcaagcaatgaattttacgggcattcctgttttagtcacagcttctggttggccatggcgtggtgggccaagtgagaaggctgctactgttgataatgctttggcctataatacaaacctcatacatcatgtactgaacaattctggtactcccagccaaccgaataatcagccaagcacctacatctttgaacttttcaatgaggataatcggtcagggcctgtatcagagcaaaattgggggattatgtttcccaatgcaaccactatatattctctatcatttgaggacgtggccacagctattcctgaatcaccagctttgcgtggggtgttttgtgtggcaaattcaagtgcatcccatagtgcactgaagcatagtttggattgggcatgtggccctggttctgcaaactgcagtgcagttcaacctgggcaaccatgctatgcatcagatgatattgtagctgttgcttcttatgctttcaacgattattaccatagaacacagtctagtggtggtacatgcaacttcaatggcaccgcgatgataacatcgactgatccaagccatggttcatgcattttcagtggaagcgctggcgccaacggcagcaacggtggaacagcatccgggcctgtaagcccggacagttttgcttcaaaatcccagtcgtgctggctgactcacctagtagccacattgctgccaattctatttgtagtgatgtaaatcattgtaatcatgtcgcattttggatgagatgcccgcaatttatcgtggatcttgtcattagatacagtagtgactagcgagccatttgttctgctgtattcaggtagatgccatgtaaccttatcccagaatttcttgccctaggaatcagtacttcgtcaaatcatcaattttgaacgccaacttggaaaattgagctgtgacaagccgagaactctctgaaatattggaagttccaaatgatttgtactgcatagtatttagtttctcagctatacgcatatagtttaagggctagtttgggaactatatttttt

SEQ ID NO: 24501 - DNA, 1598 bp, Zea Mays
aatatgacatcctctcaattcagaccctccaccgtgagaaaaggctagaaaggcagggtttgctacgtcgcccagaccatctccacccaggaccgccgccctcatccgtctcccccgtcttcctcgccctcgtctacctcgcgctcgtcggaaaaaacagctcagagacgtgctcggcttgaagtatacaaagaacagctcttgctagaaaccaagcaaaaaacgggacaggactgaagaatatgatgacttgatttgcatcgtaccgaagacattgctggccggaaattgatgagtccatggatgagtccatgatggacttggagaatgaggcagtgctacggaacgactgcgagaaggaagccgtgctgcggaatgaattctgccaaattgtatcattatagggggaggaataaggaagcaaaaggatatagacataaggttgtgaagttttgggatctactcagcctagtgtacaataaagaccaagcaaatggagagggtgctaaaacaacagctgaaagttcaaaggaaatggcaaaagagaataataccagaggcaaggatgctccatattctgtatcttcctcgagtagtttaaaaagacaaagatcagatgattcatttaactctatatggtgtgataagttcgacatgcttacatctgcattgaaagatgacggtccaaagctaccctcttccgtcgaagttctcaccgcattacaagaggttgagggatttgatgaagacacagaacttgagctttatgacatcctcacctctaatgcacgcaagtttgagtcgatgatggcactcccaatggaaaggaggaagaggtggcttatgatgcagctaaggaagtgaaacaacttatatgtgaacttagatctctttgttgaattgattgtgtgaacttgtctttgtgaaacttttgtgtgtgaatttgatggctatgtgaaactgttgtgtgcgaacttgatggctttatgaaactactatgtgaagatttgatgtctttgtagaacttttatgtgcgaatttgatgactttgtaaaactgttatgtgtgacttgcctttgtggaattgttatttgtgaacttaatagtttctgatagttgtaaattgttcatgcttatttttaagcagatgcaaagtcaagagatccttgtttgtattcaaattcaaattccgtgtgcaaagtatccaaacaacatctagaatttaattctaggaattcaattgcttgtacaaccaaacaaaaataatggaattgaatcactttctagtcgattgaattctatataattcatttcttggaatttatttcttggaaaaggtttcatttctaggcatccaaacggggtctaagggtttgggagactaaaattccattcttattcaaagataaataagaaggagattttagtcctccaacggatttgtggcttctaaactagcccttaggtcattgtagtcttgggagtagtagcagaatttgtgaagaagatgaggccgaagagacccagttattggtttccttcggcacattcgagctgtcgtggagtccacctcgggcacacattttccaccaacaatt

SEQ ID NO: 24502 - DNA, 1748 bp, Zea Mays
cacgtttcgtctccctgcaccgctcctcctcatcgtcgtctccccacctgacctgacccgaccgaaccgacccgaccactcctcccctgctcttccgccccaagcaagacccattaaaccccctcgccctctcctttcggggctcatctcgcctctcccccgtcccctgcctggaccctcccgatccgcctctcctcggattccgggtggttcccattccatcgacgtaccccctagtattcactgcttcggtgttgtgggctccgtagatcgacgtggcaccagaactatcgccctcgcttcctactttgccgcacctgagatagtaaaagagttcaagaatcccccccaaatcacagtcagtcttgggtctggtttgggtggatttcattacgtttcctccaagttcaaacagccagcaggatttccgagttgagtctgaagatcttcgcttttccggtttccatcagaagttagagagaacccctattctgatttgccagattccatctgtgctgcagttcttgcgcagttcaagagactgccccaactttatccaaaaagtttcctccgtctcatttgtggtcaatctggaagcggtgtgtcaagatgcggccctcggtgcagaaggtccgcattttctgttctgatcctgatgctactgactcatctgatgatgaagatggccagatcatcgcagtgaagaaaatggttatggagatactagtcccagtgacaaactcgaagacatctaatagtctgaagacccttgtgccgtgtggagcaaaggacctggaggtttcagagaagaagggtaaatcaagcaggttccgtggcgtgcgcaggcgacgctggggtcgatgggcagccgagattcgtgatcctgtgagaaaaaccaggaagtggattggctcgtatgactctgaggaggctgctgctgcggcatatcaggcgtatgcaaaacagatccgtgaagagttgctagccatcaagaaccaacggtctgtatcagaacgtgcagctctatcaagttcatcctcggtttcttgcgtatcttcgtctcccccatgtgagcagacagggcatgaaccgcagactagagtgctcgtggagaaagatcctgagcctgtagatgaagtctttctgaacttctctctcacacccaaggggatttcaatggacgatttgttaggacggatagatgagattcctgtttgtgacgaccctgtcagcccaactgatgagcttccacttgacaatttcacgagcctggaagatgcattcccgatcagcgatttcatcggttcaagagatgagcatctgtatgagcactatattggcctggctgacattagccacctgcctcttccaatggatgatccagctttcaatctggatgcagagcttgattggagtgggtttgacttcgctgcgattgaaggtgaacttgatgtcctttgaggctgcaatcagtgatgtgttatactgaaacctgcacttgcttatgttgtattcagctgaaagctcctctctatgttttttatatttgtcagaatacaacaatgaatacggattcaggtttcagtccatctatgtcagaatacatgagcacagtttctttcattttgttcttagaaaaactgatgacatatgggtgcagtctatctctaacaaggagttcgcatttttaatacattttcagtagattttgtcttgcttccttgcagtctgcagcggcgtgggcaaat

SEQ ID NO: 24503 - DNA, 1908 bp, Zea Mays
gccgcaagcacaacaccgaaccgctaaacccactcacgcactcgcgcccgcatcactcaccgaccagcgacggcggcgggtttctccgtccgccgccctgcccggtcacccatgtggaagcgcctcctggagaccaccaagcaggtcgtctcctccaagcaggccatcccctacgcagccgtcacccccaagcccgcgacccccgccgccgccccgtcggcatccaagcgcggcgcccctgttgctgcgccgaagctatccaccctgaagagtccctcctacaggcgacgcgccgccgccggcccagccaccaccgtcacgcaggcatccctcctgcggctcaagcaggccgcggcctcgaagaagaccaacttgccgtcctcccccccactgaatgacgcccacgccctagatgaggatgacccgccagaggctctcaccaaggcgctcatgttcgtcatagatgcacctgaagaggtggaatgtacgacttccccggaagcgctaccggagggctccgaagatgttggggaggttgccaggggcaataagatattggactttgagtggttccaggccgaaccatcgagggacccgctgatgctttggaggagggaggtggccagggagaagaagaaacactacatattcaagaatgtggagagccaccactacacaaatttgatgcgtatttgcgctaataagcttgggatggaatcgacaatagaatttcttggaaacttggggcgggaaacaggggtcaaggagttcaattcgatgattaaggtttgcctaggcaaggcaaaggcttgcagggatattgactctgctgtggagtatatttatcgggcgtatcaccttttcaataccatgaaagataaggggttcacgattgagaaagatatctatgacccattcctcttgtatcttatggacacggggatgtttgaggaatttgaggtgttcagtgcattctttaaggaggcgaatccgaagtccttctctagaatagcttattatgagatgttgctttgtattagagttcaagatgaagaaaaaatccaggaactttgtcactctgttgaagactacgatgagaaagttcactatgacctagcagagagttacatgctggcctttgctgaaagcggcagaaaggaagatctggttgccttgttggatttggttgatctatccaaagtttcaggttcaaagtacataactaatattttcaaatcattgggcaagctagaactagagaattatgtggagaaacttcttgagaggatgatgtcaaaaggatgtgctgatcacgacatttcatccttgattttggagtataccgcaaatataccgaatataatggttgaagacatgctagtggcatttcataaatggcatgagaagtttgaggtagcaccctctattgatgcatatgacaagatcgtctctatctgttgcgattcatcaaaggttgcttcacagttctgatactctcactatggctcaggcgttatctgaattacttgctgaagagactcgtcttaagtccatgtcttctattactggtgtgagttctcacagtgtgttggctgctgctcagaagtccagaaacacctcttttcagccttgtgaacattgcaaaaagaccactcataggtctgagaactgcttcactaagtttccagagaaactggctgattttcgtgtccgtcgtgctactcgtggtcgtggtacaggaccatctcctagaggttcagttgcggtggctgctacttcatctgctggtgctctgtcatcatcttgggttcttgattctggagcttcatttcatgtgacatctgatcagtcacggctggcgactactacacctgtgaccgagggtacttctgttcagactgctgatgg

SEQ ID NO: 24504 - DNA, 1990 bp, Zea Mays
atgttctgcctccgcaccctccgatcgcccgccgcgtccgattcccctgaccccgcctcgcccgcaatctccgccgccgcgcccgcgacatccatcacccccacccgcgacatcccgcctcgcacgccatcaactcgcagcggcccttctccgaacgtggtttgttttttcgtttgctcgagcagccagccgactcgtctccagcaatgcggccggggtcggctcgctggaggtgggcgtcgccgccgacacctccaacgcctccaggcagggattaggtgagccgtcggctaatcactcgtcattgggaggatctcctcctcccgttcagatttgggcaagaaaggcccgggcgcgatgtccatggccgaggaggggagtgaggccgaggaggggagtgaggccgaggcgctcgagaaagacggcagcaaggcttcttcaccttcggggccagccagtcgactcgtctccagcaatgcggccggggtcggctcgctggaggtgggcgccgccaccgacacctccaacgcctccaggcagggattagatttgggcaagaaaggcccgggcgcgatgtccatggccgaggaggggagtgaggccgaggaggggagtgaggccgaggcgctcgagaaagacggcagcaaggcttcttcaccttcggggccagccagccgactcgtctccagcaatgcggccggggtcggctcgctggaggtgggcgccgccgccgacacctccaacgcctccaggcagggattagatttgggcaagaaaggcccgggcgcgatgtccatggccgaggaggggagtgaggccgaggaggggagtgaggctgaggcgctcgagaaagacggcagcaaggcttcttcaccttcggggccaagcggtcttgaggacgaggagctacaggtgcaggatgcagttgccagtggttccaagaggagcaaagactccgccgccgccgccacacgcagcgccaatgtcagctcgccctctgtggttcactctcaccctgccatcctccctgctcccgcgcagcagattccagaggttaagcaagcagataccacacatatgcattctatgcctgccgcgcgctttacgtagctaacaagttgaattcatcatcaacatatccattgctcgagcttttcttcaagaaccagctaccatagggcaaagtgaagaaacggaagagttgagcaagatcacattagagaataaggatattcagcttgatatcaatataagagaagaatctcggagttcttcacaacaagggaactttgacacagaaggtaccagctccagtgaggctttcttgcttggaacggttgcttcagaaaagatgcttgagaaactgaaacataaatctggaagatgtgagcctgctttagaaaaggctattgtggaactggagcatggtataaacggtttgaagtactttgtttgccttgatccacggttgcaggtttgttccgccactgataccaggtgaagcttcacccttcagatccctgtcgtgacgaatggttcgtgggtgctggggagggattggatccgttggattcatgagatgtgtggattgttcctgccggatatcgtgacatgtttttagatctagcagacaaaaccatgaactgtctagggctcctccgttgcctagatctactagagtgagtgagcctacagagttgacctcatccaggctccagttccaccccacggtcatcgtcctctgttgctctacgtttcatgcttctcacctcctctcctcaatctcatcactagaggcggaaagcagatcagatgagatttttggtcttgcgtggttcttttaatctgctcacatgatacttcttattcattgccgtccagtgaaattaattgccctcggttgaattggttcctttgccattttacttaggaggataaaggagacactaccttggtacatgcctgttgccacaatggacaaaagaagatt

SEQ ID NO: 24505 - DNA, 1715 bp, Zea Mays
gttagagagtccgtctccctcaaaaccctagagcgtcagctgccgagctcactgtgtattcggtcggcgcgtgccgcttcccatacccccgcgcgctccccatggccgacgtcgacatggctgacctcccacagaccccgcgatccaccgccggcgacgacgacctctccttgctggacggagagggcgacctcgccgccgccatcctcgcgcgcctcggcggctcgccgcgggaggactttcagcacctctgtgccaccgccgccgccatggcgcaggccgttagcgaccaaggagtgcccgccaccccagtagcctacttcgcagcggctgctgcggcgcttgccccgctcgctcgcgcgggggacgccggcgccgaccgccacgtcgccggagcgctcctcgccttcctctccgcggcgctgccggccctcccggccgcagtggtgcgcgcccgtggccgtgaggtcgccgatgacgtgatgcgcgtgctcgatttcccttccacgcctgattcaggcgtcagggcggggctgagatgcctcgcgcatttgatatctgcgggggacagggcgaactgggaggcggtagagcctttatacactgtgattctgcgcctcagtaccgatcaccggctaaaggtgcggaaacaatctcattcatgcttgcatgatgttctcctgagttttcaaaggcaaacaattttgattccagcaagtgaagcaataacaagatcttttgagcggtttctgctgcttgctggaggatctagtgctgtaaatacaggtgtatcagaggaaggccccaagggggctaaggaggtcctgtatattttgaatgctttgatatgctgccttccccttatggcctccaaaccttccaatactatcttgaaatattttaaaccactattagatttgcatcaaccaattttgataaggagtcttctggacattctgcatgctgtttgtgagagtccaaccgtacagctcaaatctgatgtgttattggaccttctgtgctcgttgggtctgtcagtgtcttcagaaaggaaatcaggagatgaaatggcttcaattgcacgacttctacatgttggcactaaaaaaatttacaagcaaaacagggacatttgtgttgtaaaacttccattgatatttacctcacttggagatatattatcaagtgaattcgaagaggcgagattttcatctctggagggttttaaaggtttaatagataactgcattgatgaaaccttggtgtcacagggtattgctcagatgaaggctagacatcaagggttgaaatcagatccaacaatcatagataagatatgtgctatcctagaaggcttgctagatgtccgctacagtgacgtctgggacagatcatttcatgtaatttcagtggcatttgacaaactagagttttcagctgatctattgcccgaagcagtcaggaacttggcagacatgcaaaacttgtcagatgatgacttttcctttcggaagcagcttgatgcatgtcttggttcagcggttgctgcaatggggccaaagaatattctggaaattcttcagattcagtcaataagtgatgaaaatgaatggattctccctattctggagaagcacattgttggtgccagtttacaatttttcttaagagatattctgagtatggttggtgccatagagaaaaacattcctaag

SEQ ID NO: 24506 - DNA, 3883 bp, Zea Mays
ggtttctccaaaaccctctccaacaaaatcgcaaccgccggcgaggatcggcgccgccatgtcccagatcctccgccaccgcctgtcggctcactaccacggagtctgcggccactgctgccgccgcctcagctccgccgtctacggcggcggcgggagtcgccgcgccgtcgccgcgccgccgcaggacggcgagggcagccgagcggtgagggtgtctgtgtggtgggacttcgagaactgccacatccccaacggcgtcaacgtccaccgcgttgccccgcgcgtttccgccgccctccgcgccgccggcatccgcgggccgctctccatcaccgccttcggggacgtgctgcagctcgcgcgctcctcccaggaggcgctcgccgccacgggcgtctccatctcccacgtcccaagcagtgggaagaatagttctgaccgctcttttatggctgatcttgtctactggattgctcagaatccgccaccagttcattttttccttatatctggcgatagagattttgcaaacatcttgcatcggttgagaatgagcaactacaatgtactgcttgcttgtcctagtagtgctaccagtgtactgtgcagtgcagcaacaatcatgtggccttgggaaggcttagttagaggagaggatttgtcaccaaaacgttttaacaacccgccggatggtttacatggatcttggtatggtcactaccgaggagcccttgacgacccccccctggagaaggaatcagaggaacccatcaaggtagcatctgttccgaagcagttttcagtaccatctaataccaagcactgcccagttcccaaacatgtaaaaaatgcaattctggaggtactacgttcatatcctgaaggggtgaacatctcactcctccgaaatcagcttgtaaagaacaaaattgatctgggtacaaatttctttggccacaagaaattctcttcctttcttgaatcaatgccacatgttgttaaattattaggttctcgattaggtgaaaacgaactatatgcaattgctgccaacaaaaaatttctgcagcctggtgatggggctcttgatgaccccttcctggagaagggagcagaggaacccatcaaggtatcatctgattcccagcattgttcagtaccatctgataccaagtctagttcaatccctaaatatgtaacagatgcaattctggaggcgctatgttcatatcctgaagggatcaacctttcactactccaggaagagcttgcgaagaaaaaaatttgtcttggtccagatttttttggccacaaggatttctcttgccttatacaatcaataccagatattgttgaattagtatgtcctcaaactggtggacaactatatgcaattgctgtcaacagaagatcactgcagcctggtgacggaagtactaagacccttagctcagctcaaggtaatgccagggagaataacccaactggaacagctcacagtaataagaagaatacactaagttctcttcgaagcatttacaagagcagaagcttcacagagacactaagtgaacatccacctacattttctgtcttaccttccccgtcaaatgggctatctgaggaccaaactgagtgcccagtggtggatgtgaatgggtcgacagagtcaccagcaaagcacagggaagttggtgaaatgactacccctggaactccctcttcctcaggggtggaaaatgctgctaatgaatatggcttctttaaaaggatctggacaatgtggaatggtcccaagaatgttaagtctgaggtttctcaaaattgtgaaagcacttctgctgaagtgattgatgatttgcaggtttctcagaattgtgaaagcacttttgctaaagtgattgatgatttgcgaactcctttggaagagtataatggtgatcaccgtataaagcttttgaggaggatacatgaaacctcttccaaaaatgatcgctcagatggtactgagggcatgttagcagtaagtgataatttatcgatttcattaggtgatgatcattctgaaaaaataaagagagatccatcaattcctgaaaacccagaaccatgcagaaaacctgctgctgtttccatgattaaatctggaaaaaaggatgatatttctgaaatgaataggggcatgtttaactgggcttcaaggtggtggccatttgggaaatcagatgcagatagtagtacaaccaacataaatgccactgatgaaccgaggactgactctattgaagaatttgaatcttcaaacgctccaactaatggaagtgcacaacaggtggttcatgaaatatttacaaagcctgacttgtggtctgttttggagcaacagttatcagaacctcttgggtctgaggttgttttgaaagcaaagacaaggcaggaattggcacacagattgcagaagttaaattgctggcctttgaaaggcctccttgataaagacctgcatcacctggtacatctgttaatttctgaaaagaaatggattgaagaaacttcttccagaattttccctttccgtcttaccctccctcgcaagagaagatgtgtcccatcaagttccagcaaatccaacggcctcagttacattttttcaagtgggaagccacaaaagggcagatacgttgacaataacagtaggaaaagcaggtccctcactagagaggagatactatcagattgtcacaagctggtgaaggagcttctttctgagcatgaatatggattcaacatcggaattttcaaacgccgtttttcccaggagtatggatacgagctcgaacaccggaagctcgggtatctggaccttgaaacgctgctgcatattatgcctgatgtaagggtgaaattcccaagggtcatgcgctcagaacacgggaacgggcaggctggcagcaagggagacggaaaccgaagcagcggcgatgacttgatctgggaggagcttggtcctgtatctgccacaactgaaaccgccgccgccgccgctgatgcaggggccgacaaggaaacatgctatcgtcctcccactccttcagacgacgagttctcggacagcgacagcataaaagaccggcagcctagaaggaacgccgagcagcagagctcgcttctccagatcattggagcttggaacagcagcaagggtggcgacgtctctagcaacaagcctcaggacatcgacgggttggtggactgttcgagaagcagcccgggcagtgctggcaccagcgcagcttcaggaaaggtgcagacgtcgtctccgaagctaccgcacaagcagtactccttcgtgtcggactccggagaggagagcgatccggataagctggtggagagcgtcttggacagcctgcagaaagcacggggcggctcgaagctgcacaactgagcgtctgctgccatcgaattattgtttttgcaacctaacgagtcgtgcttatggtggtggccatggctgactgtcaaggacagcggcgcctgcaagcatcagccggagagactggtgaataaagctcgtcttttacttggactaggccgtagtacaatcggaacagtccttggtaattggtatgttaacattggctagagaccgcctcccatttctgtttcttgtttctttcttttcatgcaggatggttgtccgcccaatctacacgctcattttcttaacaaattggttaacacggcggggcttagacggtcgttcgtcaccagtgttgatgattaggacagtaatcaacggcggcctagttttccttcacctggccagtccacggagcacgaggccgcacgcaacgagtcctgggtgttggaatatcag

SEQ ID NO: 24507 - DNA, 1059 bp, Zea Mays
gcgatttgcgaccgaccgaccaacccagcgtagggctcgctgccccaagtgacatgtgggtcccagcggtcagcgaaacagccccatcccaagtgtcgtccatctagagactatccgtgaaactgccactctgccaggcgggcgggttgtgcggtcaacagagagagcagcactgtctccgtctctactcgtcaggcatcaccgttcatcatcaccgccttctcccgaggctttcgagatggcggcggcggaagcttcgaggacttcggaggcccgccgtgacgccgtgttcgggcggtgggtcgtcttctctccggcgcgctcgcgccgccccaccgacctcaagtcccacaaccccaccaaccctagcccgggcccgggggccgacgcgccgcccaagccgtcctgccccttctgcgccggccgcgagtccgagtgcgcgccccagatcttccgcgtgccgcccgacggctcgctgccgtggcggatccgcgtcatccagaacctctaccccgcgctgcgccgcgacgtggacccgccgcctgtgccagaggcagagggggatgtctcctcggacgagcctggggagcgcgccgtccccggcttcggcttccacgatgtggtcatcgagacaccgcgccacgacgtgcgcctctgggacctggacgccgagggggtccgcgacgtgctgctcgcctacgcggagcgcgtgcggcagctcggggagcaccccgcggtgcagtatgttcaggtgtttaagaaccatggggcatctgctggagcttcgatggcacattcacacagccaaatgttgggaactccctttgtccctccctctgttacaactcggcttaactgcatgaaggagatttttgacagatcagggaactgcagcctttgtgagattaggcccaaagatatcctgatcagtgaaacacctaatttttctgccattgttccttttgcagcatcatatccatttgagatatggattattcctcgacaacatatttcttattttcatgaaatagatcaagataaggtacgagggcaagctaa

SEQ ID NO: 24508 - DNA, 4188 bp, Zea Mays
aaacttgggacgggcaatcgtctttccatccccaaacttaccacaatcaaactgatcaactgacaactagggatgggcaaccaggctctctttcccagttgatgcgcgtcggatttgcttgtccgctatgggacgctggttcaagcccctttctcacccgccacactccatcacttgtcgctactcaccagattgccccgcgcccatgctgctgtggccgcctagctcgtgatcctgttctcctacccacaagttgcgattcgcagatctctggcgcagccatcgaatccatcctttgtccttgactcatacttctgttgcaatttgcgtgctggttcctccggtggtgcatgtgcacgggccatgttcgacgaggtgggtttgagaagttctgttacatggtaatccccgtccttgggcttgtcatggtcgattgggaacagtaggattggttgctgagcatggctggaccggagaagactgttgtttggttcaggagagacctcaggatccaggacaacccggccttggcagcggcggcgaaagggggctctgtcctccctatcttcatatggtgcccctcagactacgggcagtactaccctggaaggtgctcccggtggtggctcaagcagtctcttgtccaccttgggaagtcattagagctgctcgggtgcccactcgtgctgatccgtgcggaggacagcactcttgcagctcttttggagtgcgttcgttccatcagtgccactagagtggtttacaatcgtctctacggtaactgtactagcctgtctgatacaatttttcaggacaactgtttctttttgaaatattttgttttcgaaagcgcttgattcacttggtcctttgattacgtattcgaagctttcatccagttacacagtgtaacattgttaatcataatatgtttcgagctaattgagtacattgtactgttttttttttcttagagatacaccggagagctgtgtatctgtgtataaaagagagggggaaaggggaacagttcataaaccttcttatcccagtttggagtatggggttacaagataacaccccaaatgatcacctgttatgcaaaagtatatatcaacccaacgtaacaaaacccacactaaggtctctacatgacaagaaaaggaaacaaaaagaaaaaaaaaactgctgcagctttcgagatccagcattacaccactgcctcatctcctttgaagaagtgctgggagagacacatctattcctgtgattctacttggtccaagtctggtagatcacatcactttgaaaccctcttctttgggccttgccaatgttttcttgcttttcttcaccactaggcaaaatctttttttcatttacgcctaggcaccattaactccagatcaaaaggggtcaggaaatgtgacaatctcgaggtgatacaagtaaaaaacttagcagagttctcgctccaaagctttggtattaactctgcaactcacattagttgtggtttaccatcttctactaaccatgaaattcctcggtacaaacttttccttgtttaaccactttcttatcatagactttagttgaaatacattgttgaaatacattagtcagtgctatatatcacttatattgcatagtttgtagaaggtcaaaattcataagcaaagcatgtgatatagaaaaaaatgcaaacagtaagctgccataagtgtttcctaattttaacttattagaagtcagtaagtatttttttttaaaatctaaatataccgcattggactcagcacttaggccaatagcaatgagtaaactccatgtgatcaagttcaggaggtcacatgatgaatgtcttattgaaacaaataagtacactatcaagtagttatggtccccagttctatattggaactctgacatttcctagagctgttgaactttgttattcataaattcaatttcatcccttgcatgatagcatgtcttccccaatggactcgaaccaatatatgattgctattaataaacaagtttcttatcttctaaccattggtctgcaaagtcaacccagagtctctgtgctgcattatccattgctctacacattcaccacttacaatttattctgcttgtgttctcttgcgatgtctttttattctttcttacactgtagaccctatttcacttgtgcttgacaacaaaatcaagaatgagcttccagcccatggaatttctatccaaagtttcaatggtgatttactttacgagccgtgggatgtttatgatgagaatgggcaggcatttacaacctttaacaagtactgggagaaatgtatgagcctacctattgagatatcacaatatcttgcacctacaaggctggtggcagcgccaggtctagcaaatgttcgctgttgttcgattgatgatctaggtcttgaatctagtaaggatgtggaatcaagcaatgctttgctaagcagggcctggtctcctggctggcgcaatgcagagaacatgcttgaggaatttgtgtcttatggtcttctagaatattcagaacatggtatgaaggttgggggaagtactacgtcattattgtcaccgtatctccatttcggggagttgagtgtaaggatgatttatcaacttgttaaaatgcgtcaagtcaagtggcaaaatgaaggaaaatctgaagctgaggagagtgttcgattgttcctacgatcaattggttttcgagaatattcacggtacttatgctttaactacccattcacacatgagagatcatttttaggtaacttgaagcattatccttggctattggatgagggccgtttcaaatcttggagacagggaatgactggatacccattagtagatgctggcatgagggaactctgggctactggttggacacataatcggataagagtgattgtctcaagtttcgctgtaaaatttctacagataccctggatttggggaatgaagtacttttgggatgtgcttctggatgcagacctagaaagtgatattcttggttggcagtacatatctgggagtttgcctgatggacatgagctcagtcgtcttgataatccagaggttcagggtcaaaagtacgatccggacggtgaatatgtaagaacttggattcctgaacttgctagaatgccaacagaatggatccatagtccatgggctgcgccaaactctatattacaagttgctggagttgagctgggctttaactacccaaagcccatagtagaacttcatatggcgcgggaatgtttagatgacgccatctccacaatgtggcaattggacacagctgcaaaacttgctgaactagatggtgaagttgttgacgacaatctgaataatatcaggaattttgatatcccaaaggtggttttgaacaagaaattatcaccaagcacttcatccatggagcacagggtgttgtctactaatggcaaggacgaaaagtcgcagcctactgaagtgaaggccctgtacaaacagattattcgagatgatatgatgaatgactcaaacatggatgacacatgctctactgctaacttgaaagtgacaaggaaaagatctagcagtgatagtgcgttcaatgttccctcatgttcatcctcattagtcatggaatcacggattcatcataatgaacctagttctgttctgtattcaggctacttccagaagacagcagacagagatggcactagtaaggttgaagataatgacagtgaagatagtggtacgagcatctctaggccatccaagaaagctgcttagcattagcgcattgaagatgttgcaaatcttcaatgagaaatatttaccgtcacatgtaatttagctggtgcgtttgtagtgatcatgcaaaagctgttctgtgaattataattagttttacacggcctatccttattccgatagaaggcaatttttgtttggtgaaaaaacatcgctcacggacaggccatagtttgctgtcgctgctgaacagcctaatgcctggtgtaaatgactcatcaacgttacgacactattagcgctggttggttttgctatcaatccgtattcatggattgggtaagattgagtagatttaaatatcaaataaatcaaaatgttttataatttttt

SEQ ID NO: 24509 - DNA, 2050 bp, Zea Mays
gctgtgttcccccaccctccaggctgcctgactcggggtctcgggcaggttccgccgcatcgtgtcgtttcttccctttcccgtttcccccgttcagttcagcttcggttggctcgccgtactcgggttgttcctcgcctcgcttcgcttccttcctccgcagtcctcgtctcgaattcgctcgcggtgggagaaatcggggcgcgaggatgaccgtgatcgacatcctcacccgggtggacgcgatctgccagaagtacgacaagtacgacgtcgacaagctcaacggcgccaacgtcgccggcgacgacccgttcgcccgcctctacgcgtccgtcgacgcggacatcaaccaatgcgtcgataaagcggaaacggcgaagcaagagaagaaccgggccgcggtggtggcgcttaacgccgagatccggcgcaccaaggccaagctcctcgaggaggaccttcccaagctgcagcgcctcgccgttaagaaggtgaaagggctgacaagagaagaaattgcgacccgtagtgatctggttgccgctttacctgacagaatacaatcaatcccagatggtagttctactgccacaaagaaaaatggaagttggggagcctcaggatctcgcactggaggagccataaagttcgactctactgctgatggaaactttgatgatgagtactttaaggggacagaagaatctaatcagttccgtcgggaatatgagatgcgcagaatgaaacaggatgaaggtttggacgttattggtgaaggactggaaactttgaaaaacatggcatctgatatgaatgaggaattggacagacaagtccctctgatggacgaaatggatgataaggtggatagagccaatgcagatttgaagaataccaacgtgagactgaaggagactgttcttcaacttagatcaagtcgcaacttttgcatcgacatcatccttctgtgtgtcattcttggtattgcggcctacctttacaatgttctaaaaaagtgaggtggagtcttcttgccttggaaccgctcatgtcgtggtccctttgtcaccatgatctggagtggaagcttatatatgttggatcagctgaagatgaaaactacgatcaacagcttgagagcgtgcttgttggccctgtcaatgttgggacctaccgttttgtccttcaggctgacccaccggatccctcaaagatacgtgaggaagacataattggtgtgactgtgctgctattgacatgctcttacatgggccaggagttcatgagagtaggctactacgtgaacaatgattatgatgatgaacaattgagagaagagcctccagcaaaggtgctaattgacagggtgcaaagaaatatcttggccgacaagccccgagtcaccaagttccctatcaacttccatcctgaacccagtacaggcccggggcagcagcagcaggaaccccagacgacctcgccagaaaaccacacaggcaatggcgaggccaatggtagcaagcctgaggctgaccaatgaacacagttggcttcagatattttgatgcgtgccccttacaggttgtgctgtaatattacaaacgggattagtggttgtgcattgccctgggatcctgaactctgttctgtaacttgagatgcaaatgctgggtacctggatgttttcttaagcacgagtatttcagcctcgagatgtgatcaattgcatcgaaagcatgtgctccaagaacgcaagcatgaggaaatacagcaaaaaacagcagattaactgaatcctttctctgaatctttttgagaaacaactttgcacgacgattcactgctgtaccaggacgcgctacgtgaatttttctagacctttttggtgcttgcagtcacgatcatttcatttgtcatcttttcacgtctcttttgtgtatagaatctttgtgttgatctttagtgtagattatggggttgttcgctttaaattaaagttggctatttgtttgatgcagctttaattaggaatggtagtggattatgg

SEQ ID NO: 24510 - DNA, 2684 bp, Zea Mays
gtgaaaagtccatagcctggcatcgtgctgcggtgtccgagtgattcatcgtcttcccggaaccaacaggccgctgtttgactttgacccaaccacaccacgcgggacggggctccgcctccgaccccgcgccgacctaacgtgaccaactcactcaacctcgctgccgtgacgtgccgtaccgtgccgccctgtccatcgggtcaaatccctcgtcgcttcctctccgcctcctcgccacttctccgctaatccccaatccggaacctcaccgcggagaaccccagatcaaacccttccccgcccattcccacttccatccttccagtacgatccgtttcttccttacttccctgctcatccgagggtgaggaaggagtcgggcgaggaatccaccgccggggtttcttgatccgggcgcgtgattcgccgcgcccaggcaccagtgagaaatcaaatcaagaacggggtgggggaagtgagacgagggcgcggggagcaatcaagatcgcttcttggagctttcggcccccccgagccaatgccggatccggttagcggcgccccccgctcccacggcgccgggctggcatgccccctctgagcgcccccgcctgcctccgcggctcccgatgctcgtgtggtcttcgggagcaggagagggagcagcggccgtcgtgggcggcggccaggagcgaggatgcagatccggctgtcgccgagcatgaggagcatcaccatctccactagccatggcctgctagacttgatgaggttcaaggtcgccgcgcgacacttctcctaccgcaccgtcttccacaccgtcctaatcctcgccttcctcctgcctttcgtcttcatactcaccgccgtcatgactctcgagggcttcaacaagtgctcttcactagattgtcttggaagacgtttgggtccgcgccttcttggtaggggaaatgatggttccatgaggcttgtgagggatttatatgtgatgcttgatgaagtaaattctgaggaagcacctcttaatttgaaggttccagaaacttttgatgaatttatctgggacatgaagaataatgattatgatttaaggtcatttgcttttaagttgaaggctacgatggagagcatggataaggaattgaggtcatcaaggttatcggagcagttgaacaagcactatgctgcaattgctattcctaaaggcctttattgcctttcattgcgtttaactgatgaatactcctcaaatgcccttgcaaggaaacaactaccacccccggagttggtgcctagtctttcggacaactcctattaccattttgttttagcatcagataacatccttgcagcctcagttgtggtcagatcaacagttagatcatcactgaaacctgagagaatagttttccatgttattactgacaaaaagacctatcctgccatgcactcatggtttgctttaaattctctcagtcctgctattgttgaggtgaaaggtgttcaccaatttgattggttaacaaaagaaaatgttcctgtacttgaagctatagaaactcagcgcactgctagagatcgttaccatggaagtcaccgtccaagaaccagtgctagtgataacccaagggtttttgcggccaagctgcaggcaggaagtccaacatacactaatgtactcaatcatattcgaatatacttgcctgagttgttcccaagcctcaacaaggtcgtatttcttgatgatgatgttgttgtccagcatgacctatcaccactttgggatatcgatctagctgggaaggttaatggtgctgttgagacttgcataggtggagacagtcgggtgatgtctaagaggttcaggaattatttcaacttttctcatcccctcattgcaaaaaactttgacccttcagagtgtgcttgggcatatggtatgaatatttttgacctgaaagcatggaggaagacaacaatcaaagatcagtatcatcattgggtcaaggagaacttgaagtcaaacttcacactttggaggcttggaacattgccaccaggccttattgcctttaaaggccatgttcacccaattgatccatcatggcatctgttaggcttgggttatcaggaaaagacagatgtcagtagcgttgaacaagcagcagttatacattataacgggcaaagtaaaccgtggctggagattggttttaaacatcttcagccattttggacaaaatatgtgaactactcaaatgaattcataagaaactgtcatataatggagcctcagtttagattgtcttgacaatatatataaaagcatatagtaagtgaaattaaattcgttattttggaaatcaacagcagggagtttatcaagtgcaactggggagctcagtaatcccttaacatggttacatgcgctgtggagaatattcaatgaacagaaaggaaatgttattttttccccatttactgtagggcccttttcctttaatttattccatttgtatcatagctcatgaaattaagatattgcttaggatggttcttttgtattttatggagcaatataagttgggttgatggtagtcccatcgttattgtaattgatgaagagcatacacatttcaccatgtgaaaagcatggattttgattatgcaaagcaaac

SEQ ID NO: 24511 - DNA, 1358 bp, Zea Mays
gccggggacggacggttggtgcaactggaaagcgaggcgttttgttttctcccgtgctccccctcccggggaaggggcaacgagaaatcgaacccacacgcaacgcgacgcctccacccgctcgcctagtccagaatccagatccagcgcccgcatctctctctctcgcgcgcgcgcgcgagcgcgatgagctgccgcgacgggcgatcgtgctagcggtaacagcgagcggtgcgcgagggcggagtgggagtgtggatccgaggggcggcaaatctggcaggcgccgcggtggggctgcgggcgcgggggagggcggggggctgggcggacggcggggagggaggggaggactgcggtaggctcaggccctggcgcaggaggctgctcgcgtccatggcgctctcgtggtcctcggccctccgcctcgccgtcgccgccgtcctgctcgtcgccgtcgtcgtcgcgctcttcactctccccatcgagaagattttgaaggactttctggtttggatcaaggagaatttgggtccatggggtcctttggtgttggccctcgcttacatccctctgacagtcttagctgttccagcatcaattcttacacttggagggggctatctatttggcttgccagtggggtttgttgctgattccattggagcagcaattggtgcgactgctgcatttctgcttggcaggacgattgggaggtcttatgttctctccaaatgcaaagattaccctaagtttcaagcagtagctattgccatccaaagatctggcttcaagatcgtgttgctactaaggcttgtacctttacttccgttcaacatgttgaactacctgttatctgtcactcctgttggtgttggagaatacatgctggcttcttggttgggaatgatgccaatcactcttgctctggtgtacgttggaacaacactaaaagatctatcagatgtgacacatgggtggagtgagatctcgactactcgacggaattaagataattgagatctactgataaagtttgtctatccacgctttcagcacatctgtgttaataagttgtgtcatcaaggaacctctgcaaaatctagaaaccttttccattatcctgcccatttcacttgtatgcttgaatgaatgattcaatcatgggatatttgatttgagcttgagggcaaattttttatggtgattgactgccagagttcttacatgtgcggtggtatattagtgtgttgataagactttgattttggtggggtggggtagcactaaaagtagatggaacaattgccaattatgtaagttttaggtgttgtttggttcacgaaatgtaacgtaaa

SEQ ID NO: 24512 - DNA, 1801 bp, Zea Mays
ctaccaaaccgcggtctcggctcgctcgctcgcttgctgggcttgcagtcgcagcctcgcaggacgagataaatagtccacccgcgccgagcgccaccgtctcatcatcagtcatcacataccaccaagaccacatcggcacatcgacgtgagctcgtgcgtgagtgccctggtcgacgaccgctcgcgcgccatggactcaacgacgacggcgccgctgctgcagccgtccgccgcctcgagcaaggaggggccggggccggcgccggctcagcacggtgagggcagccgggagctggaggcgatcctggccgacgcgtccaagccgtgggcttggcgggcctgggaaggcgcccgcctggagctgccgctgctgctgcgggtggcgctgccggcggtggccgtctacatgatcaacttcgtcatgtccatgtccacgcagatcttctgcggccagctcggcaacctcgagctcgccgcctcctcgctcggcaacaccggcatccagcccttggcctacggcctcatgctgggcatgggcagcgcggtggagacgctgtgcgggcaggcgtacggcgcgcacaagcaccgcatgctgggggtgtacctgcagcgctcgacggtgctgctcatggccaccgccgtgccgctgaccgtcgtctacgccttctcggagcgcatcctggtcctcctcggcgagtcggagcgcatctccagggccgccgccgtcttcgtctacgggctcatcccgcagatcttcgcgtacgcggccaacttccccatccagaagttcctgcaggcgcagagcatcgtggcgcccagcgcttacatctccgtggccacgctggcgctgcacctggggctcagctgggtcgccgtctacaggctgggcctgggcctgctggggggctcgctcgtgctcagcttcagctggtgggtcatcgtcgcggcccagttcgggtacatcgtcaccagcgcccggtgcagggacacctggacgggattcaccacgcaggccttctcgggcctcggcaccttcttcaagctctcggcagcgtccgccgtcatgctgtgcttggagacttggtacttccagatcatcgtgctcatcgccggcctgctcaagaacccggagctctccctcgactccctctccatatgcatgaacgtgaacgcatgggtgttcatgatctccgtcgggttcaacgccgcggcgagcgtgcgggtcgggaacgagctcggcgcaggcaacccgagggcggcggcgttctcggtgttcatggtgacgtcgctgtcgttcatcgcggcgacggtgtgtgccgtcgtcgtgctgtgcctccgcgaccagctgagctacttcttcactggcggcgaggccgtggcgcgcgccgtgtccgacctctgcccgctcctcgccgccacgctcgtcctcaacggcatacagccagtcctctccggcgtcgccgtgggctgcgggtggcaggcgtttgtggcgtacgtgaacgtgggttgctactacgtcgtcggcgtgccgctcggcgtcttcctcggcttctacctcgacctcggcgccaagggcgtttggagcggcatggtcatcgggggaaccttgacgcagacgctcatcctgctctgggtcaccgtcagaaccgactggaacaaggaggtggagaacgccaaggcgaggctggacaagtgggacgacaagaagcagcccctcctagtcgaagattgaaggaagaatctagtagatcacgcagtggagaacgccagggcaaggctggacaagtgggacgacaag

SEQ ID NO: 24513 - DNA, 2026 bp, Zea Mays
ggcttcacggctcggctggctgcacgccggagccccggcgccagatctcgccaagtgccagggccgccgcaggcccctctttgcctgcgcgagtctcagaatcccgagagggaaaaagaaaagaaaagatgatgacttcctctgcctgttactacctgtgccgctccctcgtccgggctcctccgctcaagtcgaggagtgcagtgcgctgtccaagcgccgccccgccaggagccagcggtgccacctccacctccaagacacaggatccagttgaaaaccagaagctatgtgcctatttggttgagaaggcagtcaatagacttccgccaggagcagagaatatacttgggatctttgatctgcgaggctttcgggttgaaaatggtgatctccagttcctaaagtttttgatggacgttttttactattactacccgaagcggcttggccaagttctttttgtcgatgctccatttgtttttcaaccaatgtggcaggttgttaaacctctgttgaaatcatatgcctccctgattttgtgatgccgagactgtgaggaaggaatacttcaaagaagaaatcgtgcctcctgatttccgcgattaggtggtctcggaaacatggcctttaatttattgagaatcgattggcacccagggggactggcgccttcccatacctttggattaacctctcaaaagttgctcagacggcagcaaatgattggagagtccagtaaaaaatgacccagtacttgtataactagtgcgaagtagaatgctgagtttaggctgctgtcttgagtgctcctataccatatttttctggttttggatgaagctatatggatcaaattcatctctgttgaacaattgccaattacataacttgtgtttgcccaattccatggtgtagtaccataacttctcagtgcagtgcagacaacacatggattccatttttttattaaagtaccatctgctacaaatatgaatcatggctttgtttgtagacttcataaagaaacacacagattaatcaaaccagtcttcgaagagtctgctatggataggaacgttccaaagcaaaataagatgcaagttgtattgcataaaaaccaggtacacatcaatcagctgcattctggaagactaaactgcaacacaactacatctgcaatcacagagaaatcaggtatacgaccaactgttatctgttgtaaatattttgtttttaggtcaacaacggagagggtcaagcgatccccacgtacagatgccagcatggtcttttacatggttccaagagttcgtaaattgagtgtagccttaaaaagatctgccttgtgccacttcaacactttaacccagatgtaataaaaaaacactttaacccagatgctgcattgtggcaaaggctcgagaatatgacaataacagttgttcaaaaactgttggtaggaacatttatagcagcaaaagaacaaaagggaatgcgtggtttcttatctgccttagatgagataagatttcggacatgtgtattcatgtttttgagtgatttggcactatgaatgcactagattgttggttgcttttttttgttaattgctcaggttgtatttctagtcactagtgttgtattgtttgtgcttgtgctaagatgatctcttttgcacttgtaataggtgctcattcaagtactctactgatcgaaaatggatggcgtctgtgatggttgattcttttgcacgtcttctacactggtacattgacggctgatggagatggatggtggtgtcgctgttttgtgttttgtttagcactctaggtgacacattgttatgggattgttacacagctgatatgttatgaacctgatatggagatctttttgcgtcctttgtttgggtgttactgttgtgccattcgtctcataagttatgccattttattacttgcttttggattgatatatattcgtctctgaagccttccttcaatacaaatacaagagtttttta

SEQ ID NO: 24514 - DNA, 3656 bp, Zea Mays
ctaaaattctatttaaagaataaaataaaataaaatagaggattaaaaattagtctccgtaaatcaaacactcttaaatcaagagggatgaattggtgttaagtatttggttgatgctagagaaaaaaccaaacattctccccgttattctgaacagatacaaatgcgaacaaaaaagcatatccatccaaatatcgtaatccatttcattcccctgagaaattaatttatttctgcagtttcctcaaattctcatggtctcggtttctcgcctcgccgcttctccgcctcccgtctcgtctgcaactgcaactccacctcggccctctcatcctcgtcaccaccggccacggccggcctccaccgctgcctgcccaccgctcgctacactcatctccccaaagtggaagaagaatcgggctgttgctcactcgtaccctctaagtgaggcgggcctcaccaaccttgctgctatgccttccacgacgctcgctgcagtccaccaccaccggacaggaagcaccacctagttcctgaccctgatgtccatggcacccgaccatcccttcgatgccttcgtcgccgcagctcgtggcgccataacccaccttcaccttcccgtcatccacatccctggatccaattccagtcctaaccccgactccaagcagcaccacgaacccgaggtcgactgcctgctccacctccacgtcgtcgtcaccaacttcttccacaagcccctcagatcattcgctaggtgcttcaggcccaagcgacgggcaggcaaacactccccgccgctctaccaggagcccagcaatggcgcgaccccgcagcagcaactggagctcctgctctgcattgcgttcgatgccttcgcccacaacctccacgcgctggaggacgcctgcaagcacaaaggcgaggaatttgctgtcgctacccgacagttggagcaatttgtggttttcaggaaggtaatcgatgggaagagggccgatttcgatgggttcctttcaaatctgggctttgcaaaggttgggccaccgccaccgccagcaagcatcatgggtggtgcttcccctgtcccagcaccagcaccagtcagcaatcaggaggatggtgctgtgattgggaacggcgagagggtggacattgctagtggtacacaacagcaggcacaaaaattgcctgcccggttgcttaacattcctttgtcgaatgtggagcgtctgcggtctacgctttctgcagtttcactgacggagctcattgaattagttccgcagctggtgagcagatcatcgacatcggcagatgcacatcctgacaagaagaagcttttctcagtgcaagacttcttcagatatgcggaaattgaaggaaagcgattctttgaagagttagacagagatggtgatggccaagtcactctagaagatctcgaaattgcaacgaggaagaggcggttgccaaggaggtatgctcgagaattgttcaggcgtacaagaagcaacttcttttcgaaatcaattgggtggaagcaatttttatccttgatggaacagaaggaagcaaccattctccgagcatataccacgttgtgtttgagcaagtctggaacacttcacaagaatcaaattttgacttccttgaaaggtgctggacttccagccaatgaagataatgccgctgccatgctacggtatctaaatgctgattcagaaggatcaatctcatatggccatttccgcaacttcatgcttctacttccttcagaacgccttgaggatgatcctcggaacatttggtttgaagcagccaccgttgttgctgtatccccacctatagaaatatctacaggaagtgttttgaagtctgctttagctggaggtcttgcaagtgctctctctacctctctgctgcatcctattgattcaatgaagacacgtgtccaagcatctacactctcatttcccgagctcatttcaaagcttccacaaattggacttcgaggattgtatcgaggttctatcccagcaattctcggccagttttcaagccatggtttgaggacaggaatctttgaagcaagcaagcttgtattaattaatgtcgctccaacacttccagagattcaagtgcaatcaattgcatccttctgcagcacagtcttagggactgcagtccgtatcccttgtgaggttcttaagcagcgattgcaggctggaatattcgacaatgtaggggaggcgattgttggcaccatgcgacgagatggcccaaagggattttttcgtggcactggggccacactgtgtcgcgaggttcctttctatgttgctggaatgtgcctctatgcagaagctaagaaggtatcctcgttttgaactgattcctggtttcaccagaccttcaaagtggcattcacaaatccctatgttgttaacaagtcagctaccattcttaactacctttggctgattttgagctatcagttctattgatttggggggaaaatgtcattcctcttaactccaaaaaggcagcctagtgactttgttttgacacgtgaaagttggtaccaaatggagctgcctaaggggtattttcgctcatttactagtggtactcgtgactacttttggttctcataatttgtaaatgatagctatatttgtatcactatgccttgcatattggtgcatctatgatggcttttttttttgttctgcaggcagcacagcatgttttgaggagagacttggaagcatgggaagtagtggcagttggagcattgtctggaggacttgcggcaatagtgaccactccctttgacgtgatgaagactaggatgatgactgcccctccaggcacaccagtgtctatgcagatgataatcttgtccatccttggaaacgagggtccacttgggctctttaagggcgcgatcccccgcttcttctggattgctcctcttggagcaatgaactttgcaggctatgagcttgccaagaaggcaatgataaaagatgagaaaaattccagtgagtcaacacgagagatcttgccaagaaagcagtgatcaaccatgcaacttttttattttatttttgggtccatgttgcagagaagcaacagaacatctgcctttttttgatattgggaattacattcccgtagggccttgagatggctgtatagtatacattacatgagaaaagtgctagaggacagaggcacatgctggagctgttgttcttttgctggataggacagctcacttgttttgttatccgacgatgatccatagccttccttgttaaacacgatgtaaatttgctcttgtagttaccctgaggacatttggctttcgacccaattgttttggtgttcgaaatggaatgatagagccatgacgaaactaaagaagaaaggacaagcgttcccaccaaagaggtttaggatttagaaatggcaatgggacttgatttcctgcgggaattcctctattataagtgaacgggaaagctattctaccaacgggtggacggggacagaaaactcttctaccgacgggtggacggggacacaaaactcttctaccgacgggtggatggggatggaaagtttcttactccacgtggatgtaaacg

SEQ ID NO: 24515 - DNA, 3273 bp, Zea Mays
atggagggggcggcggcggttggcggcgcgacggtgttggggcctgcaggggcacgactgagcagtcggttggagttgttggataaagagtggaacttaattatgttccaagcagaacggaatcttgatctatttgaaccttttctggcatttaggcgtgccctccttaagattttaggttgtgaagaacatcttgtaaaacatttatttcaatctgcttctgcgctccggaagggattaaggttttctttggcagcggcagctttatatgaactcaaagaactttgttttcacagagatgagagcactatgacaaatacctatttgcttgcacggcttgaagacgctaaattgctcagagctcaagggcagcatgatatggctattagtcttggaaaatacatactacagaagctttctgacaagaaaaacctgtcagatgtctatcgattagttggcaagtggctggctgaaacaagatcaagcaactcaagaactatcattgaggactatttaagaccttctatagatctctctgaatttgagaagagtacagataaaaggtacatgtccaggcagtgtcgaacacatttccatctagcacattatacatatagtttgttcagaagctatgaggaaagactctcatctaacgaatggcaagcagctctgcgattaaggaaatacaagactagggagttggagatactgattaaaagactgagaagttcatctaagggtgtgaagactgattactcagtaaaaatccaagagttacagaaacaacttgcacttgacagagaagaagcagagaaaatacaggatgatcacgataatttcttaaatctagcacttcaaggctaccaacgttccattgttgttggtggcaaatatgacctacaagtggtttttcggttggtctcgttgtggtttagtcttttctcaagggatcaagttgtgaaagcaatgttgaaaaccacaaaagaggtccaaacctacaagttcataccactggtttatcaaattgcttcgagacttgggagcaccaaagatgctcaggggtcatttaactttcagattgcgttagcttctcttttgaagaaaatggctgttgatcacccatatcatacaatattccagcttttggctctagcaaatggtgatcgtgtcaaagacaagcaaagaagtagaagttcttttgttgtagatatggagaagaagcttgctgctgaaaatttgttaaaggagctatcttcctgtcatggacctctgatttgtcagatgaaacaaatggttgagatctacattaagttagcagaactggagaccaagaaggaggacactaacaaaaaaattccgctgcccagggaggcccgcagcattggtcagcttgaactagttccagttgtgactgctaccgttcctattgatcctagctgtcgttatgaggaaggctcctttccacatttcactgggttggctgactccattatgatcatgaatggaattaatgctcccaaagttatagaatgttttggctcggatggtaacaaataccgtcaacttgcaaaatctggaaatgatgacctgcgacaggatgctgtgatggagcaattttttagtttggtaaatacattcttgcaaaatcaccgagatacttctaaaaggagattgaaaatccgtacatataaggttgttcctttcaccccaagtgctggtgttgttgaatgggtaaacggtactgttccactaggcgattatctaattgggagtactagaagtggtggagcacatggacgatatggaattggggactggacatatcttcaatgcagagagtacctgatgagtgaaaaggacaaaaggagggcatttcttaaaatctgcagcaactttaggcctgtgatgcaccacttctttcttgaaagattcttgctgcctgctgattggttccaaagtagacttgcttacacaaggagtgtagcagcaagctcgatggtaggatatatagtcggtcttggggatcgccattccatgaatattctcatcgaccaagacacagctgaggttgtacacattgatcttggtgttgcatttgaacagggtctcatgcttaaaacacctgaacgggttccatttcggttgacaagggatattatagatggcatgggtgttactggtgttgaaggtgtgttcagaagatgttgtgagaaaactctctgtgtcatgagggcgaataaagaagcattgctcactattattgaagtcttcgttcatgatcctctatataaatgggcactctcaccactgaaagccttacagcgtcaaaaggaaacagttgatactgattcatgtttggatgactcccaagaaccttacgatggcaacaaggatgcagctcgagctatacttcgtgttaaacagaagttggatggatatgaagatggcgagatgagaagtgtgcagggccaggtccaacaactcatacaggacgcggtggatgttgatcggttgtgccaaatgtttccaggttggggaccttggttgtaagctccattgaaagggatgtaaattttgatcgaaggcaagagcaacttttttcactgcttatgaggttttattctttggtgtgtttttttccctcaccaccctgtcaacattcctacaaagtacagcaaacggcttttggtaccctgtaaattgatgggaaggcaaggacgacatttgagtgcaggtgggttgtaccactcctgttttagagcatgtccagactagaggatgggtgattgcatagtgaggccacagttttctttttttgttgagcttcattaataccccctctgtctaaaagtcctcatcgtttaagcgtcccgcaccaagaccaaggatgcccctccgcattgcagccgctgtgaagttaattatctggcgccgttttgtattttcaaaacacgcatatgtaatgtcgcaaaaattcagctgcttcgatggttggccggccataggggcggtatccatacatcacaccatcgtgcagcgtacattcagctgcttcgacggttgcataccgtagtttttgttcaggatttactttgtaaagaagtgaggctgttttgtcatgtatgtaaagggcttgtttcgatgtagcatgaaatacgaagaattatgatgcatttgaatataccgtgctcccctgagcaaaaaacaaatcaacagaagctaccacctggccgccacgctcagagtcgtcttggctgaaggatttcttgggtg

SEQ ID NO: 24516 - DNA, 992 bp, Zea Mays
ttgctgggaggacgccaccaccatcccctggtgtgcagtcttgctgctgtcttgcagatggattgtcactcaagtctcaagatttgactgccttatttctggctgttaggctgtattgtagttttgttatggagtatgacatccatacaattctagatacagctacacttgcagctactctttttgttatttacatgattcggttcaaactgaggtcgacatatatgctggataaagacaactttgccttgtactatgtggtattgccctgtgctgtgctagcgctacttgttcatccttcaacatcgcacaacattgtgaacagaatctgctgggccttctgtgtttatttggaagcagtttcagtgttgccccagttgcgcttgatgcaaaataccaagattgtggagccgttcacagctcattatgtgtttgcgctgggtgttgcaaggtttcttagctgtgcacactgggtccttcaggttttggacacccgaggcggattgttgactgcgctgggctacggtctgtggccttcaatggttctcctctccgaaatcgtccagacattcatccttgcagatttctgctactactatgtgaagagtgttttcggcgggcaactggtgctgcggcttccgtccggggtggtctgaaaaactgcagcgagaaagaaaagcatactgttcgtcccttctgtgttagatcatacaaagcgacagtcattgtgctcctagcgcccaaacttttgcactcgtaaagtggattagcagagggccgttaattttttttttcagttgtaaactgtttacgtgaatgctgtaccgataccgtgataccgtctgactttttcatccatgctagagttgaagcaggtagcatccacatcgagttgtcgcattttcagactagagatcagattctccgatgccagtgactgtttatctttcattctagtttttcttgtgtcgtcgaaatagacgaaatgtgag

SEQ ID NO: 24517 - DNA, 530 bp, Zea Mays
agatatcccctgccattttaatatttacaagttggagatgctggcggcagtacaaaggaggcgcctttgaaagccaaaattcacctcacgcttaaagtcccccaggacaatatacagaattcagttgtagtgttccatgttaagaaaagatgggatttttagtttctatttgtgagctcagatggtgttacgtcatgcgcacataagcaagcgtgtacagatggagagccaataagagatggatgcaaatttgtgatgtggtctgcaaaattgtttcatgcaaatgttagggagaaatcatgtaatgttagtcctcttttataggttccgtttggttcaaggtcttgttaagggaatgctaaagagctcaaccaaacaaaagtattggtaactactagaggtgtaatccgatcgaatacagacgaatatcactgaaattaaatttgttattcggatccagattcgaatacagctagctttgaatacgaatacaatatagatgttcttggatataaatacggatagcgtta

SEQ ID NO: 24518 - DNA, 3349 bp, Zea Mays
gtcgaatgcccatctacgactttggagccaagccaagctagcctgcccctagtccccttacccctgcggccctgcccctgcccccgctcccgattccgccgccgcatccgacccaacccgctgcgatcccctccgccgtggcgtcggcgactccctctcccgcgacgccctttcatcgctgcagttgatacgccacccgagcggttccttccctcctctcttcctccccttgtcgctctccgcatcgccgcaggccgtagggcgccaccgcgtcagaaggcgcgatccatggaccggtcgatcaacttccgcggcatcgccgggagcgccggcaacatcatgcagggaatggggaaattcgttttcggcaacgagggactcgactcaaaggaagatagctatgttgagagataccttgaccggataagcaatggcaccatacctgatgaccggagatctgccatgactgagctgcagtctctcgtggccgaaagtcgcttagcacagatgtcgtttggagcgatgggttttcctatcctcctcaatatttttaaagaagaccgcgaggatgtagagcttgtgagaggtgcactggagacctttgtgagcgcattgactcctattgagatgtcacaagggccaaagactgaggttcaaccagcatcagtgaattctgatctgctgtctcgagaaacggagaatatttctcttcttctgagcttattgtcagaggaagacttttatgtgagatactacacaatccaacttctaacagctctacttacaaactcgctgaaaaggttacaggaagcaattctattgattccccgtggtataacagttctaatggacatgcttatggatcgtgaggtcataaggaatgaagcactgttacttcttacttatttgactcgggatgcagaggaaattcaaaaaattgttgtatttgagggtgtgtttgagaagatatttagcattatcagagaggagggctattctgacggaggtgtagttgttcaggattgccttgaattgttaaataatttaattcgacacaacgcgtcaaatcagatgcttttgaaagagacaatgggctttgacccattgatatcaatactaaagattaggagaggcagtgcatttaattttacccaacagaagacagtaaatctcctcgctgctttaaatactgtggaattgcttttgatggtgggcccatccggtgaagcaggtaaagatgctaacaagaatgcaaatcaaactgcattggctcagaaaaacattctggaccatcttcttttgttgggtgttgagagtcagtgggcccctgtcgctctccgctgtatggcactgcgttgtattggcaatttggtgttaaggaatcctcagaatcttgattctcttgcaagaaagcaagttggagaagagcctcatgttcaacctgcactgaatgccatcttatctataatcttacggacatctatagcgcaggaatttgttgctgctgattatgtattcaagtgtttctgcgagagaaatcctaatggccaggcattattagcatcaactattgctccacatccaaaccaaggagatattcatgaacctgctagtgacatgccttttggaagtgtacttctgcaagctctggtttctagtgatgtcaatggagatatggaggcatgctgcagagcatctagcgttctttctcacattatcaaggacaacttgcaaagcaaggatcgtgtattgcaaattcagcttgagacatctacagcatccttggggcgtactgagccggtattgcatcgtattgttacatgtttgtccatcgcagcttcaatggagggagaaaatgaccaaaacaaccaactagaggaaccgtacattcaaccttttattcttcggctactcatcatatggcttgttgattgttcaaatgctgtcaactgccttttggaatcagcggtgcatctgaacttcataatagagcttgcttcgaataaacgttacgccgcttgtgtccgtggattggctgctgttgttctaggtgcttgcatcctgtacaatgctagccgtgagaagggtcgtgatgcctttgccgtggcagatgctataagtcaaaagattggcctcacaacatacttcttgaggtttgatgaactgaggaaaagcttggcacatccgttgtcagagcagcatcaccgcaaggagctttcccgatcaagtgcgaatagcatgtcagatttccaagagattgaagaggatgaaacaaataagggcgatcaacaccctgtgctttcagaaatatttgattcacagtttgttaatttacttactaagcttgaggctgatattagagaaaacataatggatatatttagtcggacaaaaactgcaacagcagtccttcctactgaattggagcagaagaacggggaggtcgatgaagagtatatcaagcgactaaagtcatttgtagaaaaacagtgcaatgagatgcaggacttgctggcacggaatgcaatgttagcagaagagttactgagaactggtggtggtacgaccacagatacttcacagaaaccgagcagtggccgagaaagggtccagattgaagctctcagacaagaactggagggggcaaaacgacagataggggcactcaaaagtgagaagtcccagattgaagctgaagctaacaaccaaagaaacctttcagtaaaactggagtctgatctcaagagcttgtcagaagcttacaacagcatagagcaggccaactaccgcttggatgccgaggagcaaacgaaggtcgagaagctgagcacaaggctggcagagctcggggaagatgtggatacccttctgcagggtattggcgatgacactgccattccggatgatgacgatgaagatgatgaagagtgattggtttatgtaacctgcaggtctgctggtgtaatctaccttcatgttgggtcatgatattgcgatggtaactggaaaatgtacagtggatgacaaatgcaccgttccaagtttaagttatttctagagaatgtgactaaatagcctcttgttaaatttgattgtctgaataactttttatattacctttgataaatagccccttgttgaatgggcctcagattcatcatcatatatactaaaaagaacgggtctgatctggtgtggaactcggcaacgtccgtagcccctagagtgctgctgataactgttcgacccacctccctgcatatggatgtgagcgatcgaagatcctaagcttcaaacccataagaataaggccattggccctttccatctggacattgctttggggatg

SEQ ID NO: 24519 - DNA, 1555 bp, Zea Mays
ggacataacccgcgcggggcgcagtcttctcaattcttcttcctgaccctcacaagtcacagccgccagcgacatgacttgcgccacccggagccccggcttcctccgcgaggccgagctccgcctcctccgctgcactctcccctcgctgccctcttccccgcccccacccgcttcccctccccctgcgcatccgctcggtcccgccgcggcctctgcgatcgctgccgttgaggccggcgactacgaggctgcgctcgccaccgccgcgccgcacttctttccggcattcgccccctctaggcctcctggctcagccgcgcagttctacgccgacctaggtgccgcagctcgggcgttcctgctggtcgatggggacggggcagcggcgggagaggggttcgattgcaggtgcgcagttgtgctttccgctgcagtggccgcgctgctcgcgttcacgcaacagaacgtgactgggcctccaaggaagtttcccacttttcctttttcaatgtcatcttttgatgaaagatgctatagtaatcttggagacacatgggatgcatgggcttctgacaatttagcttcttttggctctcatgttcatgggaaattttcactcttgcagttcattgtatttgcaaggcttttgtttaccagcgtacagagtctggatctctctgattgctggagcgtgtcatggtggttgtttagaatatcaatgttgcagcagaacatcttggatgagttatcatcgtctctgtttgatcaagtgcaagtgtacaagaataagatgttggatcattttggtgaactggaaaaggtttctacctactgggattgtttactgtctgatggagaaggttcttattttgtttcagctgctttcttagaggctggaatcgtggaatacaaatatggtcgggttgatgcttcaaggttgcatctcaatagcgcacaagaagcatgtggtctgcacctttcccttacagggatccttggtttccgaacaatataccaggtggatgcgaagtctcaaatggtgcttgttgcgaagaccaataagtcaggccctgatgaaggacaagtgacagaacccacagtagctcagaatgacaatgcagctttgaaaaatgcaaggagcttcgttcctgttgaagacgatgaattctgtgacatactaagaatgcccagactggtgcaagatgggagtaattctgccagtgaagacgccacgaaccccagtgcaaaaatatcactatcggctatacagcaggctgctgtacttgcacaatgcttgtatgtgagccggaggagtcgtgttgatgaaatgtctgggtgggagatggcaccatacatagagtcgattgattctcaggatgaatcttactttgtggtcaggagtttgtgcgatatactgcgtgttagatgggagtcaacccgcagtcggacaaagcagcgggcattactaatgatggagaatttgtttcactacatttttagcttccccatcactggagtatttgcagttccaggcttttctcttgagctttaa

SEQ ID NO: 24520 - DNA, 2073 bp, Zea Mays
accgacacaggcacagaaatctagatggcactcaacaagtgacagatggttgctgtgatagctcctaatgtcccggctgtctatgaagctcacttcggtgtcccaatgtcaggagctgttgtgaactgcgtcaatattcggctaaacgccgagacaatagcattcctccttgaacactccgtggcagaagttgtgatggtggaccaagaattctgcaccctagccgaagaatcgctgaaaataattggcaagaagaagacatcggctttcaggcggcctccaatcttgatcgtcatcggcgacccaacctgtgatcccaagtctctacagcatgctctgggaaagggagccatagagtatgaagagtttctgaaaaccggtgacccggagttcagttggaagccaccgaaggacgagtggcagagcatcgccctaggctacacttctgggactacttccagcccaaagggcgtcgtgttgcatcaccgcggtgcttatctcatggcactcagcgttgccatcgtgtgggggatgcctgaaggggctgtctacttgtggactctgcccatgttccattgcaatggttggtgctacacttgggcgctggcagcgttctgcggaacaagcatatgtcttcgccaggtgagcacaaaagccatatacgaaggcatcacgaagcaaggagtgacgcacttctgtgccgcacctgtcgtccttaacaacctgatcaacgctccggcaagcgagaccttcctgccgctgccccgcgtcgtcagtgtcaacgtggccggagccgccccgacgccgtccctgctgggcgcgctgtccatccgtgggttccgcgtcacgcacacgtacggcctgtcagagacgtacggtccctcgacggtgtgcgcgtggaagcccgagtgggacgagctgccgctggaggagcggtcccgcctgcactgccgacagggcgtcaggtacatcgcgatggagggcctggacgtcgtggaccccaagacgatggcgcccgtcccggccgacggcaagtcgtacggcgagatcgtgctgcggggcaacgccgtgatgaaggggtacctcaagaaccccagggcgaacgcggaggcgttcgcgggagggtggtaccactcgggcgacctcggcgtgaagcaccccgacgggtacgtcgaggtgagggaccggatgaaggacgtgatcatctccggaggggagaacatcagcagcctggaggtggagaaggtgctgtgcgcgcacccggcggtgctcgaggtctcggtggtcgccagggccgacgagcggtggggcgagtcgccgtgcgcgttcgtgacgctcaaggacggagcagcagccgacgggtcggacgaggcggcgctggccaacgacatcatgcgcttctgccgggagaggatgccggggtactgggtgcccaagtcggtcatcttcgggccgctgcccaagacggccacggggaagatcaagaagcacgagctgagggccagagccaaagagctcggccctgtgaagaagagcaggatgtgagagatctgggggccgacggcgatagcgtgtgatgccatggcaacaactcagaatcttgctccaagtcgcgcatataaaattcatgagttctgaagatgcctaataacttgagtgctttgcttgtatcgttctgaaaccagaagttcagaccagatccgatatataagtaagaactgtatcagattgtccggtttgcaggaaacagatgcggaggtgatgacgtttcttgacaagaattaacgccaaccgtcgcacgcgcgtgaagaagtcggaatcctgatgctctctccgtcttccttggcttctccccgtgttggaacaggtcacacacaggggcacaaggcgcatcgtttgggtttcgtctcgtgaaggcgaccgatagatccttcccaattttcatgtttgcaattaagtgccttttggttcacgaaatgtaacgtaaatggtaatgataacgattcacactcgaataccagcggtaacaaatttgaataagcagatatccatttatagtgtgatatcgattac

SEQ ID NO: 24521 - DNA, 1256 bp, Zea Mays
ttcccagcgcacaaggggaagaccagatctcccccatttctcctccacgccgccccctccgcatttcccgtgctcctctcgttccggcatggcggagcagacgcagccacaaggggaaggcggcgctagccccaagcacgagtccctgatggagaagctcgccgacaagctccacgtcggcggcggcaaggccgactcctcctcctcctcggactccgacagtgacgagcggccccgcccctcggcaccgcctgccgacgagctcaagcagccctccttctccgacgccgccgccacggcggccgccgaggccaaagccaaggtgttccgccttttcggccgcgagcagcccatccacaaggccctcggtggcggcaagcctgctgatgtgttcttgtggaggaacaagaacatctctgctggagtacttggtggtgccacagcaatctggatcttatttgaattgcttggctaccatctccttacttttgtttgccatggtctcatattcgccctgggtgttctctttctctggtccaatgcttcatcgtttatccacaaggctccaccaaagatcccagaggtgatcattcctgaagatttagttgtcaacattgcgctatccactcgttacgagatcaacagagcctttgccaatctccgccagattgctcttggccgggacctaaagaagttcctaatgtacctgtcctgtacgagaagtacgaggatcagattgactcgtatggcgagaaggggtgggttgaaattaagaagcagtatgccgtgttcgatgagaaggttctgagcaaagtacccaggggtcctgcgaaagacaagaagcactagatgcaagtgattcgaggtccctgttagtagggaatgctagcaaaaccggttcgagtttctccggaggggggcagcacttgtgggtgtgagcaccagtttgccacctgtgcattacgttgcgtatggctgcttagttgtttggtcttgatgggagtaagccgaattgctagctttgcgcttcatccagtgatgcagacgcagcatacgaatttctgtagtgctgtttgagtttgatctgtgttgtatgatgtgtgcagactgtgcttgcgacacttttttggtacttatatattgatgcattttggaatttgatgatttttatggttttttttttgctgagcttagacaacacatacacgggctgttaaacattgttgctttgcccacccgactgctggagtcggcct

SEQ ID NO: 24522 - DNA, 2620 bp, Zea Mays
tctactaaactcgttctcgaatatttgttgtaggctaatttatttttgaattaaaacacgtcaaataaaaaagaacggaggactaatttatattctgacagagattagtacagaaccaattatctctctaatagaaacccagtagaatcactcaatcagagaatcaaatatcatcaataatcacagaggaacgaagctcttcgaaacgggactttgccctctttctttgtgcttcacatcgcactctgatcaaagatacggcctggtccaaaagagtacacacttcctgctggcgcacccatgatgagggctgagctgaggccggagaggcggagacccatactgttccgtgctcaaccgattacggcccatcaaactacttccttcctctggtccaccagaaacgcacacgtcgcataccagaccagacctcaccttccccacccggacgccaccaccgcctgcgccctgctggctgccgcgatgctgccgtactccggtgaccaccagcgctctccgccgccgcagccaccgccacgagcggcgttctcctcctccctctccccatccgccgcgcccttccccgccgctgatccggtgggcccgggcccaggccccggccgtgatctgcccaccgccccgtccgtctacacggcgggcggggactggggcgccctgtcgtggatggagcctcccgcgagctacatggcccccgccgccacgccgccgggttataaagcggtggagaaagaagaaagcactcacaagagaggtgaagacccttctcaatgttatccaggtgttgaggggaatatgctgaatatgtcttccgaatccagctctagcaatcaggaagatgaagaggaacttctccaatcagtgattcaaaatcttacagctgccagttccaaaagaagcaaggttgaacaaaaaaatgatgatggattgagtaactccagccaaatgaaattcaaagatattaattatgtgaggaaacacttttggaggtcaatgcatgaagactcagaacaggagaatgctgattcagaatttaaggccactgtttcacaggttcttactaatcaccaggaggataaggtgctcgacaacactgaagttcctcaggcatcaatctatagaaacttgtggattgaagcagaagcttcagcttgtaaactcaaatatgagcttcaacatgctctcctgaagctcgagacagcaaaaggcctcaacgacacaataaaagcccctgactcattggaagacagtaaaggctctaactcatacattttcagtaacaaaccacagaaccatgggaaaggaaccgtttcatgcgctgcggcctttcagggccacggaggagattctcgtgacaagcaatctcctgttgtaagtaggagcattttcaatggtgttgatgctgatgtgtttgcccgatttgaagttttgcagtcccgtattgataatataaactccttgagtgagattgactgtggggagcagaaagaagcaagcaagagaccatatgcagtcgaagatactgttatggcgagactgaaagttttgaagtctcgtcctgacaatataacctctttgagtcaaggaagcactaaacaccagctagatggaagcacaaacagtgcagataatgttgatgacactgttattgctaggctgggaattttggagtcccatcctaataatgaagccctattgggacaggaaagcagcaagcgacaactggatgcgagaacaaatagagaagatgggattgatgctgctgttatggctaggctgagaattttgaagtctcgacctgataatgaaacctcaatgggcgatgccaacaaggagcagcaagacgcatgtggtgaacaattaaatggggatgaccttggtattgtgtccaatggagccattagcaacaccctgagtgagaagtgctctaagtttacgcactctgatgatcatttaggagaaaaaaactcagtaggtgtcccggacacatttggtgatggaaacagtgctagggagaaaaaggaggttggtggttcagcagatgttgctacccccatgaggtgcaaaggtacatctgatggagtgagcgtcggaagcgcagtacatggtgaagataatcttggtgaaaaccatgtgtggcttcaaactgctggggactctcatgtttgcacagaagggtctcaggaagcgcacccaatctcctctccagttgaccagtatggtggttcacctacagagtgggagcacgtgctgaaggagaatttcttccatccaggcaaattggcgaattctgacccataaactggaaagcttttgtttcagctcatgttgcctcaaaatgctgatgcttcttgtaaatatatgatacgatattatacatcccctcccccgaacctttgtctctatgttcaataatctgcatatctggtgatcaaggaaacgcactgtgcccccgatggtgctatatggaactagtctggtttgtctgcttgggtctatcatgccatagtctatctgtaaatggcacatgtatgttctggaccgagagtgaattattgtatatatttacttccagcaaatttggatattgtggactgtgcag

SEQ ID NO: 24523 - DNA, 2616 bp, Zea Mays
cttcctttttgtgttccattctgttagattgccacagtgaactctgtcacagaacttggttttgaggaaatgcaatagcaatgaatcatctaaaagggaaaagaggcccacttctgcaggtgtgatatcaccccaggctcatagtgcagcaccatgtactaaagaaattggactctcctttgtgactacaaataggatgaataatgtgtctgccatgtgggccaaagtggatacatcagatgtgagggctgaggaggttgaccctgaaacaaaacgcaaatacgcaagctacctattgcactacctgttgccttgtttgacacaactcaacaaggaccagatggaagaaagagaagcagaagccaaaattcgaggattgcaattgtcggaattgattgttgagaaagctgtctcctggaatgatgagagggtgttctgtaacaattgcaaaacgtcaatatttgatctgcatagaagctgctcaaactgctcgtacgagttgtgcatcagttgttgtaaggagctccgtggaaattttcttaagatcaattgtcaaaagggactggtacctgagcataagagtagaggaattgactatatgcatggtggtgattgtaagccacctaatctagaaaatgacagagaaacaggtttgtctagttaccaatctaagtctatcaagtgggaagctgatcctggtgggaccatttattgccctccatctgaactagatgggtgtggtaaccatgttcttgagttgaaacaaatttttgaaacagataggttaattaagcttgaaatggaagcattgcggctgagcaaccagatagaaccttctgatatttccagtatagatatatgtgaatgctcatgttcagctaataatgtaagttcaaggaaagctgccaccagagagaactccacagataacaacatatactgtccaatatcagataatggtgggccagatgatctcaagcacttccaaaagcactgggtgaaaggagagcctgtaatagtgcaaggggtgctcagtgaaatgtctgatttgagatgggagcctgaaaaaatgtgggctgaagtacatgacgccaatactagttctgagatgaaaagtgtgaaaaccactgattgtatgtcttgttgtgaggttgagataagtgccaaggactttttcaatgggtattatcatggtcggatgtatcataatctttggcctgaaatgcttaaattgaaggattggcctacttcagaccattttgagaatattttgccttcccatggaaagacgtacatcaattctttgccttttcaaccatacacaaatttgaaatctggtttactaaatgtctctgcattgcttcctggtgacgtcttaaagcttgacatgggcccaaaatcatatatagcttatggctatgcagaggaactcattagaggagattctgttacaaagcttcattgtgatttgtctgatgcagttaatgttttaatgcatactgccaaagttgtgccttctgaagaacaaaaagaggggataagagatttgaaaataaggcatgcagaacaagataaaaaggaatgcttggggaattcatcaatagatggaaataaaacaagcatggagcatgctcatatatcatcagtttcctgcgaggatggtggaggtgcactatgggatatttttaggagggaggatgttggaaagctgaaagagtacctcacaaaacattccaaagaatttcgccatatgtactgttgtccagttgaaaagatatttaaccctgtacatgatgaaacattttatctgaccaacaaacacaagagaaagctcaaggaggagtatggaatcgagccatggacctttgtgcaaagacttggagatgcggttttcatacctgctgggtgtcctcatcaagtacggaatctaaagtcttgcaccaagatagctctggattttgtatcaccagagaacattcagcaatgtctcagcttaaccgaggatttccggagacttccagtgggccacagggcaaaagaagataaactagaggtgaagaagatgatcgtctatgccgttgagcatgctttggcgattctgaaagagccttgcacaccccgcgagtccgcctgaacaagctggcatcatatctgggtttctgctagtcaacgagggaaactagagaacatgatgcgatgttgtgcgacagtagacgtggggtagcgctagttgctttgcttgtcggcacaaataataatcttggaaatattactaataagggctcggttaggaagggattggaggagattaaattttttttttttattttaactgaatagaaagagatttgatgagatccctatacaatcgaaaaaggcctaaaatggtagattttgctgatggtgtgcatcactgaagagctgggcatgctgaaaaaaatagatgtcatactgtaaatctacaaaatgtggcttcgtttccaaaaggccttgcccctgttatctataactgtctacagtctatacgagtaacatatgctttcggcgttattattaccgaataccgtagaaactgcatcgtaatgcgaacaagaagaaatttgcctaaaaatctct

SEQ ID NO: 24524 - DNA, 1261 bp, Zea Mays
cgtgactcgtcaactgctttcggcccaaaacacttccctgctctctcggtctctcccagagtcccagctccctcactctactctggacgcgactcgaacttaaaccctagagccgcagccccggtcgctccaccgaccccaaatctcaaatcagcgggagggaactcgcacgcgaaggctgaactcatggctcgcgtctacgttgggaacctggatccgcgtgtcacggcgcgggagatcgaggacgagttccggatgtttggggttctgaggagtgtatgggttgctaggaaaccaccagggtttgccttcattgactttgatgaccgcagggatgcacaagatgccattcgtgaattggatggtaagaatggttggagggttgagctgtcaactaaagttggtggtggccgtggccgagaccgtaacggttctgatatgaagtgctatgagtgtggtgaagctggccactttgcacgtgaatgccgcttacggattggttcaggaggcttgggtagtggaaggcgtcgcagccgaagtcctagatatcgcagccgcagccgcagccgcagcccaagatatcgaaggagcccaagctatagcagaagcccgcgagatcgttctcctaggaggcgaagttacagcaggtcgccactgggatctcctgcacggagtctcagcaggtcaccgccgctgccgccgcctcctcccagaaataacagcaggtcaccaccggcagcccgagacgtgagcaggtcaccaccggcagcccgagacgtgagcaggtcgccaccaccacctcctgatgccagaagaagctatagtggatccccaggacagcagccacaacgcgacgagtccccatatgccaatgacgcctgagattctcttagctgccccaagatgctggaaaatgctaggggcccccagcatgttttgcctgtccggtcggcacaactgtaattctgtaggatcgagtctgagattttgttccagtgttttgggtttcccttgacacatcgctgctgatacaattgtggaggcaggagcacaacgtttctgttttaagtattgactggatgactttgggcgcttgtagttgtcaaggcaggacctgatttgtgttaggcttgtattactagactgcattcgaatttggagaaagtgttcatcgtgctgtatgttgagatatctcactaggtcaggctctatttttatttattttaactaaatttatttaggtctctaagaaattgtgaag

SEQ ID NO: 24525 - DNA, 1656 bp, Zea Mays
ccacacactatcctctccctcagtgctcacgtctccaccggtccaccccctcggcagctcaatggcagctgcgacggcgccaccgccggcggcggttgccaccaccctctcgggcctcatgcgctgccagaacatccgtagcagcaggcctagagccttctacgcgaggtgcgcctcctccaacgcgagcgcggaggcggcggagagccggaagggaggccacggcgggacgcgcctggaggaagccgtgcccgtcggcgaggggcgctcgagggtagacgcctggatatcggcgcgtctcggcggcgggggcgttagccgcgcgcgcgtgcaggccagcatccgggccgggcttgtcgccgtcaatggccgcccggtctccaaggtttcgcatactgtgaagggaggggacttggtcagctgcacggtgtcagagctacagccgctgagggcagaggcggaggacatcccgctggacatcgtttatgaggatgaccatgttcttgttgtcaacaagccggctcatatggttgttcacccggcgccaggaaatgccaaaggcacattagtcaatgctatacttcatcactgcaagatctccacatttacctgtttagcacgcagctcagctggtgatgaatgcccggattctacggatgaagacactgatgtatttcatgtggatcagtttgctgctgaagatgtaagttcagaagtccggaatgctcttgtgcgccctggtattgtgcacaggctggataaggggacaagtgggcttcttgttgttgctaaggatgagcattctcatgctcgattagcagaacagttcaagctgcatacaatccgtagggtatacatcagtcttacttgtggcgcacctaatccaaattctggcaggattgaggcttctattgcacgtgatcctaacaatcggattcgtatgactgctattgctggatcaggccacagatatgcacggaatgctgctagtacaaagtaagagaggtctttgctggtggcggatccgcactagttgagtggagactagagacaggacgcactcatcagatccgggcgcatgcaaagtacatagggatccctcttctcggcgacgaaacatatggaggtacccagagcatggcgttatcgctcctgagaccaaggagtccttcgaaatatcacagcggcctttcgaatctgttgtctaaagtggacaggccttgccttcatgctgcatcgcttggattcaagcacccacgttcaggaaaggtccttgagttctcgtgccccccgccagatgatttcttggaggtgcttggtgaattgcgacgtgttacgtctaggtccagtgatgccccaaatggtgatggtgttttccggtgagggagatggatagaaccaaggctgaggatgtggaacaagacatgggaacccttggagatttgttccaggctcctagaaagagaaaagtgtttcgtacgagttttcctgatggctggtggaagtgagagggaaatgagtaggagaatctgtatgctttcggctgggctcatcagtacacacgcatttgttttgggctccgattcatgggcttccagcaggaagaacttcacgggattcgattgatcgattcttcattcttttcttttctttttt

SEQ ID NO: 24526 - DNA, 1339 bp, Zea Mays
ttgcaagtaacaactactcttctccggactctcggggtttcccgacgtccaccacccatcctcgcttctctcgagtcctcaatccatcctccggctgttccctcccagcgacgaaaccctagcccgtcacctcgacgcctagcccgccaccttgccgcccgtcgctgcaggtttatggcgcctgtgtgatcggatcagcagtccgctccgtctccctcggcccacgcatctgatgttcctctcccgcatcgtactccgcgacctggattccatcgactctccggcctccatggcgtcctcgaagaaggttgtgacccgtgacgagtgggagctgaagctccgcgacgtcaagatccgcaaggaggacatgaaccgcctcgtcatgaacttcctcgtcaccgagggcttcgtcgacgccgccgacaacggagattgacctagcgaccatcactgatcgaatggaggttaagagagcagtacagtcgggtaatgttcaggaggcgatcgagaaaatcaacgaccttaaccccacgattttggacacgaatccccaactatactttcatctccagcaacagaaactaatagagttgattcgcgtgggaaaaataaatgaagctttggagttcgctcaagaagaacttgcaccgagaggcgaagaaaatcaaacatttctcgaggaaatagaaaaaactgtagcactactggtttttgaagatgtaaaaaattgcccttatggggaactattggatgtttctcaacgtttgaagactgcaagtgaagttaatgctgctattcttacaagccaaagccatgagaaagatccgaagcttccaagcttgttaaagatgttgaaatggacccaaaatcaactggacgaaaaggcggcttatcctcgaatcaacgatttcaccactgccgcgctggaagatccatcgatatgaatctgctgtgaaggaactgagggtatgcaccaagcctgcctggtgcctacacgtggttgccccggatctgtcaatagatcatcgtctgcagcgattgagttcaccccttgcactagtgtttaagatcaatgcaagcaattgatccgaaaacatcacctgtgttctacctgtacatgatgtagaagacatgtttgaaacctttttaagttagtgaaatgttggatttttttcatggacatatattcgtttcaaacctgtggtacttgcaacacgcaaattgtttcagtcatgctttgggccttgaattcacggtcctactgtcagtttgatgcaactgtgcaaagaagctcattttttttcaatgtcagaaccaattagcggctacagatttttag

SEQ ID NO: 24527 - DNA, 3067 bp, Zea Mays
acctcgaacgcgatggcggcgccgctcgcccctctcactgcggccgcggtgctccgcctcgggagccgaggcctgcgccaccgcatcctcctcgcttcgctccgcccctgctcctccgcaaccccgccccatcgttccgccctcccggccgctgcacgccgggccccgccgcctcctcgccgtttcgcccacactcttgccgcgtctgcggccacggccatctccgagggtcaggcggatttagtgcctggttcaacaacttcaaccaagggacgcatctaccacgagacgtatggttgccaaatgaatataaatgacatggagattgtgctttctatcatgaaaaatgaaggctatgatgaaattgtccctgatcctgagagtgcagagataatatttatcaacacctgtgccatccgggacaatgcagagcagaaagtctggcagcgtctcaactacttttggtttttgaaaagggaatggaaagctaatgttgctgaaggtagagcaaaatctatgcgtcctccaaagattgctgtcctggggtgcatggcagaacgactgaaggagaaaatactcgattctgataagatggttgatgttgtttgtggacctgatgcatatagggatttgcctaggttgcttcaggaagtcgattacggccacaagggcatgaacacacttctatcactcgaggaaacttatgctgatatcaccccagtaaggatctctgacaattcaattacggcatttgtgtcaatcatgagaggttgcaataatatgtgctcattctgcatagttcccttcactagaggtagggaaaggtctcgcccagtgtcttctattgtccgtgaggttggtgagctatggaaagttggtgtgaaggaggtaatgcttcttggtcagaatgtaaacagctataatgacacttctgaagtagaagagttggagcctggcaaaaattggcaactcagtgaaggattttccagcatgtgcaaggtgaagaatatggggctgcgttttgctgatctcctggatcgattatctttggaataccctgagatgcggttcaggtttacctcaccacacccaaaggatttcccagatgagctactgtatttgatgcgggataggtataacatctgcaatcttattcacttaccagcacaaacaggcagtacagcggcgctggaacgaatgcggaggggttacactcgagaagcatacttagaacttgtccacaaaattcgtgatgtcattcctgatgttgggctaagcagtgatttcataactggacgaagcagacaactccaaggcttagctaatgctatggtaaagttgtgggagaaaagttctattgctaaaattgctttgaagagaggagtacagcttaccaccagtgagaggatggctgaagatattaaaaaattaacaggtggtgtgatgctttcaaggaacaatgaatttatagtcttctacagagggaaggatttcttgtcctcagaacttgcagaggtgctactagagagggaaagattagcaaagtcacttcaagatgaagaagaagcacggcgaaaggcagcgtcttatttttcaagtgctgagacatatgcacagcccactgtagctggtactctaggagagactctggaggctaactctaaatatggaactaaacatgatgagaatcatgcagacaaaatggcaagaactattgaagctgcaagacatgctgacctcgtaagaaagctagagtggaagctttcacttgcacagaaaaagatggagaaagccgaaagggtactaggaaaggttgagacagccctgaggccaaccgaagattccagacctcctgaaacaataacagatgaagagagattcatgttccggaagcttggtctaaggatgaaggcatttctgctccttggaagaagaggagtttttgacggcacaattgagaacatgcacttgcactggaagtacagggagctggtgaagatactagtgaaagcgaagtcttttgcagacgtgaagaggatagcactgtcgctggaagccgagagcgggggaatcctagtttcagtcgacaaagtctccaaaggctatgccattgttgtgttccgagggaagaactacagacgcccttcctcgctcagacctagaaatctcctgtcaaagcggaaggctttggccagatccatcgagctccagagacatcaggccctgagtcgtcatttcgcaaagctaaacaggaaggtggagcggcttaaggcagaactggtccagatggaagacgtgaaggagcaaggagacgaggagctgtacgccaaactggatgccgcctattcgagcgacgacgaagacatggaggatgaggacgacgaggcctacctcaagcgctttgacaatgaggtcgccggtgctaccgccgacgacgatggcagcgacgactacacctccgccgccgacgaggccgattaccccgactcagacgacgaagctggtgattgctccgaagacgaaggcgaggacgacgaagatgaggcggctgccggagtctctgacgctggcttccacggcgaagtagtaggtttcagttccgacaccgacagacgaaaccacgacgtaaatgagtactagaacagtgctggttgtttgatgcatcggcgtcagcgcttcacgtggggttcgtcaggcttcgctggctggaatgcgcgtggtgtaggtggaaggccctacgctgcttggcggtgccggtgctgctgggggcgcatgaacgatgaatcctgcggctgacgccctcgtttccggcctcgggcccaatgcatcgagccaggaaggtgtccgctcctcaccgcgagagcaggcagttcgactttgcgcgtaccgtacgcaaccttccgtgttcctttgcatggtgactggtgaggtaatgccaaaacatcacagagcggtgagcactgcactttgtacgaaacgcgcaggacaatccactgtccatacccataagacataaaatacgtactccttctgtccacataaattagttattttaggtttgttctaa

SEQ ID NO: 24528 - DNA, 385 bp, Zea Mays
acagacacgatgacaaacgagattgcctgagcaccggcgcctgagaagatgtgagagaccgagggagagagaataagaacgccctgtgcggatctccctcaaacgcgagacgccgggatggatgacctcggggccgcgccacctgagccatcgctctgcaccggtcgggcttcttcatcaagggatcttgaagctattggcgtcgtgaccggttcgtactaggtgccagcaccggtgagaccctctcctaatgactcgatctctccatcaccatagccgcgcataatggaagtagatgaagctgcgatcgccatgaacgaatctcgaggtcgggcgtatgcttcctgggcgtgcgacatgagtaccgtggaggttcagctcgctc

SEQ ID NO: 24529 - DNA, 3415 bp, Zea Mays
aacaaacacttctcgggttcctttcttcgtgcgcactccactttcgccggcgtcgccatggacgccaacgtcgtgcagcgctgcctcgaggccggcggccgcgacttcctcttccaccatacctcttcccctccctctccgacctccgcctctgccgctgcatcctcctccatcctccaatctctccccctccacgtgtccttcgaccgcgggtattacctcctcgtcaaggcgatccaggagctgcgtgcgcgcaaggacggccacgtcgttaccgtcggcatcggcggacccactggctcgggcaagaccagcttggctgagaaggtggcgtcggtgctagggtgcgtcgtgatcgtctccatggaggactaccgcacggcacctggtgtcgacgacggcatcagcgacgtcaatgccgtcgatttcgacgcacttgctcgcaacctccaggatcttgtgaagggtaaagatacaatggtgccactagttgattttcaagagaagaaacgcaccggatggagggaactgagaatttcttcatctggagtggtgattgtcgatggtgcgtatgctctgcattcaacactacgatcattgcttgatatccgagttgctgtggttggcggcgttcattttagcctgctttctaaagttcagcatgatattggagattcttgctcattggactatctaatcgacagtatatttccattgtttagaaagcatattgagccagacctgcatcatgcccaaattaggattgataacagctttgtctgctcatttcgagaaccgtactacaagctgaagtgcaaaaatgagtcatcagatggcaagaagttatattcttttgaacaaaataaagtggaaactgagaactttattgagatgtaccttaggccgccttttgcttctgaagaaatgaagattgatgattggattaaggttaggcaatgtggaataagatactatctatctctcggagaccaaaggattgttgacaagtacttcataatccgtccaaaagctgagtttgaggttggacgaacaactcttggaggattgttggccttggggtacaatgttgttgttagctttaagcgtacatgcacatctgtcaatatagatcaattactgatagctgcagagaccattgacactctaaatgagacctttttggtattaaaaggtccaagcagaaagattgttgcagcagaggcttcaaagcttggtataaagggaccatggatcacaaaatcatacttagaaatgatcttggagagcaaaggggttccacgacttaatacaccaccaccggtatcaagcaaactgctaactgaaagtcaagaaaagaaaattgctgcacctaaacctattcgtgtttctgctgaaaacattacaaatcttgatgacttgatgcaaccgtggacgagatccccgcccaagaagttggaacaagaacacgtattggcaaaatggcagtttatctcagattcttcttcaagaagtaacatccagctggctcctctgccagattcttatgacctggataggggccttctcctatcagttcaagcaattcaggcattgttggagaacagaggataccctatcattgttgggattggtggtcctagtggatcgggaaagacaagtttagctcagaagatggcaaatataattggctgtgaagttgtaagcttggaaagttattacaagcctgaacaagtgagagattataagtatgatgattatagctcattggatattgctttgctcactgagaacattatggacataaaaaagaggcataaagcggaagttccttgcttcgactttgaaaattttagccgaaaggggttcaaggagcttcaagtatccgaggaaagtggagtggtcatctttgaaggtgtgtacactttacatcctgctataaggaaatttctggatttgtggattgcagttgttggtggagttcattcacaccttattgcaagaatacagagagacaagaatcgtgctggcttttctatttctcagactgaaatcatgaccactgtgtttccactgtttcagcaatacattgaaccacatcttgtccatgctcatcttaagattcaaaacgattttgatcctgtgctctctcctgaaagctcactttttgtgttaaaaagtaaaaaacaggtatcctgccaagatatactgaaggtactagatgctagtaaagtctgcagttctgtccagaactttactgatgtgtacttacggcttcctggcataccatcaaatgcccagctgaccgaaggtgagtgtatccgggtcagaatttgtgaaggaagatttgcattgttgatacgagagcctataagggaaggaaattttattatccagccaaaggttgattttgatattagtgccagtactgttgcagggcttcttaagcttggttaccaagctgttgcatatattgaagcttctgcggtgatttaccaagatggaaagattttaatagaagttgaccatctacaaggagtgtcgactccatatcttcaaattaaagggacaaataaagaaattgttacctctgctggttctgcactctgcttggatggttcatacacaacaaagagttatcttcaaattattttggagagcttaccagctgatggtaatgtatctattggtattcacaatcaacaagctgcaaggctgcaggaactggttgagttcatccagtcacagggagggagctttaattcagatttatcgtcaccaatacgagaaacttcctctacagatagtgtgattgatgatatgcagtccaggataaggaagcttgagagatggaatacgataaacatggttttgtggactatattattgtctgctcttgttggatattccctataccagaaaaaacgtcactaggttctctggcagttttactgatagggtaggacgcatacctcattcatggcgtctgcagaactgacttgcacgcttcaggcacaaagttgtaagtgctagagaaaatgaaaagcagcatgtagatacaagatctaagacgtgagagatggcctgcgctcatgccatccctgatggcagtcttatttgtttgatcactcaatgtctgtaataatcttctcgtatgagatccatcaaaaaaatttgtgcagttaatgtgtatgaagcactaacgttgataatcttctcatatggtccatgggcgtttatgtattgtcatcaccacttaagtattctcatctccattaggccttgttagacactcgtatttgtctcgatccatgtgtattgaggtggattggaatgtaacttaaattaaattacatctcaatccatgacaatacacgtggattgaggtgtccaagtattcttcacgtggattgtttaa

SEQ ID NO: 24530 - DNA, 1304 bp, Zea Mays
tggcagtggaatgttttgtgctgagggacttagagctctgaacaagattggcatatcaagtgaagagaactattctggagaacatgtttcttttgctactgtattcacaacctacaattctgtctcagctggagatgacaatgttccatctgattctgtaactgttggaaacagttcttatagcaaaatagaaagatccatggccattctgaacactttcatcagtttcataaagtaaatcaagggactgctacactattgccagttgaaggaaactattctcgaggaaatttgatgcttcagagaataaagacatacattgcatttctggagcaaaagcttgtggaatttgataggatggagaggttgaatcattttgttttaactgattccgatatagcagtggttggtgatcttggacatatattcaaaaaatatcctcattttcatctggctgttacttttcgtaataacaaagggcaaccgttgaattctgggtttgttgcggtaaggggaaccagggatggcatcactaacgctgtggaattcttgaaacaagtccttggaacttacagtttaagatatatgaaggcttctcgtatgcttggtgaccaattagcacttgcatgggttgtcaagtctcatctaccatcggctttcggaaaattttctaagaatgaagcatttactggtgaagttaatggaacatctgttctcttcttgccttgtgctgtttataattggaccccgcctgagggtgctggacagtttcatggtgtacccttggatgttaaggttgttcatttcaaaggttccagaaagcgattgatgcttgaggcatggaatttctacagctcaacctctaagctgtctgatatgctatgcctaatcttgagaagtggccggacgaaatatgacttctgaacttttgggttaaaactgacacatgttgatactgttcaaagctgttgtatgttcaagtatagtacaaaaaaatgctgaccatgaggctgtcattgcaagaattcagatcagcataaaaaattgctagtagcattcagtatgtaacaaaaacatgtgagaacccatacgagaaccacgcagggtgaccatcgccttgtgttcttttggtttatccctacctgttaaatatgtaatgtggttccccaccaatgtgcgctatgtaggcaatttcgccgtcagatgtcgtcagcagtattaaatagagctggcgctgtttcaatgtgtcaccggcaaaatttgcagatgtttttttttgctgtcattcatcgcattttcaccca

SEQ ID NO: 24531 - DNA, 1760 bp, Zea Mays
ctccgctgatcaaaaagccccgaactccatcggcagagcccagtaggaattagtgtccgttctgacttcagttcagcctgccttattcacaaggctggagccccatcgaattctgtttctggcgtgatggctgttcaggttcaccgccaccgtaacaaggtccgcaatggccaagctatcaggtgtgcaatggcaactggaaaagagcagggtgcaatttccactgccagtagcggtgatcaaaccaagggcggtttgcgtggaaaattaaacaaagttgttttagcttatagtggtggtttggatacatccgttattgttccatggctcagggagaactatggttgtgaagtcgtttgtttcactgctgatgttggccagggtgccattgaattggaagggttggagaagaaggcaaaagccagtggtgcatgtcagcttgttgtgaaggacctcaaagaagaatttgttagtgaatatatatacccctgcctgcgtgcaggtgcagtttatgaaagaaagtatctgcttgggacttcgatggctaggcctgttattgctaaggcaatggttgatgttgccaaggaagttggtgcggatgcagttgcccatggttgcactggaaaaggcaatgatcaggttcgctttgagcttacattctatgctttaaatcctgaacttaaagtggtggcaccttggagggagtgggatatcacaggacgtgaagatgctattgaatatgcaaagaaacataatgtacctgttccagtttcaaagaaatcaatatacagccgagaccgaaacttgtggcaccttagccatgagggtgacatcctggaggacccagcaaatgagccaaaggaagatatgtatatgatgtcgattgctccagaaaatgcgccctcgaaacctgagtatttggagattggtatcattgctggtgttcctgtttcaatcaatggccgagacctctcaccagcatccctcctcgcggagctcaatgaaatcggtggaaagcatgggattgggcgtatcgacatggtggaaaacaggctggtcggcatgaagtcacgtggggtctatgagacccccggtggcaccatcatggcagccgcggtacgcgagttggagtccctgaccctggacagggagaccatgcagtggaaggacatcattgccctcaagtacgccgagctggtctatgctggccgctggtttgacccgctccggcagtcctttgatgccttcatggagaaggttaccgcgacgaccactggttcagtgaccctgaagctgtacaagggttccgtgaacgtcgcgtcccggaagagcccctacagcctgtacagggaagatatctcctcgtttgagaacggggagatctacaaccaagctgacgccgaggggttcatcaggctgtacggcctaccgacacgggtccgggcgatgctggagaagggtatctgagtagttgcctgcttgatttagaaataaaaacatctgtttcccagtgattgcagacagatgggtgtttggtggggagttcaccatgctgttttaccatccgtttacattgtccaaaccaaaatattatcattgctacatcagctgcttttctcattggtttatattgagcagaccattctggtcgattatcgtcatctattgatctgcgataacgttggagcgatgtctatctatgactttagataccttgacgattcgaactgatacaccgttcatgccattacacaaatttc

SEQ ID NO: 24532 - DNA, 1574 bp, Zea Mays
tttttcgatggtattggcattggcatttccccgcaggatgacaacagcaatatctattgaggatgtgcgcagagaggtgaaaattttgaaggcgttatctggacattccaaccttgtcaagttttatgatgcttgtgaggacgcccttaatgtctacataatcatggagctttgtgaaggtggagaactactggatagaatcttgtccagaggtggaagatacaatgaaggggatgcaaaaattattgttgaacagatattaaaagtagttgccttttgccatcttcagggtgttgttcaccgtgatctgaagccagagcactagggaagagcattctcctatgaagataattgattttggtctctcagattttataagaccagatgaaaggcttaatgacattgttggaagtgcatactatgttgctccagaagtcttgcataggtcatatagcacagaagcagacatgtggagcattggtgttatcacttatatattgctgtgtggtagcaggccattctgggcacgaactgaatcaggtatttttcgctcagtgctgagagctgatcctaattttgacgactcaccatggcaatcagtatcgcctgaagctaaagattttgtcaaaagacttcttaacaaggattacagaaaaagaatgactgctgcacaggcactctctcacccctggctgcgagatgaacaccgacaaatacctttggatatgctagtattcaagttggttaaagcataccttcgatcgacgcctctcaaacgggcggcattgaaggccttgtcaagagcaataacagaagatgagcttatctacatcagggcacaatacaacttgttagaaccagacagcggagatggtagaatatgtattgataatttcaggatggctcttttacagaactgtactgatgctatgaaagaatctagaacacttgagatcttgaatgcgctggagccactcgcgtataggagaatggactttgaggagttccgtgcagctacaataagcccttaccagcttgaggctgtgccgcgctgggaagaaatcgccagtactgcattcgagtactttgagcaggaaggcaaccgtgctatcacaatcgaggagcttgctcaggagatgaatctttctgcagcagcgtattccatcgtccgtgactggatcagaccgttggacggcaagcttagctttgtaggctacaccaagtttttgcatggactaacgatgcgaagcggcaacacaaggcggcaccattgattcccttgctgccgcggtggttgcttgaattggttccattggttttgttgatggggatttggagagatggtgttttgtccctcttcttttcttgccttagctttttgtagaatgcttgtagagagagagagaaagggtaaaaggaaaaaaagaaacggaaagtgatagctcaaaattgagttgtagaagaaaaggtcattttttttttgccttggttctggtacattgtttgctttcggctatgatgaatggcattgtacagttgtcagttggcacatgctacatggtgctgtgtcgaac

SEQ ID NO: 24533 - DNA, 4373 bp, Zea Mays
gcatcagatcgcctgttggcagcagcgctagtagattttgctcgtgcgtactcgtacgacgagctacagtgcagatagagttccccaagatcgaagtgaggtatgaggatgtgacagtggacgcttacgtgcatgttgggagcagggctctaccgaccatcccgaacttcatatgcaacatgacagaggcttttctgaggcatctgaggatctatcgaggaggaagagttaaactgccgattttggacaacatcagtggggtaattcgcccatcaagaatgacactgcttttgggccctccaagttccgggaagaccaccttgcttcttgctcttgctggacggctcggtcctggactaaagatgtctgggaacattacttacaatggccaccatttgaacgaattcgtgcctcagcgaacatctgcttatgtcagtcagcaagactggcatgcttcagaaatgacggtcagagaaacgctggagtttgccgggcgctgtcagggtgttggaataaaacatgcttgttgaactgttgaggagagaaaagaatgcggggataaaacctgacgaggacctagatgtgttcatgaagacaagcctcgtagcagagtatataatgaagattttaggactggacgtctgtgctgatactattgttggagatgaaatgatcaaagggatctccggagggcaaaagaagcgcctgacaacaggtgaattgctagttggttctgcccgcgtgctgttcatggatgagatatcgacaggccttgacagtgcaactacatatcagattatcaaatacctaaggaattcaacacatgctcttgacggaactacaatcatatccttgcttcagccagctccggaaacatatgagctatttgatgatgtcattcttatagccgaaggtcaaatcgtataccaaggtccacgtgaatatgcagttgacttttttggtgctatgggattcaggtgtccagaaagaaaaaacgtggctgattttttgcaagaagttttgtccaagaaagatcaacagcagtattggtgccactatgattatccataccaatttgtttctgtatcaaaatttgctgaagccttcaaaacatttattattggtaagagattgcatcaggaattaactgttccatacaaccgacatcacaatcatcctgcagctctttgtacatcaagttacggtgtcaagaggcttgagcttctcaagtccaactaccagtggcagcgtctgctcatgaaaaggaactcattcatatatgtcttcaaattcattcagcttctacttgttgcccttatcacaatgacagtgtttttcagatcaacaatgcaccatgactcagttgatgatggaatcatttatctcggtgccctttactttgcaatagttatgattctgttcaatggcttcactgaagtctcaatgctggttacaaagcttcctgttctttacaagcacagggacctgcacttctacccaccttgggcgtacacacttccttcttggctcttgagcatccccacctcactttacgaatccggaatgtgggtgcttgtaacatattatgtggttggttatgatccccaatttacaagatttttgggacaatttttgttgcttttctttctgcaccaaacatctttggctcttttccgagtcatggcctctttgggccgcaatatgatagtcgctaacacctttggatcattcgctttgttggttgttatgatccttggaggattcatcataaccaaagaaagcataccagtatggtggatatggggttattgggtatctcctatgatgtatgcacaaaatgctatttctgtcaacgaattccatggtcattcttggaacaagcaatttgcaaaccagaacatcacaatgggtgaagcgatactcactggatatgggttattcaaggaaaaatactggttttggatcggtgttggagcattgtttggttatgcaattattttgaacatcttgttcacaatgttcttgacacttctcaaccctattggtaatctgcaagctgttgtggccaaagatcaagtacggcacagggattctaggaggaagaatgacagggtagccctagagctaagatcatatctgcattcaaattcactaagtgtacttccacctgcaggtaatctcaaggaacagaaggggatggtgttaccttttcaacccctttctatgtgcttcaggaatatcaactactatgttgatgtaccagtggaattaaaaaagcaaggtgtagcagaagaccgcctgcagctgcttgttgatgtcactggagcttttaggccagggatactaacagctcttgttggagtcagtggagctggcaaaaccaccctcatggatgttttagctggcaggaagactggaggtctcatagaaggaagcatcactatatccgggtatcctaagaaccaagagactttcactaggatatccggatattgtgaacagaatgatgttcactcaccttgcttgactgtgatcgagtctttgttatactcagcatgccttcggttgccttctcatgttgatgcagacactcaaagggcttttgttgaagaggtgatggaacttgttgagttgaatcccttaagcggtgctcttgttggtctgcctggggtaaatggtttatcgactgaacaacgtaaaaggttgacaatcgctgtggaacttgttgcaaatccttctattgtgttcatggatgaacccacgtcaggattggatgctagatctgcagccattgtaatgaggacagtgcgtaatattgttaatacaggacggaccattgtctgcacaatccatcagccaagtattgacatatttgaatcttttgatgagcttttattcatgaagcgtggaggacagcttatatacgctggtcccttaggtgccaaatcgcgtaatctggttgacttttttgaggcaattccaggagtgcctaaaatcagggacggctataatcctgctgcatggatgttggaagttacaagcacccaaatggagcagattcttggagtggattttgctgaatactatcggcaatcaaaattatttcaacagaccagagaaatcgtcgaggccctaagcagaccgagcagtgaatcaaaagaacttactttcgccacgaagtatgctcaaccattttgtgctcagtatatggcttgcctatggaagcacaacctatcgtactggaggaaccctcagtacaccgcagttagattcttctacacagttattatttccttgatgtttgggacaatttgctggaaattcggttctagaagggggacccaacatgatatattcaatgcgatgggtgccatgtatgcagcggtgctgttcataggaattaccaacgccacttctgttcagcctgtgatctccatcgaaagatttgtatcttatagagagcgagctgctgggatgtattcagcgttgccttttgcattttctctggtcactgtggagttcccttacatccttgtgcagtcactcatatacggttcaatcttctacagtttgggatcatttgagtggacagcagccaagtttctgtggtacctgttcttcatgtacttcacgttgctgtacttcactttctatggcatgatgacgacggcgatcactccaaaccataccattgcgcctattattgcggctccattctacacgctgtggaatctcttctgtggattcatgatcccaagaaagcgcatcccagtttggtggaggtggtactactgggccaacccggtgtcgtggacgctctacgggctcctgacctctcagttcggcgacctggaccagcccctgcttatggccgacggcgtcacctccaccaccgtggtggctttcctggaggagcacttcgggtttcgccacgacttcctcggcgccgttgcggccatggtggccggcttctgcgtcctcttcgccgtcgtcttcgccctggccatcaagtacctcaacttccagcggcgatgagagagcaagtggttcagctagctagctagtatagtagccaccgccgacacagacccaccaaacggatcgcagcctactgtacatgcatacaccgatcagtgcaggagggcagcagcacaatgaattatgaatgcgatgtacctaccagcgcgtcgtattggcacagttaatttgcccattacccccagaacatttcgccggggtaaataatcttccggtcggtcacgggagcgagagtgagaaaaagtaaagggtactgtatagccagctattccatgtacttgctgccttggcctcccctccatcgttatacggtggcgtcgcttcatgcagggttt

SEQ ID NO: 24534 - DNA, 1927 bp, Zea Mays
gggatttaatcctttccggattagatccatacttgaacacagatgctggtacaatgtccccctttgagcatggcgaggtgtttgttcttgatgatggtggagaggttgacttggatttggggaattatgagcgtttcatagatgttactctgacaagggataacaacattaccactggaaagatataccagtctgtcattgagaaggagagaaggggtgattatcttggaaagactgtacaggttattcctcatgtcactgatgaaataaaacagtggatacagtcagtgtcttcggttcctgtggatgggcagactcgtccagctgatgtttgtgttattgaattgggaggcactgtaggtgatattgagtcgatgccattcattgaagctttgcgccaattatccttttctcttggcaaggaaaatttctgcctcatacacgttagccttgttccagtattgggtgtagttggtgagcagaaaactaaaccaacacaacatagtgtacgagaactgagagccttgggtctgactcctgatcttctagcatgccggtcagcacagccactaataggatctgttaaagagaagctttcacaattttgccatgtcccggtcgagaacatacttaacatccatgatgttccaaatttatggcatgtcccacttattcttagaaaccaaaaggctcatgaagctataatcaaacaactaaaccttgctagatctgctggaccacctgaattacgagattggacagatatggctgagtcgtatgacaacctcaataactctgttaaagttgctttggttgggaagtatactaatctgacagattcttacctatcagtggtgaaggctctcctacatgccagtgttgcctgttcgttaaagccatctatccagtggattgcagcttcggatcttgaagatgcaactgcaatatctgcaccagatgcccatgctgaagcctgggaaactcttaaaggatgatattggctgcaaaatatgctcgtgagaatagagttccatatcttggtatttgcttgggcatgcagatatcagtgattgagatttccagacatgtcctgggcctggaagatgcagacagtgaggagtttaacaaggatacaccgaatcatgttgttatgtacatgcctgaggtttcaaaaacacatatgggaaacacgatgaggttgggctgcaggagaacattcttcagcaaacctgattgtcttacatcaaaattgtacggaagtcctccacatgtagatgagcgtcatcgtcatagatacgaggtcaatccctcttttgttcccatgcttgaaagtgctggtcttcattttgttggttgtgacgaaagtcgaaaccggatggagattgtggagctacaagatcatcccttctatgtaggtgttcagttccacccggagttcaaatcaaggcctcgaagaccttcacctccttttacaggtctaataatggcggccactaaacaactgggagcaaattcgaatagctcgaatggcttcgttggagcttctgactaatatggggatctcccgttgctgcagacacccaagttatttcttgtgcacattagatgtacaggaaaacaatctaagcctgaagcagagtgtttctctctctcgaccacctgagtggcgtaagctaacggtcttacagtgtattggggccgaaccgtcatggttttgttgactgtcatttcaattgagcttaacagcagtcagtgctcccatccttgtgattccaattgagattaacagtagtaagtgattatgatctctcttgccgtttgagtggaagtgaaagacactaccatccagtttttggttgttatttgttctgatttttttgtgtttgttttctatacaaatgtgaaaaacatagaatataaaaaacaa

SEQ ID NO: 24535 - DNA, 1635 bp, Zea Mays
actacgactatctcttcaaaactaagcatctgattgtttggtgttatggtaaagccatcttcagatgtcagcaagagcatgtgtttagacctttctgtgaaggataagtctgtcaagcctccacggaggcactcaatacaaactaagccaggagctagcccaaggccaataccttctggaactgtgactccggtgtctggggttcggtcaaagagatcggacggccaggggaggtttgatactccgacatcagaagtgtccatgtccatgtcaaggcgcaagttcagcacgctttcttcaatctcgtactggatgacacagatcaggcttgcagaggctgcttccaaacactcagtttctctgggcttctttaagcttgctcttgaatcagaatgtgagcctttggaccggatgagggaagaactcaagtcctatgtagtccgccattgcttagcgacagaattggaggacccagtcaaggacattcttcaggtttatgatattgtggacgattttgagaagctgaagatctctgcagagccctcagagcaacaaaaaaagtctgaaaaggctgctcgtaatgtctccaatgtgtcagccaattgtaatctgaagccaaggtcactaaactctggtgctactgaaagtaaggaagctgggaagaaagagggcattcagaaagcgaaacctgatgcaagggtcagaggctccaataacaggaatccagtaaaatgcaccaccgcaaaggaagtagttgctaagaacactggtaagaaaaccaagaaagaggccaagggtcaggaggaagttagcaatggagatagcgatgcatcctcagcccttccagatcaggaatctgttgatgttgtgaaggagatcacccatgaagataaagagaacatggacgagaatgaaatggctatggatgttgccatagcgcaagaattctagaacagccggaccagcttcagattcaatcgttttttattgctgaagatgaagtattagtgtgtggttgcttattttggttttcatcattgttaatatgatagtagagcttgtctgtgtgattgctgaaccatatacgctcctgaagagtgtgtcataagttgatgattgcctgtattcctttttcaagtttgcagctttgcatgtggtaatcgtgcatctgaatatagtcggatttatcttttctcgcgattcgaaccgacagaagatcctccctggtatttgtgttgtgttaatcgcgtcaagagttgttgtacgagatgttgagggatgccaggctggtgagctcaccgaggatcgagatgctgccgcagaggccattgctcgcgaggctgagtgactgcagctgcgtcagaccggacatctcgtcaggcagctcgccgacggacctgttcgagctcaggtccaggctgatgcccaggttcgacagcgcgccgatctccggcggtatggggccggagaagctgttgttgctcaggtccagcattgtcagcttcttcaggttccgaatcgacttgggttgcggctgaggatcagctagttaaggtagctgaagttatcaaagctcgccggtatctcgtccgtgagctgattccgttgggtgtgtcctacagctagagatggcaa

SEQ ID NO: 24536 - DNA, 4557 bp, Zea Mays
cgccaaaagacaagaccataaagattactcatagattaaagtagggtttggacgtctgcctgtccatttcggcgtctgttcttagcggccgacaagcggaatctggatcaagtcccctgcttcaacccatcccctctcatcgattcattgccacaaggcagctgattgctcacagcgttggatgtgagaattggattcggacccaccgatcgatatgccgttcggccacacgcggctcgatgtccggcgtccgccgcagtcgtcctacctctgctgctccacaaccaccgtcgccgtattcgtcgcgctctgcctggtggctgtgtggatggcgtcgtccatgctcgtcacccctgccgagttccctccatttcagtccaaagtgcgtccactgaggcctcatgactctcctcctgccaccggaagcttaaccagtgctgatcagggcgatggcatcaccacccatgatgatccaccacctgctacacaacaattgcctcctgtaacagacagcatggatggtgaaaatcagcaacaagaacttttcactacagagcgcggaccatggtcaaccaaggctgaacaatctaacaaggacgctaaagagcaaaccttgacgtccagtagcccactgagcttccgttgggcgttatgcaacgtcgatgctggagcagattatattccatgcctcgacaacgtagcagctatcaagaagctccgttccaccaagcactacgaacaccgagaaaggcattgccccgagaaatctcctacctgccttgttcctctaccagagggctacaggaatccaattaggtggccaaagagcagagatcagatatggtacaataacgttcctcatactaagctggttgaatacaagggacaccaaaactgggttaaggtttctggagaatacctcaccttccccggaggcgggactcagtttaaacatggtgcgttgcgctacattgattttattcaggaggcaaagaaggatgtagcatggggaaaacgaagccgtgtagtgttagatgttggttgtggagtagctagctttggaggatatctatttgacagagatgtgattactatgtcatttgcacctaaagatgagcacgaagctcaggttcagtttgctcttgaaagaggaatacctgctatatcagctgtcatgggtacaaaaaggctcccatttcccagtagggtgtttgatgttgttcattgtgcacgatgtagggtaccgtggcatattgaaggcggtaaactcttgcttgaactggacagactgttacgtcctggtggttactttgtgtggtctgctacacccgtataccagaagctgcctgaagatgttgagatatggcaagtaaaggatagggtgaatagagtgggtatagcaatttacagaaagccaacagacaacagctgctacgaagcaagatctgaaacaaaccctccactctgtggagagtacgacgatcctgatgctgcctggaacatatcgttgggggcttgtatgcataagttgcctgtagatcctaccgttcgtggttcacagtggcctgagttatggccattgagactggagaaaccaccttattggctgagaggttctgaggctggagtatatgggaaacctgccccggaggattttcaagcagactatgaacactggaagcgagtcgtgagcaattcatacatgaatggtttgggtattgactggtctactgttagaaatgttatggatatgaaagccgtatatgcagggttcgcagcagctttgcgcgatctcaaggtgtgggtcatgaatgtggttccaattgattcacctgacacgcttccaattatatatgagcgcgggctgtttggactgtaccatgactggtgtgagtcgtttagcacctatccgagaacttatgatcttgtgcacgccaaccatctgttctccaaggttaagaagaggtgcgagctattacctgttatcgtggaggtggaccgggtgttgaggccacaaggccggctaattgtcagagacaacattgaaacaacaagtgaggtggagaacattctgaaatctctccactgggaggtccgcatgtcttacttccaggagaaagaaggcttgctgttggtgcagaagacgacatggcggccaaatgaaactgaagctaagctatgatgcagagcccttgccccttggaaggaggaaaggaagatctagtgtttgcaaggtcctctacttttgtgaggcatcttttatttatgtagaatttgtagagctatatgattggtagatgtggaggaatctggtggtttccagcatatccatattcatctgtggaagtggaactggttatctgattccctttttttttttgattcatccattcggaaggggaaggtaacgataaatagaaaaggaattgagaattggcggaggtcaaaggcccaacacaacccaatccggaaccccaaccccacccccaccaccaagggtccaaagccatgcgtgccgccatggcggcggcggtcctccgacccacggccgccaccctccgcttcctctccaccccaccacaccagcgccgccgcgtcttggtcggacacctcccctttgctcgccgacgccgccactcctccaccgctacggccccagcgctggaggactccagcccccgcagtggcgaaggcaaggccgtgcgccgccgccgcgcccgtgaatctccccagggcctcctccgccaccagctcgacatgtgctcccgcaacgccgacctcaccaccgcgctccgcctctacgacgacgccctctccccggacaaccccatcccgctctccctccaccactacaactgcctgctctacctctgctccaacgccgccgctaccgactctgacagccatatctccgccaccgccgctcagcgcggcttcgacatcttcgccaggatggaggccgacggcgtccagcccaacgaggccaccctcaccagcgtcgcgcgcctcgccgccgccacccgcgaccctgccatggccttctccgtcgtccgccgcatggccgctgcgggcaccccgccgcgcctccgcacctacggccccgccctcttcgcctactgcgatgccaaagatgccgacggcgccaagcaggtcgaggctcacatggacgcatctggcgtcgtgcccgaggagcccgagctcgcagcgttgctccgcgtcaacgcggacacgggcaaggccgatgaggtttacaggctcctgcacaggacgcgcgtcctcgtcaggcaggtctgcgacaccactgcccaggtcgtcgaggcctggttccggtcggacgcagcgtcccaggcgggggtggacagctgggatcccaccaaggtaaaggagggcgtcgtcaagggcggcggcggctggcatggccagggatggcttggcaagggcgcatggagcgttggctggaccgagatgggcaaggatgggacatgccaacgctgtggggagaggcttgtctgcattgacattgatccagccgagactgacaactttgcaaattcgctcaccgaactggccattaagcttgaggccagggaagatttcctcagttttcagagctggctacgccgccatggaccattcgatgctgttatagacgctgctaatgtaggcctttacaaaagtaaagatttctgtttttcacaggttaactctgttgtaaatgctatacagagagtaactaaatcaaagaagttgccactgatcgttttgcataggagccgtgtaaatgttggtcctgcaaaagccccatacaaccagaagattctggacagttggaggaatgctggagctctgtatgcaacccctcctggctccaatgacgattggtattggctgtatgcagctgtcagttgccgatcgttgcttgttacaaatgatgagatgcgagaccacttgttccaactgcttggcactagttttttccctaggtggaaagaaaaacatcaggtcagactaactttctccgggcatggccctacccttcacttgccgcctccttattcaattgttattcaggaatctgaagatggaagctggcatgtaccaacaacaacaggcgatgatattgaaaagccacggcagtggttgtgcactactagaaaatctttgaggtagatgtgatttaattttggcccagtcaagttgacacagaatggtgccaagttgccaaccttggtgggaactgggaagggtggtggcgtgacaaaccctgaaaccagcaaagcttaaatgcagcaacttgttggcccgaacgaaagaaagctgattggagtacaagtgatgaatatgagcaggccatggatatggaaagccttttgttgtaacatcgtgagctgtttattgctagcccaggttattctagagtagtttgagaaccgtggtaaggtaatttgcttcatgtgagttttacttttattaaatgacgtgccatgccagtgatttgaaggatgtggcaggcaagtaatcaaagaaagagatgaatgttatctaatttgtcattag

SEQ ID NO: 24537 - DNA, 2588 bp, Zea Mays
gcaggctgctgatacgctccgaccacagccgtcctccgccaggcacccaggccgcctccgcctccctcgccatcgccagtcgctcgccgccttgtcctgctccctcgcctctcctgctcggtgctcgccagtcgcccccgctccctgggcacccgcgtcccttggctcacccgacgccgccggcccacggttggcctggccccctcccccctcgcctgctctgctgcggcgctgctcgcccgtcgccccgcttccctggctcactccctcttttcggtctctgtcacccttctcacggaggaacaaaggatcagaaatggctatgcaggccacaaggaggctagcgtctttgagcctccaacgacgcctactccttctctctcagaccgaggccccaagcatcccaaccgcggcggcggcggccttcctccactcccatgccaccagcttcggtacacattccctgtattttccttgttttttctgcttatatagatcctaaaatctcgtagttcaccagggtacaagcagattcgcgaagaggataagagcaaattggttggcaacgtgttcagcagtgtggcttccagctacgacctcatgaacgatctcatgagtgtcggcctgcataggctgtggaaggacaggcttatttccaagctgaacccctttccggcaatgaagcatctcgatgtggctggtggaacaggtgatgttgcttttcgtgtactggaaagaattaagagtgtgagtcacagagctatgcagggtacacttactgaaaccgaagaagacacccacatttatgtctgtgacattaatccaaatatgctaaatgttgggaaaaagcgtgctgcagaaagaggttatagcgaagagcattgtcttagctggatacaaggagacgcagaagctctgagttttgaggatggatctatggatggttacactattgcatttgggatcagaaatgtgacgcacattgagaaagctctatcagaagcttacagggttctaaagcgaggggggaggttcctatgcttggagttgagtcatgtggatgtccctgtttttaaagagatttatgatgtttactcgttttctgtgattccgactattggagagctggttgctggtgatcggcagtcgtaccaatacttggttgagagcatccgtcggtttccaaatcaggttggagatgataagatcatcataccacggaattcagtggtcgaggttaatcagtcgggtcttctaatggagacactcattgatatcacacccaaggatccactccctgcaccttcagtaggaccacttgacccagactgcaccaaagaaggtttgattctctgtgacaaagagaggatgaaaggacagcaaggtgtaagcttagatgcattggtgggaatatttacccgactaggtagagacatggaggagattggcgttagcaaaagctataagttggctgaaaaggttgcatctataatggaagaggcacaacctcttcttacacggattgaggatttagctgaagaaatgcaacctttgctctctgaagtccgtgatagtgatctgctgaaggatgtggagactatagctaaaggcctggccgacgcgtctgttgacctaagaaggctgaagtcgtccatgctcaccccagagaacacggatcttattaagcagtctattttcacccttatatttaccctgaagaacattgagagtatcagctcggacatctctgggttcacgggtgatgagacgacaaggcagaacatcaagcttctgatcaagtctctcagcaggctattatgattgtttttcaatgtgcagaacagaatgatggattgctttgctttgctttgctttgtttgagacaggaattgatgctggtagagtagggtgactgtgtgtgtcttggtggcacagaggtgtaggaagagtagcagctaattaatgttccacaaggttttggttattctggtaacaagtttttttttcttttttctttttttttaaaaaaaaaactcggatcagtattgagctgttgtaggtcatatagtaggcccatttttcatcagctgatggatcgcccttgttggctgcctgagcaaatgcgcaactgattgtttctgttgtggattggtgcaacttgcaaatgattgaagcttatgacgaggccgtggggatggtgtaggcgatcgatcttaaacgccgaagcatgcacagatgcaggagtggaagcagccgagctggaatgatgatgaagtgcaggggtagacattttaaaaccgaaacctgaattcgaatagaccgaattatcgatctattctgtttttcgggttcgattcatatatatatgctatattttaggatatgggttcagttcctaacctttaaaatccgaataacccgaaatataaaaaaagcttttaatatgtgatggtattattatgtgatttatgaacttattaactaaaaatcatgatatcatatgtatatatgtatgttatttttttagtcacttgttgtaataatagtactttcaattaattaattattgtatatattataataaaaga

SEQ ID NO: 24538 - DNA, 1508 bp, Zea Mays
cggggtggtgtgggtctagtacagccaatcttctacaggccctcgaagactacttgccggctctgctaggactggtaaaagaaggtagcgtcttgaggaacaaagtgcacttcacctggagtaaccaggaggataatgctgaggagacggccatgccagacgcctggtacgaggtgctgtccatgctgcatctgatggccatggtctgcctgctgcaggccaacgccctgcttctcccgaggtcatacggcgatggctatgccccaagggtttctgaagagagtcgacgggctactgttgatgtcttcttgaaggcagctggatacctagactgtgcagttcggcatgtactcccgaagatgccactggagctaaggagacaacttccagtagacctggctgaaggaaatctcaaagctctaagcctccaagccctgggtcagggggttgacatgcagcttggtttggctattgatagtccaaaggccactttagcagtaaaacggcgcttagcctgtgagatggtcaaatattggcaacaagttcaagagagcattccagagcttcctatctctgatggatggggtaaaaagcaccggctctttataaagtggaaatatgttgaagctaaggctgcagcatactatttccacggtttgattcttgacgagggaaataccgaaaaatcccatggaatggcaatagctgcactccaagcttcagaggaatttctaaaagaaagcaaaagggtttcagaagccttccatgcaactcctccaacatcgaggagtcccaatccattcggaacagcaaaatatctgtttgacaagatcccaagagatgcttccagcaaggttcgaatcaaccaggacctgtatactcaagaaaaggtcattggagcgccacccccattaccagattttgcattggcgctaacacctgaagaatatgatcttcctccactagatccactttggaacaaagaagacacaagccattaagtgtatatgcagcagaatggttgcttctggcaaaaatattggctctggagagaaaggaaggaccaagatctgccatgtcaagagctgatgtgtaatgaatgaagtgtacaaagtattttcaaacaaaaatacatgttcacaaatttacgcaaggcctgaagacaatctgaagagctttgtacaggcgattcttcttctgacaagggaaatgctatgtcaaagggttccttgatcattgtgcatcttgatgcttgcattttgtcaaaaacagattttcagcaatttatgtagaactgtaaactagcctctgatcgaaagtggcagccttcaaatttttttttgccataaaacatttacatcggcaccttaaaacatgccgtgggacaatcagtttcatctgagcacttaggtgaacaggattttcaaataatcagtggatactgtggcaaagtcagcttccagccattcagtgcatgcatatacagtcataaaattttagttttgaac

SEQ ID NO: 24539 - DNA, 993 bp, Zea Mays
ttaaacaggctaaactgctgttcaggcgagcagagaaaatggttatgtctttgtcatgcgataaggctgtttggaatgctgtcatgaataatgaggcagttcaagatttcaggagatctttacacgatggaaaagaaaatgatagaaacgaaaacactggtggtcctgctgaagtgcttaagtggatcctggaaagcgcccaggcaaaaatagttgaattcctagagaatgttcagaagataatcaacatgctgatccacactccagaggatgatgataatccagatggatacagcgatgcagttaaggtgtcgttcatgctcacggtattcgtcttcatcgtggtggccattgctcgtatcaagtgagcacaacaatcccccgactttacatatttctatgtttcattgtcccttggttatacacagggcaactctagttagttagtcagattgaggtcatggaaaggttgactggccaataaatttgaattgatattgtgccatcgtgtggaattatgatatgtcctagggatattaccattattatccttgcattcagcgtgcttatgcttttcatttcctggtggttttggctacagttatgaacattgggattacaaagtgtggtgaggcgagattctggcatcctacaagcccgtctatatatgttttgtagaacacaccaaagttcgataacttatcctacacacagttttactcaatgctttggctgtatcatttcatcccggcagatcatgcaagggaatgttgttctgggtcatatttgtgttgttcgactttggagccggatggacctctgtagctacacttccttactccagcagtccagcgccagcaaatttcatgtttgcagtccattttaagcatacagcattaactgttggaatagcctgtataaatgttacttgaggaaattattttacagggtgtttggatccattcatttcgagggaattaaaattatttaata

SEQ ID NO: 24540 - DNA, 1205 bp, Zea Mays
caacacatcatgtgcctctgaccagcgtcaacaaaatcttgaggagcatgagccgctgtcttcagcttttgatggatcatctccaccatcttcaattgttgcagtagacacaaatctggatacttccacacctgacacatatcgagcaccacctgcacccttgccttatgatgttgttttggcagtcccaactacccctggtttggagaagctagacaacaagagcaaaactgatgaccaacaagagtccataaatgatcaggagtctttaaaggtggatgagtcatgtaagaaaaatgtcactgaagataaggctgaggaggaggatgtttgtcctatctgccttgaagaatacgatgaagaaaatccccgctctgtaactaagtgtgagcaccatttccatctttgctgcattcttgaatggatggagcgaaaagatacttgcccagtttgtgaccagacaattttggtggatgagatgtccgaatagacttggtaatcctggtggatcatcacttgaagctgtttgttactgaggaagtgcaggcaacaactactacactcttgatattcgtccattctgggtggctctcagagtaatgaattgatggggcaaaaattgaaaggatgaacgacatgaaatgtatttacgccccctcctttaccctgcattctgtgtcatgcttttgctgttcatagcaacaggtggactaggaaactgcttggttgaattatatatagagagagatatgtcggcttgcaggttgattcagttaaaagtgcaaaactatgccatttcgcttttctgaattcagagtttcagacatctgctggttcttccaggaatccagtcagctttttacatggtatattaggtggttgcaggtaaaaatggtctagatggaggtgggggtttctttgtataatccacatgctattcaagcttcctgtatataatatttcctgttttcttcgatttgtctagtcaggcaagtttcagggatatagttttctgttatgctgaatatttgcagatcctcgctgttctgataaaaaacttactgatcatcccaaatctgggccagacaaaacgtctcagggatataatataatacatctgacagctcttgttaaaacatcttcggggcctgctaaaatgttcacattatgttccggctatgaaaacttgcagttctctgcgatgc

SEQ ID NO: 24541 - DNA, 2137 bp, Zea Mays
gtcctcctcttcgccggtttccacacgttcgccggccgccgccctccccgctccctctcccgtccgcttggttgtttacgcctgcacccaggctagggcaggacatccaacgcgccaccttgtacggctgctgcctgggcctggtttgagtctttgacgaaaccgcagaagcatccggcgcccgcgctagcctcctcctcccccaagcgttgtttcgccgccgttcgatagctgagggcagaggcgggcaagtataggagatgtcggtgctcatcgtcaccagcgtgggcgacatcgaggtggatctccacaccgaccggtgcgcgctcaccaccaagaacttcctcaagctctgcaaaatgaagtactacaatgggtgtctgttccacaaggtggagaaggatttcttggcacaaactggcgatccaactggaactggcaccggtggtgattccgtatacaaagttgaggcattctaaaactggaaccgttgctatggccagtgctggtgaaaactgcaatgcctcgcagttctacattaccttgcgggatgacgtggattaccttgatgataaacacactgtgtttgggatggttgccgaaggttttgatacgctgacaaaaataaatgaagcttatgttgatgataatggaagaccattcaaggacataagaattaagcatacatatgtcttggatgatcctttcgatgatcctcctcaacttgctgaacttattcctgagaattctcctacaggaaagccacgtgatgaggttgcagaagagcgcttagaggatacttgggttcctttggaccaaacagttgctcctgaagaacttgaggaaatgatccgctctaaagaggcacacacaaatgcagtaatacttgagagtctggcagatattccagatgctgaggttaaaccgccagataatgtcttatttgtttgtaagctcaacccagtaacacaggatgaagatttatacacaatcttttctcgttttggaactgtgacatcagctgaaataattcgtgactacaagactggagatagtttatgctatgcttttattgaattcgatacaaaggaggcttgtgagcgtgcatatttcaagatggacaattgtctgattgacgatagaaggatccatgttgattttagtcagagtgtttcgaagctgtggggtcaattcagacaaagcaaaagaaatgcaaagaaagatgggtgttttaagtgtggcgcccctgatcacctagccagagactgcgatcaagacggtgagcagaaaaacaaaggcccaagttatgttctaaaagatgaaaatacacaacgtggtggaaatcaccgtagaagctatgatctagtatttgacgaagacgaagctgattgttctgaagagagagatcatgaaaatggccacagaagaaagaatcgaagaatagatgatcgaaaatcagagctaccacctcgtggtggtcgtgatagaaatagccatgagagaacacacagtgatgagaaaggaagcaagcatgggaaagatgataggaaccgaggggatcggaaacatgatgactaccacagttacagtagatccggtgacagaagctctggtagaaacgatgatcgtgattatagcaagcgccacgacagaagcagaagtggggaggaagagaagggctacagacgaagggataagtctgatggtgagcggcaccatagagacgatggctacgatcgccgcaggagagatgaagacagccacaggaaaaggagcccagatagtaaacatagaagagaagacggagggcaccatgtgagaaaccagcagtctgatgataggtcctacaaggagagaaggcacagagatggtagataagaaagtttctgcacgactcggttttcttgcctgctttccactgatgtctctataagctggtattcttagctcaacttttttttttgtaagtcaatgtaactgcctggaatatgttgaattgttgtagtgtccagatctgaatctttttttgtgtgtttacagtttttgctggataatttattgcaatcaaaaaattgctgacttagactgtttgcgcttattctattgtaaggattggcatgggcccataaataattct

SEQ ID NO: 24542 - DNA, 1366 bp, Zea Mays
cctgcatcgtcgggtacggaccgtacctggggaggaaactggatccggagcccggccggtgccggcgaacggacggcaagaagtggcggtgctccaaggaggccgccccggactccaagtactgcgagcgccacatgcaccgcggccgcaaccgttcaagaaagcctgtggaaacgcagctcgcgccccagtcccaaccgcccgccgccgcagccgtctccgccgctccgcccctggcagccgccgccgccgccaccaccaacggcagcggcttccagaaccactctctctacccggccatcgccggcagcactggtggtggaggaggagttggcgggtccggcaatatctcctccccgttctcctcgtcgatggggggatcgtctcagctgcacatggacagtgctgccagctactcctacgcagctcttggtggtggaactgcaaaggatctcaggtacaacgcttacggaataagatctctggcggacgagcacaaccagctgatcgcagaagccatcgactcgtcgatagagagccagtggcgcctccccagctcgtcgttcccgctctcgagctacccacatctcggggcgctgggcgacctgggcggccagaacagcacggtgagctcgctgccgaagatggagaagcagcagccgccctcgtccttcctagggaacgacaccggggccggcatggccatgggctccgcctccgcgaagcaggagggccagacgctgcggcacttcttcgacgagtggcccaaggcgcgggactcctggccgggcctctccgacgagaccgccagcctcgcctcgttccccccggcgacccagctgtcgatgtccatacccatggcgtcctccgacttctccgtggccagctcccagtcgcccaacgatgactaatggtgcgtggatcgtcgcgttctggccctttgtctgtcttccctccagtcctccacccaccgcgcagtagtagctgcggaaacagcccatgctcctgtatatttgtcggtcattttccgtgtcagatctgtgtaccaaaccaagcggcggcggccgtcgtctctccccgcctccgcctcgcctcatgtgggtgggtgaacatgagaccgttttgcttaggctcaaagctttgtgtgaccccactgatcggttgtctgcgtactacctgaaagcctgctgcttttgtagcattactgtgacacatcgaccgaagaaaggcaggaacgaacagtggagcaacatgacgcgtccatgcttctcttgtgctgcctgttccccgatctgcatggatgagagctttactgttaccatcatcaccaccatcaatatgcgtgcgcctgtagctgagatgagct

SEQ ID NO: 24543 - DNA, 998 bp, Zea Mays
  misc_feature (1)..(1): n is a, c, g, or t
ngatcttgtaataattcctgctggtgtccctcggaaacctgggatgacaagggatgatttgttcaacataaatgctggaatagtccgtaccctgtgtgaaggaattgcaaaatgctgccctaatgcaattgtgaatgtgatcagtaatcctgtcaactctaccgtcccaattgctgctgaagttttcaagaaagctggaacttatgaccctaagcggcttttaggtgtgaccacacttgacgtagtgagagcaaatacgtttgtgggagaggttcttggacttgaccccagagaggtaaatgttccagtcattggtgggcatgcaggaattacgatactaccactcctttcacaggtgaatccttcctgctcattcacctcggaagaggttaaatacctcacttctcgcatacagaatggtgggacagaagtagtcgaggctaaagctggagcaggatcagcaactctttcaatggcctatgcagctgccaaatttgcagatgcttgcctgagaggattgcgtggtgatgctgggataatagagtgctcttatgtggcttctcaggtcacagagttgcctttctttgcatccaaagtgcggctagggcgatgtggcattgaggagatcctaccacttggaccattaaatgagttcgagaggcaaagaaagagctggcggagagtatccagaagggcgtctctttcatcaagtgaggccggcgacggccagcccaacatagaaatagatgtggcgtgtttctgcttcttgagaactcatcttgttatctctctgtaagactgagtgcatgacacgaataatccacgtacacggctgtactaaaaagatgatgaatctgtggtggctaaaaaaagggaaatagaaaagtctggtaataaaagttgtttctgaacaaatgggtttctgaagtcatatactggtatgcaacaactgaagaacacgatataatacggttgcatgcatgtatggtgaacgatga

SEQ ID NO: 24544 - DNA, 1307 bp, Zea Mays
cttccttccttcgcaccccgcctcggccggcgtcgccacgcgcaccccgcctcatccatccaccaatccaccgcctttcgcaggattgcgcttgctaccccgggtccccaccacacgcacgcgagcccgcggccaccacctcgatgccactgacgggctggaatccgctggcgcccgtcctccagaccgtcgccgctttctcccgccacatcctcatcgcccccgacgccgggctcgacgaccaccgcctccgcccccttctagcgctctccctctccccgccttcgccggcaccaccgcaaccggaggtccggaaggagaagaaggatgccaaggaggcgccactgacgaaggaggaggtcggccgggccacgtggatgctgcttcacaccatcgcagcgcagttccctgacgaacctacgaggcaacaaagacgggatgcaaaggagttgatgcatataatctcgagactatatccttgcaaagaatgtgctgatcacttcaaggaagttttgaaagcaaatcctgtgcaggcaggatctcaggctgatttctcccagtggttatgttatgtccataacgtggttaatcgaagaatcataggaaaagtaaggtctcagggccaaaaagaggaaaactgaggcacacccttttactcctacaataagggccttgggaagccaatatttccctgccaaagagtaactgcacgttggggtaaactggattgtcctgagcgctcgtgtgatctagaaggcagcatcgacatcatgccaaaccgatgacatggccaagaaatcgcttgaactttctacccgtagatgatttcatttcaataccactcattgatgagcacttgagcaataccagggagataagaaagagaattcaggactccgtgctgacatagcagggcgtccatatgcttctgtatctttggcgttggaccgttgtagtaaaagatatgaatgtctcgtgatatttgtacttgtctatgcctagtctgatgtctgacgactcttccataacccataccagtccgtgcagattttcatttttgtgcaaccgtcttatgtctgagcagtttttttataatatcacaggagtcagaagtgtactcccctttcgagggtaggaagatgtgtcgtcctttctaatacttaaatttctgtatcacaggagtcagaagtgtactcctttctatatagaattctggaaaacaagatgctgatgacacttctactaggatggatccatatacttattaggatgttaaatatctgatcttttttcaattgcgaataaat

SEQ ID NO: 24545 - DNA, 752 bp, Zea Mays
ctgaacacaggcgttcttcaacctcggggctgcggagccgcctcttggcctcttcttgttcctattcgttctcgcctagtaggctactaggctggagcagaacggagaaccagagacaaggaggttattcggacacagaaactcctctctcgatcaagatgacagaaccatcatcatcatattcattgccctctaaaaagcgacaacgctctcctgatgataatgaacattcactagacagaggtcgaatttgtttaagccttgatgataatcttacgttcaatgataccatgatagcacttcaattgatgcgcacacagtttccaaagctggataaggttttggcgcagccattcattttgcagtcacaattgtatagcagtgtgaaggatagaacacaagttgacagagacttggagtcatttaagaaagacaaagtgttacggatattcaaacttagttctgggcaagatgatcatgcaatcatgttcatggatgattatttgaaacaggtctcttttgctattaaacggtcagggggtaaagaccaagatggtagtgaagtatttgagtggtttgagagatatgtggtcccttcaaaactggatgttagcataactcaactagagctgtgctcactgttatcacagggtggtgatgtaacagacaaacatatcacactattgatgaatgctggtctcttagaagttgccagcgtggacatcttttaccatctgagctggctgtgttga

SEQ ID NO: 24546 - DNA, 2285 bp, Zea Mays
ggaggcggagggcgagaggcttcttctctgaccagcgaccggctcgccgtccagagaagaagaagaagaagaggaggaggaggaggaagaagaagaagaagcgctcttgggctccgtcgtcgcatgaagaaggaaaccatggaggggcatgtgccattgccattgccattgctcccggacggagaaactgcggtgggctacagcaaggacgacgcctcctcgcctctgcaagaggagatttcgagcctgcggtcaaggcagcggcgtgttgacaggagacggcgggaggcgctcgacaggctcgttgaactgaaaggaagcgttagggtcttctgccgggtccggccgctggctcacacgaacagcttgcatgcccagtcatcacctgttaccgtcgagcaggagaggatcacggtcaagcagccgggatcaagagggagttcggcgctgatagggttttcggccaggagtccacgcaagaggatgtgttcgaagaagtgaaaccgatcctcaggtctgcactcgacggccacaacgtctgcatcctcgcgtacggccagaccgggacggggaagacctacacaatggaaggaaccggcggtaataagctcggcgtcgtgcctcgggctatccaggagctgttctctcgcgcttcggaggacggctcatgcgcctactctttctccatgagcatgcttgaggtctacctggggagtctcagggacttgctggcagcaccgaggcagcctctcttcaggcgaacagagtgcaaagcagcggcgtgtagtagtagcctcagcatactggcaacgaaaggtggcgccgtggaagtggaggggctgacggacgtctcgacgccggacctcaagaacgccagccagtggtaccgcagagggcggcgagcccggtcgacggcctggacgaacgtcaacgacgcctccagccggtcgcactgcctgacgaggatcaccataaggagaaggatgaggcatggaggaggaggaggagtcagcaagctctggctcgtcgacctcggcggcagcgagcggctgctcaagaccggcgcgtccgggctcaccatggacgagggcaaggccatcaacctctccctgtcggcgctcggagacgtcattgctgcgctcaggaggaagaggccccatgttccttatagaaacagcaagcttacccagattctcagcgactcgctcggcgatggttcgaaagttgtaatggtggtgcacgtcagcctatccgaggacgacgtcggcgagacggtctgctcgctgaacctggcgaaacgagccagatcgatcgagccgaacagagaaatcccacaggatctgaaaacgctgaagcagaagagggtcgcagagctggacagggagatccgcgccgccgaggaagagctgaagcgtctcgacgagcagataaggagagcggaggagaaggagatctcactcgaggaggaggaggaggaggaggaggagaagaagctcttcgcctcgtcggtctgccaggctctcagcgacgacgagaaggggtcgccgaggagcactctggtggtggtggggcacaccgatgccgcggagagcccgcgcgcgacgacggagaaggcgaagggcaggaggccgccgccggctcgtggccatggtggctcagcagctccccacttcatgtcctccacggtgtgcagccggcagagacggtacccgccgccggctgctgagctgagtgggagccagaacgcggcggccagggctagcaggtcggcgtcagtggcactctcgtccggtgtgcacaagttgaggtgcttgcgtgtcaacaagtccgatcaggtcaacgtaataagcaacagcagcgtcgactcgaccgctgcgtcggcaccgccgccgcggcggagggaaagctgcttcggctccaggccggttctacaaagagcggcagcgcccctgcatctgcacaggaggaggatgtctagcctgacatgaacaccgattgcacagttatgatttttcttaacttaattgtttttattagtggtgaaagggttctgaaagatgtttgtgtatgtatggttgttagcttcgtagttcttgactgctgtaactattggttggaggccccttgggcttttgttttttttttgggtttggcttggaaggggcaaaatgatgcgaggaataattgttgatacatggaataatggaatttacctgtggttctggttgcgatggattttgaatggaatttgcgaggtagcaaaacaatctaacaagttacgtagg

SEQ ID NO: 24547 - DNA, 3398 bp, Zea Mays
tgcacgttctgcctccggcaacccgccccgcccgcggccgcatccctcccgcatcccgcggccgcaccatcaacggcgcaacagccgcatccagtccctcccgcatcaacagcgtcgcagccagtccctcccgattcgcgcttaatccccgcatccagtccctcccgcatccagtccctcccgcggtgcaatccagacgcaaacaactccattgaccccgattcgcgtacatgctctctcacagcaatccctgctctctcctcgccaacgcctctcgataaactccatggaaggttcacactgatgcgctctgattccttgctccacgctctctcctgctctcgcgctctacatggaaggtgaggccgacgcccaaatcgacggaatccctgctctgcgctctcccctgctcccgcgctctacatggaaggcgaggccggcgcccaaatcgacgggatcactgctcggacaggattgcggcctcgatccgcgctctccagattcgcctagattgacagcgtccgcgccgcgcttgcccagatcgatggaatctaggtctccagatgcaagtccggggctcgctacccgtggaaggcgaggagagacgacgcatcggctctcgatccgtgctctacatggaaggtgaggcagatcggggggagtgtgtagagaaatccaagcgaaaccccgcgagagcgaggcgacggcggacggaggcgagtgggtgagccgcgggcgagagacgaggtagcgggctagcgcgatgccgtcgccggttgtagtggccgcgacgctgctggtggtagcactggcggcattctgcggcacggacccgctccggacggacagcatggtggacttcccggggtttgagtcccacctcgtcgacctccccaatcccgccgagatgccgacgcacgcggatgaatgggagcggctctgtggagccgatgtgcggttctgcggcgaggtgcaggggcccgagagcatcaccttcgaccagcagggccatacacgggcgtcgccgacggccgggtcgtcttctgggacggcgagcggtgggtcccattcgcgatggccttcccgtgctggacgcaggagctccacggagggccgaaggcctcgccgctggagtatctcccagcgagcatatctgcaaccgcccgctcgggctctgtttcgataagactggggacctgtacatcgccgacgcctacttcggcttgctcaaagtccgccgcgaggccgggctggccacgctgctcgcaacggaggccgagggcgtgcgcttcaacttcaccaacgacctcgacctcgacctcgacgacgagggcaacatctacttcactgactctagcattcactaccaaagacgtctgtgatgccatgccctcgctctcttccctctgctttgcgcgcttggttggatgctcacttgattcctactgaccacggggatggtgatcgactgattgttaacatcacttgattcctctgctttatattgattcctactgaagatggacaatataaaaacctaaaatggaccaattctttctttgagggatacaaccctactctggtgtaacttatacttgttctagcacttggccctctgatctggtgaataagttatgcagaagaaaaattatgttttattttatatttaactgtactttgttgtagcttgtaggtactgatcagagggccaggtgctatccacgaatgatagtgtaatgtctaggaacgatagctgatttggaaaacctgcaaagtctattcacaacagcgaggtcatattttcatattgattttctgtacctgggactttggagaggggaacacgttccaaaaccggagcgtttcatcaccagccccagtaactatggtctgttggtatgacctcgctgaggttgttgccctcaccgagagcatcggcaagccgctcgccgaggtgctcaaggagctcgggaagagggttccagactcccttgtgaagacccgcatcgaggatgatggcttcactatcaactcgagaagagggttccagactcccttgtgaagacccacaactagagaaataggatggagagggaaatttactaagagaggacgtgtaacaaataaggccaggaattattagaatgaatggaaaatgtcctcatacacctttggagattttatttcgcttgtgggcaagtggtgatcagagtttgtctctatcggcaactgtttggatcactgtttaactaaatcctacaatacataccttgccagtaccaatcttgtgaatgacagaaacacaaagcatatttattttctgatggactgcctgtagagctgtattctcttgatgttcagaaatcatatgagagggcaataatctccgtggagcaactgaatgctattcttagacaggcttctaaaaccaaggaaaagatctcaggaagatagataactggcaatatattagttgtgtcaccctatgggttcggtttctgtgttgtcactataaggattacaatctccatcccttattttctcaagttcttcaattgctctttgactgcctagaattaagagaagtttctcagaaagaacaaacacaaagaacaaagatcaacttttcgtctttgttgaaggtgccaaagaacctgctgaaaccaagggattttcaagaggagtgtattctttcagcgattcagattctatcagcacattttgcccagtggagttaccatgtttccttcctagaagtagccaccattcctcttgtcctcttgaagaggctacatgagcagacaacagttgaatcacttcgccatcctattaagtgtttgatagaccaggtgacggagaacaaggattttatagaaaggaaaagagaggttgtatccttttcaccaaatgataaggcgtcagttgatagcttccttcagtcaattgcttcacatttactattcaacatctggcctgctgagtttgctgaaaaacatattactgttgaatgcaggaggagaagtccacacagaatgtcggacagggacgccgtggcccccgcgggcggcggtgaccggaaggcggccaagctcgggagctggagcagcatgagcagcaactacggcaacaagaagcggaagagcagcagcagcagcttcgggaggagatccacatccacctgcgaggaaaggcagggggtcttccgcatgctcatgagctggaaccaggagagccggttcagcaacaagatcaagacgacgacgagcaaagaaagatgaacgaaacgaagtgttcttagcttggtgtgattattcggggggttgcttgctggagggtttttgttcgtttagtgtctagccttagcttacttattacttttgttagtactctactagcag

SEQ ID NO: 24548 - DNA, 456 bp, Zea Mays
taacactaggttagtgtttgttagacgatgtccgcttgacgagtatcttctgtcttgacattcgctagattatccatcttcggttccgtccatcaacatcatcctgcgggttagcccgcacttggggtcgacttggctcgtcttccgcatcacgtgattatttaccgtacctcatgagatgcatgatgcatatgtatgagcacgagtataaatagtacaagatagataatctacgctagaaaggatgaaacacttaaaactaatcgttaagcaccatggatatcacagcagggcatcgactacgtccattaaccaaattaacataatacactagaaaatctatttttattcctagctttttattaactctttaaactatgtaacttaattacttgatttactgatttatctaaattgatcatcacaatataggcatgctaaattactaacatttat

SEQ ID NO: 24549 - DNA, 3335 bp, Zea Mays
cgaactgctggaccggagatggcctaaacatagggtttagaccgttgccgtccctactcccgcctagccgaccccactcgtcccagtcccagtcccagtccgccgcctggttccttcttgctcttccctccactctctacagacgcagattgacaaggaagagagagagaggccgaggggaggaggcgtcgtcgtcttcttctgaatgcctgaactatggctgccaaaatggctggagctgtccaagtgctcaaggatgacactgttaaacgcacacccatggcacgacctagtaacggccgtgaaggaaagcccattaggttgctgtcgaaccacttctcagtgaagcttagaggagttgatgctgttttctaccaatacagtgtctgcatcaaatctgaggatgataaggtggttgatagcaagggtattggccgaaaggtcatagataaactattgcaaacatactgttctgagcttgatgggaaggattttgcatatgatggagagaaatgtctatttactgtgggacctcttccacagaataactttgagttcactgttatcttggaggaaacatcttcaagggctgctggtggaagtccagtgcatgaaagccctactcaagctaacaaaaagcgagtcaagcgatcacatctggcaaaaaagttcagtgtagacataagttatgccgcaaagattcctcttcagtcggttgctttggctcttcgaggaagcgagtcagaacatggtcaagatgttctgagagtccttgacgttgttttaaggcaacagcaggctaagagaggttgtctacttgttagacagtcatttttcagtgatgatagtcgaaaccttgttgatttaactggtggagttagtggttgtcgtggactccactctagtttccgtactacaattggtggtctttcactaaatatggatgtttcaaccactatggttgtaactcctggaccagttattgattttctcgtcacaaatcaaaatgtaagagacatcagagatattgactggcccagggccaagaaaatgcttaaaaatctcagagttaaagctaagcacaacaacatggagttcaagattattggccttagtgatcaaccatgctctagacagatgttcccaatgaaagttcgaaatggaaacatcgaaattaaatctgttgatatcactgttcaggattattttaaatccaagcaagttgagctaacaatgccttatctgccatgtcttgatgtgggaaaaccaaaacgccctaattatctcccaattgagttatgccacatggtatcacttcaacgttatacaaaggcactgtcttctcaacaaagggcaatgttggttgaaaagtcacgacagaaacctcaagaaagaatgcgagttgttacagatgctgtaaaaagtaatatgtatgatgatgatccaatcttatcttcatgtggtattgaaattgagaaacaacttactcgtgttgacgctcgtgttctctctgcaccagcgctagttgtgggcaacagtgaagattgcatcccaaacaggggtaggtggaactacaataataagaggctattcgatccagtcaagattgagcgttgggccattgttaatttctctgctcgttgtgacatgagccgaatctcaagagaactgataaactgtggacgcagcaaaggcattttcattgaatgtcctcacagtttggtggatgaggacagccagtctaggagatgttcacctgtggaaagggttgaaaagatgtttgaaaaagtcaaagcaagccttcctggtcctccagagtttctcctttgtcttttaccagagaggaagaattgtgatatttacgggccatggaagaagaaaaatcttcatgaaatgggtattgtcactcaatgcattgctccaagtaataagatgaatgatcaatatttcaccaatgttcttctaaaaattaatgctaagcttggtggaatgaactccaaactggcactggaacatcgtcaaatgataccagttgtgactcaaataccaacattaattcttggcatggatgtttcacatggttctccaggtcgagcagatataccatcaattgctgcggttgttggatctagatgctggccattgatatcacggtacagagcatctgtgcgcacccagtctccaaaggtagagatgattgattctctatttaagccactggatgatgggaaggatgatggcataatgagggaacttctactagacttctaccaaaccagtcaacaaagaaagcctaagcagataatcatcttcagggatggtgttagcgagtctcagtttagccaagtactgaacgtagaacttaatcaaattataaaggcatatcagagtatgggacagggggaccttccgaagttcacagtgatcattgctcaaaagaatcaccacacaaaactcttccaagctgattcaccagagaacgttccacctgggactgttgtggactccggcatagttcatccaagacagtatgatttctacatgtgtgctcatgccggaccaattggtacttcaaggccaacccattaccatgtgttgcttgatgagattggcttctctgcagataatctccagaagctagttctttcactttcatatgtgtaccagaggagcaccactgcgatttctgtggtggcacctatctgttatgcccacctcgcagcagctcagatgggccagttcatgaaatttgaagagtttgcagatacgtcgtcagggagtgtcaattcatcatcgccaccatcaataccagaattgccacggctgcatgctgatgtctgcagttccatgttcttctgttgacgtgattttagtttgaccgttgtggggtagggccaattctttgtgaaaggaaccttaccttatatgttggcacacagcaggctaaccgtttttgtgaagaaaccatgtaggtcgttagttgtcgtatatcgcacgcgtgcatctttttggagcggttttcggctccccccacccacaggtggcggttccgttaggtacagtttccagattttaacgatgctaatacagtaaaagcagtttgtacattctacgcagattttgcagggatacgtggttagatgatctttttgttatgcccagaaatacgtgtgcattggggggttatgaaagtgagctaaatttctgtgcctcgcatggcatccaattgtactcggagattgtgtttgtgctcgatacgcttcctgccactgaaatgcgaaaatgaccacttccactcgctactcgtgacaccacaggaaaatccttgcatcgac

SEQ ID NO: 24550 - DNA, 1070 bp, Zea Mays
tttttacacttcaagttcaaaatgaacccgcgaacctgatgagcctgtactttgcaccagctttttttagccatcttctggggaagtgcctcaaacagaaatatcctattgtcgaagtaacaaaacttgctttcgtggtcttgggaacttttgctcttgtctggtggccatttttgcattcttatgaggctgtccaacaggttctctctcgattagctccatttgagagaggcatatatgaggattatgttgcaaacttctggtgtagtacttcagttattatcaagtggaagaaattgttcgcgataaagccattgaaacttatgagtctatctgctaccatactggctttcttgccttcattcgttcagcaagtcaagtctccaagtaatcttggcttcctttattctctgatgaacaactctttctctttctacctattctcataccaagttcatgagaaatcaattttgcttcctcttttacctgcaagtcttttagcactggaagaacctcggatgtacggatggttcgtgtactttgcccttttctcaatgtacccacttatctgccgtgatcagcttcttctacaatacatagctgttcttagcctattctttctgatatactactcacctggcggaagctacggaaagagatcaaacatttcatgcaaggcaaagttagttcttagcttgccatttttatgctcacttctacttcacattacctacctgcaaatagagcctcccaagaggtatcccttcctctttgatgcactgataatgttcgtctgtttttcacaatttgtcatcttagctgtgtacaccaactataagcaatggatgttggactcaaattctagatccataggtgtgaagaaggatctgtgattgaaaattttgactgctaattttacagagaaatccactgtccctttgtaaccttgtgtgtattcccttttaacattatttattgaatgaaatgcggtgcaaattcagacatttgtatacattcagaactggaaactactagaatttaggtgatgtagactcaacactgcttttgtg

SEQ ID NO: 24551 - DNA, 932 bp, Zea Mays
gcaaggcaaaggttgagttcgatgagcagccaccggataacttcgacccgaagaacccatatgcggacccggtggctatgctggagtaccgggaacacctggtgcgggagaagtggatccagatcgagaccgccaagatcatccgggagcgcctccgctggtgctaccgcatcgaggggatcaaccaccaccagaagtgccgccacctcgtggaccagtacctagaggctacacgcggcgtgggttggggcaaagatgcccgaccgcccgagttacacgggaggtatcagctaccatgtcttggacccgagaccgagactcatccagttcaaggagctcccgcgctcaccagtgtaggatcccctggcctggcagcccctggctttccctctctgaatgatgccacgtagcagatcaggaaaggagcaagaagacggaccagaggaggcggagggatggagagggatcggggccttcgacggcacatatgggaacgagtacgagatgggaacgggactgtcgagtggtggcggatcgggagcagatgttggcggcggagaagaagcctgaaatattcgtggaggttgagaagagcgcaaacggtatagggccacgcttctctgtgtctcaaatatcctacccttcaagttgggccccaaaacgtttagacaaattttattgaaatggggctcctgttggagctctccttttttgtttaggccctatattttaatttgtttctatgtttaaggctcctattggagttgctttacaaagccatttgtgatgctggtaattcattgcaatcactttggggccagtagtcacttgggaggggttaaccggaagtagagaatagaatataatagattgaatgctaaactggcaacgatttccatttaagtatttggaaggattttctcttgttgggc

SEQ ID NO: 24552 - DNA, 2532 bp, Zea Mays
gatctattttacctgaacttttgaatactggggatgctttggagagataccaacaggttgcccaaaagctggaagccttgattgctaatgatggcaaagatgtggaaattcaggtgtgttagccgtgatgaggctgcattagcagtagcacaaaaggttttcaagagtttgtacgataacacatcaaataccacttatgtctcctggcttctagcaaccttagttgcaatacgagatgtctgcaagcttgttgtcaaagagttaacaagttgggtaatatattcagatgaagagaagaagtttaacattgatatcatttttggccttattcgttcggagttgctgaatattggggagtacaatgttcatttggcaaagttaattgatgggggaagaaataaggttgcaacggagtttgcaatgtcccttgtccaagcattgtttgctcatgatcctgttggcttcacagagtttcagaatgttcttgatgcactatcgaagcatacaaagagaccaggttcacctgaatcgttgcaacaattgattgaaatcgcaaggaataatgtgagcaccactactggttttgttgctgtgaaggatgaaaaggtcaaactgccgaaggataaaaaggttttagctacccgggcaaacaaggaggaaaacactgctaatgaaattacactagttgatccaaatcaggtggcagtcctgttttctgaatggtgtcagatgtgtaatcatgtaagtgctagtgatgcggcatacactcgttttgtcacacagttgcagcaagatggtctgctgaagggggatgatatctctgaacgcttcttccgtattctcacggaacttgctgttacacactctctagtctccgagcagatcgttgctcctggtggatcatctcagcaatcaccacagcaacctcacatttcatatttctccattgattcatatgcaaagcttgtggttatggttctcaagtactcagtggagataacaccaaataaagccagtatactttccaagatcctatctgttacagtgaggtccattcagaaagatgctgaggaaaagaaagcttcatttaatcctcgaccatacttccgattgtttataaattggctctatgatcttactactaccgatggtcaccatgatagttctaattttcagctttgcttggcttgagctggtgagtcacaggagcttcatgccaaaactgctgatgtgcaattcacagaaaggttggccattttttcagcgactgcttgttgctcttctcaagttcatggaaccatatctgagaaatgctgaactcccagaggcgatggaccttttatacaagggaactatgcgagttctgcttgtactactgcatgactttcctgaatttctttgtgattatcacttcagtttctgcgatgtgattccttcaagttgcattcaaatgcgcaatgtcattcttagtgcttttccacgtaacatgagactgccagacccttctacccctaatctaaagattgatttgttggctgaaatttcaatagcaccacgaatcatgtcggatgttgatggtgcccttaaatcaaagcagttgaagactgaggttgatgaatatctcaagaggccggaaggctcttcctttttaagtgacctgaaccaaaaattgctgctgcctcagaatgaagcaagtgttgctgggacacgctacaacgtgcctctgatcaattcacttgttttttatgttggcatccaagctgtgcaacaactgcaactgaacaaggctaatccgtctgcatcagtacagcagattaaccatatatctccgatggacattttccagattggaacagctaccgatatattcaggagtcttataacaagtttggatacagagggccgctaccttctgttgaatgcaatcgctaaccaactgcgctatccaaatagccatacacactactactccttcatcactctgtatctattttccgaggctacccaggaaattacccaggagcaaatcacaagggttcttctggagcgtctcatagtgaaccgcccccatccttgggggttacttattactttcattgaattgataaagaatccgcgttacaacttttggagccggtcttttacacactgtgcacctgagatagagaaactgttcgagtcggtggcaaggtcatgtggcgcaaaagttgtggacgaaggaatcagcgtgcaggatggcagccactaaagccatctgctttgttcaagtgttgtttttgtgctatttcttctctggcactggaaattttctgtgcttgtacagatcgtctgtatagtaaagctgttagtcacacgtgtcggtgcactgccaaaccttagcaggtgcctgggagaatgcttttgtttgtatgaattttagtcagcaatatggatggtttgcaatatcgctcgctgctacttcgcgccagtacaacagatccaggtttcattgaagaaaatgcctcatccataactgtaacctaactctctctc

SEQ ID NO: 24553 - DNA, 1003 bp, Zea Mays
tttatatattgtggaatggctccaacggttttggctggaaaaatagatcctgctctttttgaagtcctttatgcttcacagcatgctatcttcttttttgctagagttccacagatatggaagaattttacgaataaagggaccggcgagctaagcttccttacctgtttcatgaactttgctggttccatcgtaagagtttttaccagcatccaggagaagactcccttaagtggtatccttgattctgattgcagttatcattttctattctcgttttagatgcacccaactgctcattagaggtagttaatagaagggaagctgatagagtaactcatgcccaacccatattaggccggtatcctcatggttaaagtttgttttggtatattcttacctaaagagtcaatatcttccaaaagaacacggtgacaatggactttgaaaaaaaaacgattcacttgtgctagtatcaaaatttcctacaagcttagtttatatgtaactttttctgtcattatatctcggtaacccttaactcctgaaaagtgatcatgggctccgcaatcggcatcgtcatgaatggtacgctcttgggtcagatagtactgtaccagaagcccgctccaaagaaacagaagaaagaagattaagcaacatggagaagctgcagaaagttcttcctggttgtttaggattctgttccaacactcgctccacatctgaacaaatggcaccagtataggaagttgttggcaacttgttacgagaaaagaacatagtcggactattgctatataacaacatttctgtgctgttgtttttagcacttagcagtgtaccatgacttgaatagttcatataactgcctttagatattgactgcaagctgctgctgatgcgttttcccttctgctgtgccgttccatattttagtttgagttaaatgcatgaggatttatactgcaccataaaataaatttagagaaccaaaagcaca

SEQ ID NO: 24554 - DNA, 2526 bp, Zea Mays
cgagaggggatggtgccctggcaccagccacacgagcgccctcacctgctcctgcgacgctcgtcggctcagcagcagtcctcccccacaaaagcagagacgcgtccgacgccgccaccaaaagcaccttccccagccacgctccgccgccatagccgcaggaaaatatcaaatcggagccgcgaagcacaacagaaatttttttccctagggcttgcacgcaaaaccctcctgaattccccaattccgtgccgtccctcgcttcttgtgggccacgaatctagggtttatgcatggcttctgaccctcccggagatggcaccagtggtgaggagacggcgccgggccctgcccccgccgtggaggcgccgcctgctcccgccgttccggccaggtcgcgctgggccgctgagatcaaggtctacacccgtaagcacccccgcaaaaaccctaaacctcctccagaatcagcggctgaccccgtttctgttccttccccggctccgaatcccctttctgaaaccttatcctcgattcgccgctccatccaccgcacggaggcggtggacgctgcggcgctgtccgatccggcagcgccggcctcggttcccacccgggcgccgtctggggaacgtggcgccgcctctggggatccctcgtctgggctgaaccgggtcggcggcggtattcctaacggccacggcgacgaccgggcggccgccgctgctgtgaaagctgagaaagcacggaaacgcaggttaaggagtgagctgcggcgctgtctggcaggagagctcgaccaggtccgcgtgctctccaggcgactgaaggaggctgccgaggccctggcgcaacaggaggcttctgagcccgtgcctttgcctttgatggtgctgccaacacagcagcaggtggtggatgctgggtatgttcagcaccagttcttggctggtgatatggcggtgcccatgcctactcagattgcagctgccgttactcctgcccgctcgctgctgcatcgcagaccactaaccgtgtcagttgttcataatgaagcctttgagaaggagaaacggacgccgaaggccaatcaattgtaccaaaattcagagttcttgcttgccaaggataggattcctccctcagattcacatgtgcgcaagaaacccaagcaccacaagaagaaacataggtccctagaatctcgtggcgcagactttgatgccgagcggcgcctgtactctcatgcgttcaagaagtcctcatcacttctgagccgcttaatgaagcacaagtttgggtgggtgttcaacaagcctgttgatccagtcacacttggtttgcatgattattttactattatcaagcacccaatggatcttggcacaataagggggcggctgagccgtgggcagtacaggaaccctaaggagtttgctgaggatgtccgtcttactttccataatgcgatgacatataatcccaagggtcaggatgtgcatttcatggcggagcagttgttaggaatctttgaggcacagtggcctgagattgaggctgaggttaactacctcgcatcatgtcctccattgccgaagaagtttcccccgccaccaattgacctgcgcttcctagagaggtcagattcaatgagacaccatgtggcattggacaccaattcaagaccgatcagtcatactcccacttatacccgaactccgtcaatgaagaaaccaagagcaaaggatccaaataagagggacatgacaatagatgagaagcgtaagcttagtgagaacctccagaatttgccgccggtgaagcttgatgctgttgtgcaagtcattaagaacaagaacttatcagttaagcaacatgatgatgagatagaggttgaaattgatagcatggatgctgagacactttgggagcttgacaggtttgtgtcgaactacaagaagaacctgagcaagcaaaagagaaaggccgagcgagcgatgcttgcccgacaagatgcagagttgcgtgcacagcaccctatacaacaaccacaaccaaccccagtcccccaagaaccttttggtgaaaaatctccaaaacaagttgtgaaagattcgctggaaggcgagcaactgccagcatctgcaccagaacaaaatggtgagaatagacagaatgcgagtagttcaagcaattcaagcagctccagcagtggctcaggatcatcttctagtggctcagacagtgatagctcctcttcagatggatctgatgctggcaattcatcttgagatatagatgcatgcctttttcttttgagaccagtgccatggggccttgggcgcctccgttctggtcagccctgatgttaacgtttctgctagataccgttcttgtttggtagacgagaaacattgtgtggctggtgttaaatgtgtactgcggacttggcttttgagctttgaattggctagagtgtctcctcatggacaactcattgacttggtgtacccccacccataacct

SEQ ID NO: 24555 - DNA, 2858 bp, Zea Mays
aagggcgagcaaaactggaagcctacgaaaatggtggagctcacctccttatccccagggccaccacgtccttctcggctgactcctcgccgccggccgccgccgccgacacctcatgttcatacctcctcgcgtcgtcgcgggaggatcctcggcgccgcgaccgccacgcctggcgccgacgactaccactccaccatccgctccctcaactcccgcggccgccacgtcccccgaaaatccctcgggcagaactacacgctcaactccaaggtgaacgaggagctggtggcggcggcgggggtggaggagggtgacgtcgtgctcgagatcggcccaggcaccggctcgctcacttccgcgctgctccaggccggcgctaccgtctttgccgtcgagaaggacaagcatatggctactctcgttaaagataggtttggatctacagaacagttgaaggtcattgaagaagacatcacaaaatttcacatccgttcccattttcttcctttcatgaaggagaaatacggtgccaccaaaaaacttgcaaaggttgcatcaaacttaccattcaatgtcagcaccgaagttgtcaaactactactcccaatgggggatgttttctctgtcgtggtgcttatgcttcaggatgaaacagcagtacgccttgcagatgcttcaatacaaagtccagagtaccgatctatcaatgtgtttgtggatttttactcggaacctgaatacaagttcagagtagacagagagaattttttccctcggcctaaggttgatggtgctgttatcagcttcaaactaaagaatgcggaggagtatccgccagttagttccccaaaaagcttcttttcaatggtgagtagtgggtcatggggtcatggtgtgcagaaacttgtcccaaatctgaattgctttctgtggttgagggagaaaggacgtgaatggaagcaattgtttatctttggatatcgttacaaggccgctcattcttggtggtcttggagtccctaatctgtatttccaaagctgggcactgtaagctaaatggttgtggctggagaaaacagacactaacagaccttggcatgggttaaaactgcatgtactaaagcaagtaaggaagttctttcaatcttcggttgttactgtggttggaaatgagaacaagactttattctagtcggacagatggttagacggcggctgcatcaaggaatttgctcctgctgttgttgctaaagtcggtaaaagtgttgtttccactagaactgcggcccaagctattggaaactggcaatggatcagtgaaatcatgacacccctttcctgggttgggttacaacagttcttgcttttatgggatgctgtaagaagagtggtgttaacacatgaagctgataaacatatatggctgcatacttcctctggccagttctcctcctaagtcatgttacaaggcatttttcatgggatccattacttttgagccttggaggaggctgtggaagtcttggactcctccaaaatgcaaatttttccagtggctggctatacggaataaatgttggacatcagatagattggaaattggaaaggagaggtttggatcacccaaaatcttgtttattatgtgatcaaacacaagaaaccatccaatatctattgtgtacgtgcgtctttgcaagacagttttggcataccatcttttcgcccttggggtttgttaatctctctccgtctggagatgagatcttctttgccgattggtggcgaaaggtatgtaagaagatacatagaagcaagagaaagggtatgaacatcaccattattttgggggcctggtatttatggattcaccgcaacaaggcagtcttcaatggagagaacccttctctgggcacaatctgatgtgtttttgtagatgagttggtgtgttggattaaggctggagctaaacatcttgagaacttaggcctagaggtgaattccgctttcatggggaagcgcaagatgcttaggaaatctcttcagcacatatgctcttcttctgagattgaggctgctcttgacaacattggccttccagttacagctagaccttctgatttgattttggatgatttcgtgagattgcacaatcatttagcgaaagtatgactaagaagtgcctttcaaaatgcctaaggaattgcttgttggcatggtgttcaacagttggagtaacttacgcctgaccgctgagagttgctatgcagctacaggtgcattcagctcagctccggggcgaagccaggaattacatgtagggaggccggccgaaagagccatcttgtaaaaaaatgatcgcgggttcaactggtttggttactcgcacttagcgtctgtctgagttaatacttgacaaaaaaaaaaaaacaagcacagctcaactggttaggtttctcgtagtggtggtggtcgtttgggttaattcatcgacttgacacggttgctcctatttttttttctatatgtattctagatagtgagggtttattgtattttgatcgtagacgctaatcagaaactctactgaatggatgccttcgttctctctgagtacaaaggccccattgaaatatgtatgagaaataaagcaaatttagaggaccggtagcatttccttctgcttatttgcctcctttttcaccacgtgagcatctaaccaatacaagactgtttagcagatctgtaaggccttgttcgtttacgtcggattgcatccgaaatcgttccagttaatcaaagtttatataaattagagaagcaatccggttatgaatcgttccgatccaccaatccgg

SEQ ID NO: 24556 - DNA, 3319 bp, Zea Mays
ccgccgtcccgtgcgccattgccaagtcgaggcacgcggccagtggtgccctcgtcatcgtcaatgagcaccgacgccgcgcccctcctccactccacctgcacagcgccgctcgcccccacaccccaacccaaccatccgctccttgtcgccttccgacgctgagtttgctggtgtcgatttgcgccgtcggatgctcgatctggcagccgcctgtgccgacctactcgtcgaatccgttatctaacgtaatggatgggcaaggcacaaagcacaggattttgatggtgtctgactttttctttccaaactttggtggggtggaaagccatatctactacctgtcacaatgtctacttaagcttggccataaggttgttgtcatgacacatgcatatggaaacagatctggagtacgatatgtcacaaatggtttaaaggtctattatgtaccatggaggccattcctgatgcagaatacacttcctacactattcttgacgtttccaattgtaaggacaattattattcgagagaagatttctgtcgtgcatggacatcaagctttttcaacactgtgtcatgaagcattaatgcatgctaggacaatgggatattgatcaggcaatatgtgtctcacatacaagcaaagagaacactgtcttgaggtctgggatatctccagagaaggttttcatggttcctaatgcagttgacactgcaatgtttactccctctcccaagcgcttaaactgtgatgaaatagttattgttgtggtcagtagattagtataccgaaaaggcgccgaccttcttgttgaagtcattccagaagtgtgtcggctatttccaaaggttcgctttattgttggtggtgatggtccaaaacgtgtgcgccttgaagaaatgagggagaagttctcccttcaggatagagttgagatgttaggagctgtacctcatgctcaggtgcgatcggttctgatatctggacatatatttttgaacagttcactcacagaggcattttgcatagccattctagaagcagctagctgtggactgttgacagtgagcactagagtcggtggtgtccctgaggttcttccagatgacatgatagtacttgcagaaccagctcctggagatatggtaagagctgtcaagaaagccatcgacatgctacctggaatagacccccagattatgcatcttcggatgaaagaactttatagttgggacgatgttgccaaaagaactgagattgtttatgatcgtgcaatggaatctccaacaacaaatttactagatcgccttcctcggtatcttacttgtggatcttgggctggaaaactgttttgcctagttatgatcatcaattacctactatggcgccttttagaatttctacagcctgctgtaggtattgaagaagtcccagatatagggccactacatgctcatttaggttcaaggaatgatgaggctcaagagaagtgaaacttaaatctttgacagttttgaaatggttggggacttgaggtggcagtcatggtatcttctgcttgtcagcattcgttctgatccacatgcagtatatgcctttatgatatggcccccgcacagcattttctcttgaagcttcccgtctccgtagtcgcagctgaaagagagtggaacgccttgatttgtaggatttcttgtcatgctggttaaagctatggtccgagtctctgtcattgccagcttcttttttttttcttcctctgcgtaatgcgtagtgagtggatggcctgcgttttaggcacgtcatcaaaccaattatctgctggaacgttggtactctcttgccaccatattgcaactagaagtcttgattggcatgttgccacacaaattcctactatgtttgatgtcttgtatcatgtcggagcaccaattcctgctgtgtttgtgatgtaataatgccaattccaaccagcgacgtgagaccaatctgcatggatccagtcgataatactttttgaatataaaataagtgcaatctcttttcggcactgtttggaattcaagactggccattcgctttgtaagaaactgcgggtttgctgaaattctcctccactttcccaagcaaagaacaaagaaccgcccttgttctctgcgactctgcccggccggtctccgaggcgggcggagggaaccagagagcaaggcgaggagcgcggaagggctgagggaaggggcggcggggcatggctcgccggccggcgtcgtgggagcagggcggcgacgagtacgactatctcttcaaggtcgtgctcatcggcgactctggcgtggggaagtccaacctgctctcccgcttcaccaagaacaccttcgccctcgactccaagtccaccatcggcgttgagttcgccacgcgcacactccaggtggagaacaagattataaaagctcaaatctgggacactgctgggcaggagaggtaccgagcaattacaagtgcttactatcgaggagctgtcggggcgttgctagtctacgatgtcactaaagtaatgacatttgagaatgtgaagaggtggttgaaggagctccgggaccatgctgactcgaacatagtcgtaatgctcattggcaacaagactgaccttaggcacctgcgctctgtcgccgttgaggatgctgcaagctttgcagagagcgaaggtttgttcttcatcgagacctctgcgctcgatgcgacaaacgtcgagaaggccttccacaccgttctagccgagatctaccggataatcagcaagaagcccctgtcttcggaggagtctggtttggggtccggtaacctcagagagggacagtccatccaagtgtcagccacaaattctggcgcccttacgtcgcggtgctgctcttcttagagccacgcccaccaggatcatctgaagaacaacagttcgtcaagaaggtcctctcttccgagtcgaaatatttactcccctttgtgtgaacaataagcgtagatttaaagaatgtcagactcagacgctgactatatatacttgacctgcatagtcatgttccgtcgagaggtgctgtgggagaaaagttgtattgctctcgagcatagaagaaggctgtgtgtatcagaccccagcaaagctgcttgctattaaccgtggcagggtagtctctgtgattttgcagctataattttgttgggggttagttactatgactgcggagggtgtcgtggcttgtggcaacttgattcccgacgtattatagaatcctctttgctatccgtttggca

SEQ ID NO: 24557 - DNA, 193 bp, Zea Mays
aaaggttcacaataaaccaataaaaagaccaagaaagggttcaaacaaagagagcaaaagacaacccaaaggcaccctggtctggtgcaccggactatccggtgtgccaccggacagtgtccggtgcaccagggcactcgacgatgaacttgccacctttgggaaaatgggaggccgctccgctataattcac

SEQ ID NO: 24558 - DNA, 3015 bp, Zea Mays
ctgcggccactaaatgtcctcgaaactgaaccaccacgaactgtctatctgcatccatctcttggccacacccactgaccgcgccacaccacacctgtggctctccgcctcgagatgctttacacggtgtagctggcaagaagccaggaaccttccctgttccctcccgggcgcaaaggggctcacttttaatttcctcgagaggggactgcctcctttctccggcggcaagccttctcctgccttgttgcctgccactcgggctgtcctccttcttgattcttggcaccgtcggtttaatttcgcgaaatggcggcaggggtgtcgctcaagatggccggcttctgcgtcgtctgggcgctattctggctcgccggctccgccaccgtgagcacgagcaccaccgccttcgccggcggcgaggcggtggtcatggacgcgcggtccgtcgtcgccgtcaccgacaacgacttcgtttgcgccacattggactggtggctgccggagaagtaggactacgacacctgcagctgggggctggcctccctgctcaacctgcgttctcccccttgaagctccgcctgggcggctctctgcaagacatgtacgacaccggcgacgctcgccagccctcctgcgccccgttcgcgaagaacgcgtcggccatgttcggtttctcgcaaggctgcctgccgctgcgtagatgggacgagctcaacgccttcttccagagaaccgggtattctgctctactgccttcggccagttccaggaaccgcattctatctatctggacacggttgcctagctctctgcttgcctttgcattgcagggcaaagattgttttcgggctgaatgctctgaatggccgggtccccatgcctgatggctctctaggggggccatggaactgaactaccacgaacgcggcttctttcattggctacaccgtgagcagaggatacgatgtacatggatgggagctcggaaacgaactgagcggcagcggagtcggagctcgggtcgacgcagaccagtacgcagcagacgtgatcgcgctgaaacgcatcatcgacagcacctaccaccagagcagcagcccggcaaagcctctggtgctcgcgccaggaggcttcttcgacgcggcctggttcacggagctcgtcggcaagacgaagccggagcagatggacgtgatcactcaccacatctacaatctaggccccggggtcgacgatcatctggtccagaagatccttgacccttcttacctcgacggcgaggccagcacgttcagcgatcttgaggggatactgaggtctgcaggtacgtccaccgtcgcctgggttggcgaggccggaggggcttacaacagcggtcgccaccttccacatgattggttggtgtactaagaagcgtatggcgcgagccagcctcgtcgagcagagaagctcgctctctggatctccacgtatgcaggctgaagggtcaacgcatctggtgagtctggacgcgcagcaaccaaacacgcggcttgtgactgatgcgtttgtgttcagcttctggtaagccacagccacccaagagtttatcatccgaggaagaagaagaagcgtgtaactatcgactggtgtctggtggtgctgcaggtacctggatcagcttgggatgtcgtccaagtacggtacgaagagttactgcagacagaccttggttggagggaactatggcctgctcaacacgactacgtttgaaccgaaccctgactactacaagtggactagccatgcataagtttctctctctcttctctcacaaagctgggatactgagtgataagagagggagaaattgtgtgctcaatcccgccatgaaaacctagcatctttctgctttagggggtttttggttagggggactaaagattagtctctagtttttagtctcatttagtccattttttgccaaacactatgactaaaatatagactaaaatgatttagtctttagtccttcacatatgtgctaaaagagattaaatcatattaatttcacttttacccctcatttagttcaattgtactaatagtaggagaatgttaaaggtcattttagtcttcttacgagtcatttagtatattcttactatttttatcccatagaatcaaaaatgttagggactaaactttagtcccctaactaaactttagtccctagactaaagaaaccaaacatgaccttaattttctctgtagcgctctactgtggcaccgcctcatgggcaccaaggtcctctctgcgacgttcaacggcacgaacaagatccgcgcctacgcacactgcgcgaagagatcgggaagggtcctctgctcctgatcaaccttgacggcaacagcacgaaccgcatccacgtcacgagccaaggcgcacaggcacagagtgcgcggagggagagagcggggggacgcctggtcgcttccctttccctgcgcttggcggagcagccgagctgctcgcaacaagagaggagtaccacctcgctcccaaggacggcgatctgcagagccagcaggtgctgctgaacggccatgttctggcaactgacgccgacggggacatcccagagctggagcccgtgcgggtggatggaacgcagccggtaaccgtggtccgtgggcccttactcgatcgtgttcgctcacatccccggcttctacgctcctgcctgtagctagaatttttacaccccagccttttccttcctggtgtgtatcataggttcggataaatccgggcgaacggcgaagcttgttcgcctgtccgtgcgtgaagtaaagctgcgaggctgaaaggtgtgcgatttgtcattgtttgggaaacaagtgttcggataatgtgtgagcaaaggggaggaaagtggagatgaaaataataaaaggaaaaaaaaggtttcgaatttttctctatgtctctgtcgttttggttgagaaagcagaaaaggcgacagttgcctc

SEQ ID NO: 24559 - DNA, 1576 bp, Zea Mays
tttttaaccagaactagaagttatggttgtggcaaataattttgtcggttgtaatgagaagctggacctgttaggccgaagagttctcgttgcaagtctgtgcctcagcgatgggttcaggcaacttgatcgtgaagaaggtggtaaagcacagctcctttgatctggacatacagcttgataagagttggatggaggatgttacctgcccgatctgccttgattaccctcacaatgcagtgctactgaggtgcacgtcttatgagaagggatgcaggccgtttgtttgcgatacagaccagacccgctcaaactgtcttgagaggtttaaatctgcatatgaactgccttccaatgtgaaagtttcatctttagccgtgcctcctcttgatagcattattcatattgtgccgtctaacgcaaacaaccgccccagctgccctttgtgtagaggtgatgttattgggtgggttgttattggtgaggctcggctgcatcttaatcagaagaaaaggtgctgtgaagaggattgctgctcgtttgttggcaacttcaatgagcttcagaagcacacgcaacaaaagcatcctgattcacgcccttcagagatcgatcctgctaggcaagttgattgggagaatttccagcaatcttctgatatcgtagatgtcttgagcacaatacatgcacaagttccaaacgggattgttctgggagactatgtgattgagtatggggatgatgacactggtgaggactatgaagttttccgcagggtcaggacgaactggtggtcatgtattttctgcagggcgttttcaagatcttcaagaagtcgtagaagatccagagcaagggaaagaataggcagtggaaggaggaatggcaaccaggttaatctagaaaattttaacctcgtggttccgacacaacctgttgaattaagggaaattaggtttgatgaaattgatgatgaatacatagtcacaggggccattcctagtatcgcagcaccgggaagaatggctagtttccattacagggatacaagatatggacgttgatgcatagggtctgcagtaaaaaaaggaatagatgttatgcaatttaccgatcaacgtaacgttgtaactccgctcatttggattccttttccacctgccctcggtaggtgctgccgcagttcaaacttatctgtgcataaaaagtagcaacagaacctcgctgttcgtttgaatcaggcctcgtcattctagtttcgatcttgtatatatttagcacccgtctctataggatgttggtgacagttcttttcggaatgcttctgcgatgtagcgcggttttacatagtaaccctgaaacaaacttcagcccgctctaatggggatttgtttggagactcgtgtctcgctgggtagcccttcagataagagcttctgagccgtccatggtgatgctgttcagttagtttaagatgctataatattgagacaagcagggaaggcacgtactgttgacgtttccttttgaccctaccgcctgtgttattctaataaacgcatgtcttgtacattct

SEQ ID NO: 24560 - DNA, 653 bp, Zea Mays
gaatcattgatggatgagtcgtgcattagccaagttagcaggaatccaataatttgcgaatcgaggtgggtggcggaggaggaccacatcgtcaacttcccaaccgtgcggctcaagcgaggcatgcccgtcaggctcaccagcaaagactagctagctagtcactacgacctgcttgtgcatgccatgcatgcagatttcagtcacgtcatatgcaatatatattggaccctggaggttgcacgtgtacagaagagaggatgcaggagctagcagatgatcggaggtatttaggcagactgaaattgaatcgaccgcgaagagtagcacactactataccacgagtatgatctgtagtagtagtaataagaggaatataatatcattagtgtggtagtatttacttattatactactctctcttttcgtttttatttatcgtgttttagtttaaaaatgaactagcgaggttagtcaataggcgtgcatgcatggcccatcatggtcatggatatataggccttgatggttatactagtataagcagtagtgttatgtcacaagggattactgggatctgggatgatgatccacaatcccatctaaaacgaaaagagttaataaagattgttaagtttactgctgggagcct

SEQ ID NO: 24561 - DNA, 1906 bp, Zea Mays
cactggtgtgcattgttggttcaagggtcatgcacgtttatctcttcagggaattggcatgagtagggtaacttgaatttgatcacacaagcattggaagcagttgggcgtaagatggaagttctacctgacccttctacagttcatttccatctacctggtgatctctctgtccttgtgcatcgaaagtatgaagacttcatcaatgaactgatcagcaaattccctcacgagaaagaagggataattaagttctatggcacatgctggaagatcttcaattcactaaattcgttggagctgaagtctctagaggagcccctttatctttttggtcaatttttccagaagcctttggaatgcttaactctagcttattatttgccacagaatgctggggatattgctcgcaagttcataaaagatcaggagctactctccttcatagatgctgagtgttttattgtgagcacagtcaatgccttgcaaacacccatgataaatgcaagcatggcactttgggggaattaattatccagttggtggcgttggtggtatcgcattatccctggcagatggccttgttgaaaagggcagcgaaatccgttacaaggcgaatgtaaccaatgttgttcttgaaaatggaaaggctgttggggtgaggttgtcaaatgggaaggagttctttgctaaaacggtgatatcaaatgccactagatgggacacatttggaaaactcttgaaagaaaaagaacttccagaagaggagaaaaactttcaaaagaattatgtcaaggcaccatcattcctttcaattcatatgggtgtcaaagcatcagttcttcctgctggtactgactgccaccattttgtacttgaggataattggaataatttggaaaaaccctatggaagcatatttttaagtattcctacagttcttgatccatcattagctcccgaaggacaccatatacttcatatatttactactgcaggcatagaagcctgggagggtatttctaggaaggaatatgaagagaaaaaagagatggtggccaacgagattataagaaggcttgaaaagaagttgtttcctggtcttcaagattcaatagtcctcaaagaggtaggctcaccaaagactcaccggagatttcttgctcgaaatgatggtacatatggaccaatgccgcggggtaaacccaagggcttacttgctatgcctttcaatactacttcaatagatggcctttactgtgttggtgacagctgttttcccggacaaggtgtaatagctgtagcattctcagggatcatgtgcgctcaccgagtcgctgcagatattggactagagcaaaaatctccggctctagatgctggtcttcttgggctactcagatggttgagaacacttgcatagaacgatatcagacagttgaaaatggacttcatttttccccccggaaggctgatgtttcaccagagttaggattctgcacgatctgttatgatgatcttgttatctgtaccatctcagcatcgatttcttgaaactcctaacggaaaaaaaaaggaatacgaatgggtgtacaggtttcagattttgaattatatgattacggtgtcagggccatggcatattggtatgcatataaagactacatcatagagtaaccagatggtgtacatcatctgattaccgcaataagcagagcactacatttgggagcaatgtaaatcatgttacctaggattttgaaagttctgttttgagatacccttcaactttctgaatatgcataagcttcattgttcgtaaggcatgatgaaacctagaatgacacatcgtctaagaaaatttaaaactatgatgaaatagtttcacatattgcctagttttatc

SEQ ID NO: 24562 - DNA, 1887 bp, Zea Mays
agaaaatcggatctccttttttcacgttgtttattacctaaagaaatggaccagtttgctgtcttttcggcccagtttgacgtgcgtctgatctggctctacgctgtcatggcttttggcttaaagtttttgtctggaaggatggtttgcttcgtacgtgttcgtccgtcccctagtggccagcgaaatgtgacgggcttttcgatcacctgtggccattcgagacgagtacggatattaaaaataattaaggaggtgtttgacgagacgttgatggtattttatcgcgctgattctcgatggcggagcggcgtggaagagagcagaaggcctgtcgatgggcatcaactacgggcagatcgcggacaacctgccgtcgccggcgagggtgtcgtacctggtccggtcgatgcaggtgagcaaggtgaagctgtacgacgcggacccgtacgtgctgagcgcgttcgtcgacacggatgtggagttcgtggtgggcatcggcaacgagaacgtgtcggcgatggtggagccggcggcggcgcgggcgtgggtggagcggcacgtgcagccgtacctcccgggcacgcgcatcacctgcatcaccgtcggcaacgaggtgctcaagggcaacgacagcgcgctcaaggcgagcctcctgccggccatgcagtccgtgtaccaggcgctgaccgcggtgggcctgcagggccgggtgaacgtcaccacggcgcactcgctggacatcatgggcagcacctacccgccctccgccggcgcgttcggccccgacgccgtgccctacctccagccgctcctggccttcctgtccgcggcgcggtccccgttcctcatcaactgctacccctacttcgcgtacaaggccgacccgggcaacgtgccgctggagtacgtcctgttccagcccgacgccgccggggtcaccgacgccagcacggggctcaggtacgacaacatgctgtacgcccaggtcgactcggtgtacgccgccatccagaagctgggccacaccgacgtcgacgtcaaggtctccgagaccgggtggccgtccaggggggaccccgacgaggccggcgccacgccggagtacgccaggacgtacatcggcaacctgctgcagaggatcgagatggggcagggcacgccgatgaggccgtcggcgcccgtcgacgtctacgtgttcgcgctcttcaacgagaacctcaagcccggcccggcctccgaacggaactacggcttgctctaccccgacggcacgcccgtgtacgatgtcggcctgcggggataccttccacccatggactattcacaaggcaccagagagggggtccgtttcttcgtcttcatcagcctcgttgccattgtatcgatcactctcagcttatcctgagagcatgagcattgccgtaaagttgatgaagaaagcgcggagactgaggacttcttgctgctaggatagcagatcgattacaagccctcggagaagcaactaaagtcggcatgttccatcaggcaagctttagaagcagaaatttgtctctgacttactacacggccagccaaaacggtcgaagtggtttttgatgacatccagcagccaaaactggctccgcgctgacagtaaagtagaactgactgaagattgcgggcgacacgcgcccaatgcacgcatagtccatttaatttgttctggagatgtcttctttatccaactcagcaactgtatatttgtatatcggccaaaaagaaaggaaataaattcaggtcaaggctggccatttatactagttttttttttaaatctgtgagctctgattgttttgtgtttctttttttaaagtaaagtgcatttccggtccttaatttatg

SEQ ID NO: 24563 - DNA, 454 bp, Zea Mays
gttactgcctactcctaaggcaaaaggaaaaccgaagacgtcctattgctgggggccgttccggcaagaattctcttgtggagctgctaccattttgttgcggtgacgacttgtcagatcgccgcacgcaaggctgctatggtcaccatatcaaccatccatcagcgatagctggtgccgttgatcaaacaatcctgtgccttcttttttctttcatttccgtcgttgatgctgttgtacagattttgtgggagatgagagtttaaacaagtcgtcgtaggagtgctcggtaatcgcgagagttctagtggctccccgcgtctgactgctggtctacattattttgaggttttggatgaacaggtccactggacaagcgttgtggtccctgatggctcgttctaggtgctgagggttgaatatttcgatatggaaagatgatccactcggtgaa

SEQ ID NO: 24564 - DNA, 585 bp, Zea Mays
gacattgttggactgggagtcatccttgagtggtcaggccattttatgatgcttggttactacacattcctttctacctatattgatccgatcctgaggtcttgggtggaatccttgcccccacgggacaaatatcagtggaaacggtacctggaagcttggagatatggagccggtttagattaccgccaaggggaataaactgtttcactaaaaacacatgaaagtttcctcagaaacaaaattatgtatagatacatgaatatagcactgtcaggggaaagatgaatagagtacatatatgatctctgattgatttagttttccttttccagagcacaagattgaacatcaagtttagaatgtgtattatctagtttcacttgtaatttgcccactttactgaactgatggagtgaatatgtatagtactctagaatttcaaataatgctgaatggagctgagatgctcaatatttgttgatcaatgtatcaattatgtgaaataaaagtaaatgtccggtttcattcagattgcaagtgtaacaacaaaataaacagccatttacacatgttggtaaagag

SEQ ID NO: 24565 - DNA, 3258 bp, Zea Mays
gagaaaatagaacggggagaccggagcggcggcgggggaggaggagacggaaggaggggatcgagaggggcgcgcgcgaacagaagagagaaagaggaggtggcaggtttggttccgcgcgcgccgacgtgagattccgggcccccgtgccagcaggttcaaataatggattaaaaacttaagctgacacttatggcggatgctcaattcaacccagtgaatccgaagctgacccatgaagaactaaaataagctttatgcttcagtgtcttctgaaatcatcctgaggtattgataagtcagcaacctagagcagaaaatgtcagctccggaattcaggacttcttaccagcaagtatcatcatcacagccccctgagaatgtcggtcaactcaaggtctgccgatgtgggtcgggagactctaactttcagatcactaataaatctgatgctggtgaaaattcaccgacaacttgtccaagctgtcaggttcttaagagtggaaatttattgctctcatctaaagggattggatggacagtatggaaaaaacggtggtttattcttacaaggacatcattagtgttcttcaggagcgatcctagtgtcccccctcccagaggaagtgaaccaattgttacacttggtggaattgacttgaataacagtgcaagtatgatagtcaaagaagaaaggaaagttataacagtcatctttcctgatggccgtgatggacgcacttttacccttaaggcagaaactatagaggacctaaatgaatggagaagtgcattggagaatgctctggctcaggcacccagtgttgcgaatacagcggggcaacatctggcagtcagcactgatataacagaacctgttgaagctgctgttgaacaattggaggataagtctgtaattggcagaccagcagaatttgcacttgtcgatgctgatggcactacagcattcctggagaaggccttaaagttcatcgaagactatggtgtcaaggttgaaggaattctccgtcagtctgctgatgttgaagaagtcaaacgcagggttcaggattacgaaaaggggaagaatgagttctccccagaagaggatgcacatgttatcggtgactgtattaagtgcattcttcgagagatgccatcttccccaattccggcaccatgttgcactgccctggttagagcttaccgaactgacaagacaagaagacttgatgctatgaatagagtgatatatgaagtattcccagaaccaaatcgtcaattgttacagaggattctcaaaatgatgcagattgttggatcacacaaagctgaaaataggatgtctccgtctgctttggcagcttgcatggcaccgcttcttcttcgtcctcttcttcttggtgaatgtgaaattgatagtgaattcaatatggctggggatggttcattccagttgcttcaagctgctgctgctgccaaccatgctcaagctattgttattattatgcttgaggaatatgatcagatatttgatgatattgaagacggttcgtactcttcagatgcttatactgagtctgacattgacaaggaatattcgacagacaatgacatccctgaagacgatggttcctatggttgtggtgaagatgttgaagaagatttaaatgatgatactgaacactcttctggcattaggattgataatgcagatgataaggttaataacaataaatcaagcactacatgtgatgacaatgataaagttgttcagcctcctgctgcaagggccatgagaatagaacatggtgtgcccatggatgacagtaatcaaatttcttctctttcaaaagtggatgatacctctaaaatgcagagcaacagttcattcacagatcatatacaaaaaccaaatgctgattcatcatatttgagtgcaaagtttacagagaaaactggcggctcaacttatgaaagcaaaaggaactcatgggggcgtacttcagcaagaaaaggcttgtcaacagaggaggctggctgttgcagtgataatgacgaggctcatattgcgaagcttgaaaacaagaagacccatctccaatctaaacttacggaggagaaaacacagtcctccaggcaaatttagaaaggcgaaaagcagcactacatgagcgtcgtgtagcacttgaaaaagaagtggaaaatttacgagaccagctgcagaaggagagaaatttgagggcttcattggagtctgggttaatgaatatgcgaagaggacaagtgtccttcccatcaacgatagacaccaagactaaagctgatcttgaggaagttgctgctgctgaagctgatattatgaacttgaagcaaaaggtttctgatcttcgggggcaactcaactaccaagtccagttgagttccacctcgttatgtgaatcatgcaacaagcgggcaataaatgcagacaagcttgtcgaaggtgaacaaaatgctggcctttctccacagattggctcctcagtcgaagcaccaccaattcaagggtctaattctgtagttcctgacatgttatgggctacaaaccaaatggttcagaagatgttgtattcaaagggtgagattgcaaaggacggccaagatggatcacttacatcaaaatggaactttgcacagagaccacactcaaatagtccagttatgagcagggttcaaggttccaatgcctattcaagtactaaaaacgaggaatctggagccgcaccgtcctctgcattagccaagctgactactcgactcaactttttgaaagaaagaagggccttgctcgccagtgagatgcaaaacttagatctgggtcgctcccaggcccagaggcacacggctcctccgaaaactgagactccgaccgacaagtagaatcgttttattgttaggctacacaagcccacaaaagcattctgccatcggggtgtgacaagtccagctgccacgatcgatgctcatgtaggatcgcaggcagtgaagaaaagttcgattggacaatggataggctacctacctatagagtaacttgatttgtaaattgcagaggtaatcgtgtcttcgccatgatgattcatatgtcaagttttgtagcgacaccgacgaccaacctggtttgtactattatctccaattacacaataccctgaatactctggaacaaaaagccaaatggcgcttgcaaataatctgtcggtctgtgtggtactc

SEQ ID NO: 24566 - DNA, 2724 bp, Zea Mays
  misc_feature (2723)..(2724): n is a, c, g, or t
cacaaccgctctctctccctctcgaagcgacgcagaaccgctcgccagtgtcgcagtcgcctcctgtccctctcctctctctttgccgctgccctcctctaagcatctccctctcctactccctcctctcaaagcacttgttggccccccaccgccgcatctgcatcccataatcgcctacgccatcgccgccgccttcgggtccttctcgctcagcctcgactgctcgctcatcttcaccgaggcgctcctcacccccgccatcccctccgtgtcggcgtgcgccggcggcatcttgcccagtctcagccgatttatccttcggtctgttagggccttatcaaaccgccgccacggcgaactcgcgccgctgccatgttcgcctcgcgcacccaccatctcctcaacaacgttcaaaccgccaaccacgacatcctcctccacaacccgacctctcacgcatcccaacttggtgcggcgtaaacgcgcagcagcacttcgcctcggtcgaccacggcctgcccccaggcgttgacatccagatccatctcgctccgatctacattcgagaagtttgtctctggcatcgattccccaatccgaatcattgccgacgtcttctttgggtggacggtcgaagtcacgcgcacgcacatcccacacttgttcctccccggcggtgcattcagcaacaccgtcttcttctccgtgtcggagcacctcgggccataggggcagacccgtgaacgacattcttttggcgtgtcacgacctcctgtcgcaagctcgatgctctccccatcgacacgtgagccccttggagggagccccgacctagattttactgagagtttctcctcatcaacctagatctcagtttctctggactttactgagcactcaacattgtgttttttggttgctggtaaattgctcatttactgctatagttgattagtaaatataccggtattagtatttatatagttactggttacttgtaatacaaacatttttcattgaagcgcgtatatggtttgtaaaataccagaacaaggtcagtacttttatcattggcgagtatcttttatgtgagtaatatttttatttccatgtttatctacttagttctcgtggcatgctgccttttcagtattggacaatgctaatggagttacaactccaaggacaggaaggtatagtgcagatggagcaggtggtgatgcttctgtagagcttacacggccgtgcaggcacgcagctgccgcgcttggtgatttgatatttgtgtatgacggtttacgtggaggtgccgatccatagatttagcttgaagagaaaatagcagcagaagaaaaagttggcgctcgacaattttttcgaaatcatcttaaaaggctgaccatcaaataaaaaccaggctaaaaacacaaaatgtcaaggaattccatccttgtgtttgcatggacctagaaaatgcagatttaagaatgatgcgagtgatggaggcctatcaggtcaaggaatttcatcctgatgtttgcaaggacccagaaattgcagatttaagaatgagcgagcgatggaggtctatcagggagtgttcttcgttgctatccattgtgaaacatgtcctacagtatcccttgccaaccagctcctgtatctgttgcctgctcgattcgttgaagcacagagtatggagaaaacacaacatatatcgcatggattatgatttgttagtgcatgtgttacatattgacttatcgttttgagttgtcaataggtccaaggtactaaattgttgatgcacggatttctaattttatcaatttgttttgtgggctgcgatttattttaagtcgctctaagatctcaattattcctcttttttgttattttttatgccttagctgtaatgtttgttttgaatatttattattggaaaatttgatattttataggtgagacattaattaagccattttcataaaagaacactcctgtggtgacaattagacaagaatactaataatcagattaacatacttaaccttgactgcacatatagagactacagtgttgtgttgtgttggttcactgtaccacaaacaatattgaagaggactgatgaagagcgcaaagtttatagcatagtcgaagattttgaattgcaattcaaggagaaagaggattgctaaaggtcttcataatacttcttgttttcattttagttggtgggttcttcagtaaagctcacaaaatatttattttttctcaaagctttcttttcaatttaggatgaccttcaaaacaaaaaaaagctcattaaagaacatgggcattatgaaagcacaataggatccaaagaggtaggtccctttttgtcacttatttaatattcctgaataacctgtgttcggtctgaaagagcacataattgcactcctatttttaatccttacatgattactgcataactgtttatcagtttgtggtctacaggtatcaggctcgctcgcaccacagatatctttgagttattttttactgcattgcgactaattttaggcctccaatttgacaaacagaattaagtagcttatgtatcccttgtttcttgtttcctcagtatatatacacactttccaatatgacgcaggtagcattgttgtagaattgcggttcacggaaacacaaggctagcgcttttgtgcaacaann

SEQ ID NO: 24567 - DNA, 2531 bp, Zea Mays
tgctgctcgagcctgcaaggaagaccgcaatacagagcgcgctggccctggagcggaggcaagaggggtgactacaaggagcttttcgtcatggcactgcctaaggacggctgcctcgatggtgccaagatcacagaggtaggaggggtcggctacaaggagcttcttgtcatggcgctgcctaaggacgacagcatcgatggcgccaaggtcgcagaggccatcggcgtcaagctgccagacgtcgggggggccataagggtaaggaaatctccacctgattttatgtcgtttccatgtttgtggagcaatgaaagggacacgactttcggttttggccagttacttttttttctgaactaattgaaactggcgtactgtgttttcccaattggttgtggtttaatttcaggtttttgacgcgatgattcgtcacagagtttcagattcttatgttttgtcacaagggcaagtctttttgctgcttaagtgctagtatgcaaactgtgtatgtttgatcatcaagtgatgattttctaccgtttttgcaagtaatgacttgctgtgaaaccgacatttgggctataagatgtggtattttgtggggccctacagaagcacatagttgaatgtacattacttacctcaataacttgtaatttacactataatgtatagatacggcgtcttcaataaatactgaaatgccttttgtttatatgatggaattagataatgtggttgctaattcgttacacacttacgctattaaatgtactttgtaacttgaactatcttactctctaatcttcggtacattgacaaccatacaatgccaaagaacttgcagttgcaggtaggctttgcctagagaagtcgcttcaatttcaatcctcatagatgccttatatatgaatttaaactttgaagtaacgatgaatttttgactgatcgtttgaggccttccttttatccaattcaccacagactattttgaatagcagagaggccagagaatttgccagtggggcactagctggtgctatgtcaaaggctattcttgcacctctagagactatcaggacaagaatgattgtaggagtaggacctaggcacatttttggtagtttggtggatatcatccaacaaaacgggtggcaagggctttgggcagggaatacaatcaacatgctccgcatcattccaacccaagcagtcgaactcggaacatttgaatgcgtcaagaggagcatggcagaagcacaagagaaatggaaagaggacggatgcccaaagatacagcttggtaatatgaaaatcgagcttccacttcacctcttatctccagttgctattgccggtgctgctgctggaatagctgccacactggcgtgccatcctctcgaagttatcaaggatcgcttgactatcaaccgagaggtttatccaagcattggccttgccttccgcaggatctataagacggatggtataggtggtttctatgctggcctgtgtccaacgctgattggcatgattccttacacaacatgttacttctttatgtatgacacgatcaagacctcttactgccgcttgcataagaagtcgtctctgagccgccctgagcttctacttatcggcgctctttcaggtcttactgcaagcacaatcagcttccctctggaagtagcaaggaagcggttgatggccggcgccctgcaggggaagtgcccgcctaacatgattgccgccttgtcggaggtgatccaggaggagggcgtcatggggctttaccgcgggtggggggcgagctgcctgaaggtgatgccgaattctggcatcacctgggtgttgtacgaggcatggaaggatgttcttctggctgacaggaacaagccacgctctttagcgaactaaacaggccgtccttgagcaatggaggcgttgctgggattcctgatctattttcagttttggaatcccggctgcggcgagtggggtacatagggcgcgtttctctcttttttgattgactgatgagtggtaagcgttttgttgtgtcatcggcacacagacaaacatcattaatgtgtcaaaaaactaagcgaaaagacaaacccttctgtatttcctgagtggaaagatggggaacctaaccctacctggagcctctgcaggaaccttttccttcatctaccaatcagatacagggagcttcaggttgacagatcgcaccaactgaaggacgaacctgttctgcgacaacaagcaggataagctgaggaacctgttttgcaagctaagttgagatgtaatttttgtcttgggctgggtggttatagtgttttctttcggcttttcttttctttctgcctcaagtctgaagcgaagtttataaattatttttcctcggctaatataatttgggtggcaaagcttttgccgcttccttaaaaaaagagtggtaagcattttgttgtgtcatcaattctgaattcttgtgctgttataagaaaaaaggatttggg

SEQ ID NO: 24568 - DNA, 4885 bp, Zea Mays
ggcgaacggcagaaagccaaggccacaaaattgctgcgaatctgggaaagcccaccaccgtccccgcgagagccaccgaggtagtcacgattcgaatcctctggcgtggatgggatcaggaaggaggacgcgaaacgaatcggatcccttccccttgccgagtcaaaaagcgtagcgaagcaagcgcaacgcaatcgtgtggcgattgcagggcgtgtgccgtggaggagagcggcagcgcaaccgtcaccaccaccaaacccctccgcattctctcgtgcacgcagcacgcgtccctaaacctccctctcccttccgctttttgtaatcctcgtcgccatgacccgcgccgccgccgaagccgccggggaggtggtggtggaggaggatctgccgccatcctgcgacccgcagacacaggcgagatggtaccagctggaggcgctggagcgcgcgctggccgggaacacgcttgtgttcctcgagacgggcgccggcaagacgctcattgcggtgttgcttctccgccgcttcgcacaccgcatccgctcctccccgccgccctccttcgccgtcttcctcgtccccaccgtcgtgctcgtgaaccagcaggcgggcgtcatcaaggagcacacggacctccgcgtcgcccagttctacggcgacatgggcgtcgacttctggaacgcggacacctggcgcggcaggatcgacggggccgaggtgctcgtcatgacgccacaaatccttcttgataacctccgccacagcatcttcaggctgcgggacatcccgctcctcatcttcgacgagtgccaccgcgccaccgggaattccccgtacgcctgcattcttaaggagttttatcatccgcaactgaattctaggccatcagattccattccaactatatttgggatgaccgcttctttaattgcaagaaatttggcgcttgacaaatattcagaagaaatatctgagtttgagaatctcatgaatgcgaaggtgtacactgttgccagtgaatcagcactattgcaatacattccaattgcgactacaaagatagttgagtacgatgattatatcgtaacgtctgagttatatagtcatactatccgttgcttgaacaaattggaaacaaagcatttagaaatcctgaaggggaaactgcatggttcacctttggaaaattcagagaaaagaataaaaaaattaaatgcaatgttcttatattgcatatctgatcttggagtatggctggcagcaaaggctgctgagattctacaatcaaataaggaaagctgtgtgtccttttggggcgaagaattggatgaaaaacttgaaggatttgttagaaactatgtcagagatgtatatagtgatctttcagaaattatattgaagatgacaaagaggggcgtacaacgacatattggtgaggacttcgctgaggatctgcaagatgggttattaacatccaaagtttattttcttatcaaatctcttatggggtataggcatatgcaagatttgagatgcattgtttttgtcgaaagagttattacaagcattgtgttggaggcccttctgtcaactattaatcaaatgtctggatggagtgttagatacatggcatcagggcgtaattgtggtttgcaacatcagagtaggaataagcatgtggaaatcgttgattcatttcggagtggaaaggtgcatctgattattgccacacaaattttggaggagggactagatgtgccaagttgtaacttgataatccgttttgatcaggcagcaactgtacgcagctttatacagtcacgtggtcgagctaggatgcaacattctgactatgttttactagttagaaggggagatgtcaatgctctttctaagacacagaagtttctgaaaagtggacaaatcatgcgggaagaatctcagagattggaatctacttgttgtcagcctcttctaaacacactatgcaatgaagaattttatggtgttgaatctactggagcaattgtgactttgaactctagtattcaattgattaactttttctgctcaaagctaccatcggatgagtattttaaacctctaccaagattcaaaattgacaaggcattaggtacatgtacgctgcatcttccaatgagcagtcctgtacaaacaatttatgctgaaggaaaagtttctataatcaagaaggttgtttgtctcaaggcctgccgggaattacatgctgttggcgctctcacagattatctcttgcccgaatcgagtgttccatgtgaagatgaacctgatattgttgtggacaaatacaaaaatgggcaacctgactactttccagagcaattagtggataattggtcgtccttttctcgtcgtggcttttattattgctacatggtatcactggaaggttgttctaaaactactccagctgagatagtattagctgtaaagtgcgacatgggatctgacttcatctcgaactcattcaaattgtggggtgtgcaagattatttgagttttaccatgagatatgttggcatcattcatctaaatcaggaacaggtaattgccgcgagaagattccagacaacaattctttctttgcttattagtaatgacctttcggaggtcagcaattatattaagaacttacttgaaatgccagcatctcctggagctgtgtatctacttctgccagtagtttctggaaaaattgattggcgtagcatcaaattctcagcctcggaaatgcctgaagctactaacatggatatgcgacactgctatccttgtaaagatactggtatagtgcagacaaaagatggcactttctgctcgtgcatgcttcgaaattctattgtctgtacaccacataatggcatgttttatgctgtttgtggctttcttgacttgaatgctaattcgcttctacatagaagtgatggcagtttccttagctacaaaacctattttaaggaaaggtacaaccttgatttaagatgtgaagatcaagctctcttggaagctcgtaaacttgtggaagtgcggaactttctccacaagtgtaactataaaaaagaaaaagaaagaagtggtaagagtgtggttgaattgccacccgaactgtgcatagttgtcatgtcaccaatgtccgcaattactttgcgcagcttcacatttattccttctataatgtatcggatccagtgtatgctcctttctatgaatttgaaaatgcaattgggtccaagcatgcagcagtttgatattccagcactaaagattctggaagcacttacaacaaagaattgccaagaggaattttcgcaggaatcattagagacacttggggactcttttctcaagtatattacaacccaacacttttttgtcaaatacaaacatcagcatgaaggcatgctaaccaagatgaagaaaaacgtgatctcgaatgcagctttatgtcagctggcttgcagtaacaatcttgtgggatacattcgaagcgaagctttcaatcctaaaacatggatcgttccaggggttggctatgacatatgtgataggagtctgaggaagctgaaaagtaagagaattgcggattcagttgaggccttaatcggggcgtatctcagtactgctggtgagcaggcagcatatattttcttaaaatctttaggaatggatatagagtttcacaaaatgccaattgagagggtaatcacaatcaaagcagaagagttcattaatgttaaaagtttggagctattgcttgactatagtttcaatgatccttcattgttgatggaagcactgacacatggttcatatcagattgctggcactactccatgttatcagcggctggagtttcttggggatgctgtattagatcatatttttactgattatttctaccatcagtaccctgaatgcactcctgaactgctgacagatctgagatctgcttctgtgaacaatagctgctatgctcatgcagcagtaaaagcaggattacataagcatgttcttcactcgtcatcagcactgcacaaaaggatggccgactacctggacaagtttgagcagtcattttcaggtccatcacatggttgggaagcaggcatcagtctgcccaaggttctaggtgatgtggttgaatctatcgctggtgcaatttacatcgacgccaagcatgacaaaggggtcgtttggagaagcatgaaacggatactggaacctcttgtgacacccgacacccttcagaatgaccctgtgaaagagctccaggaattctgtgatagcaaaggttacactttggagtacacggtaactcgtgacaacggtgtatcctcggtggtcgcagaagtgcggaccgaagggactacgtacaaggccactcggacaggcttctctaagcttgacgccaaaaagttggcagccagttccgtgctccgtgatttgaaggctgcggacacaaagcagtactctgcaaatggtatcagttgcacttaaacttcatagctctatggtatatacttttgtacaaaatcgtcgaatcagtaaggtgtgcaggtgcctaggcacgctaccctacttttactgcatctacgtctacggccacactaaagcagtacgtgcaacaatgttttgttttggtcatgtctcttgagagtgaaagtgtagcgttatttttattttgattcgcatttttgggataggcctggtggtgcaccagggcaccaagcgagtatgtggtccgtagggtttttagattactcttgtttcgagatgattggattaaattcttgtagagctgattggatggttcaatatcttggtttttagaatggtc

SEQ ID NO: 24569 - DNA, 2726 bp, Zea Mays
gacgtctgagctgccagccgccgtcgcgcgcgcccaggagctgccagccgccatcgcgcgcgcccaggagccgccagagctagacgtcgtcggccgtcctccaccgccctccaggtacgtcgccggccccctcctccctcctccctccgccgccacccccaaagccgccgctgccgccagctactgcctctcccgtaccgccgccgccgtcgtacgagcaggccgtagggtttcgagtttggagttctgcctcttcctactgcctctccccaaggtccccactcgcatccaaggttgtacgagcaggccgccagctactgcctctccccaagcgctggtggtttgtttggtaaatggggaatgggcaatactctgttggttccctgttaagtgttacattttcaatgcggtcatggaaatggaattagatgttgctgttgtgaagagagatgaccttggaaatgctcatggtcttaatcttgatgagttcgatgatggttactaatcatacatgaaagttgtaacttgtgttgtgtggttgaacttatgctaatgctatttggtttgtgaactcaacttatgtatgaacttattctatatttaaaattctatgtcaagtctgaaaagacgtttcaacgttcgcttaaacgtttaaacgttgaaaagttggttcataacgttttaacgttttaccgttttaataaccatgggaggcacacatgaagactgaggtatcctgtacactaaacaacagtgtcagtcctgaaggccacaaaagctcactaagcttgccagttccttctggccagtcactttcttccaatcttgccacaaggtctttaagtactgcaggagaatctgtgaaaaatgcatatgacttggtagtatttaaagggagtagagaatcttctcgggctggagactgtatatcttcgcttggtgtgcatcataacataccgccaataatgattgatcaaggaagcaacatgaatcctagtatggagagctcaaacaattcacataggttgatggcatctaacactaatgcaactaagttttactcttacaaggaccaaatgcatgtaacaccagaaagtcaagcttctgctgcatcaagtcagccctttgcgggaactgttttaagagcacaaagtgtatctcaggaagcttcacctagcgtctttacttcaaagcctctcatagattcttcacttttgaaaaatacttatgttggtttaagttcaggcggtgcccatattggacatccaaattttggtaaccagcaaccaagtgacgaatgccttcaaagaaaatctgaatctctatctggttcagaagcaaagggccattcagctgcattggtgcaacctgctctaggaaatcatcataatgggagtggaggtgcacacaagggccttcggatggctaacgttgtacatcgattcaagagcttagttgaatctttggaaattggtgttgtgctatctgggaggttgtggtcctcaagccaagcaatcttcccaaaagggttcaggagcagagtaaaatatttcagcatcgtggatccaacacaaatggcatactacatatctgaaatattagacgctggaccacagggacctctgtttatggtgactctggaaaactgtccaggcgaactttttatcaacgtctctcctgccaagtgctggagcatggtccgtgagaggctgaatatggaaatacggaggcaactcagtacgggaagagctaatcttcctgcactacagccaccgggatcagttgatggttttgaaatgttccggttgctgtcaccggcaattgttcaggcaatcgaggcacgggatagagatcgcatctgcacagagtactggagatccaggcctcatgttgtcactgaagatcgtgcgacggcgccacctcaggctcagggtcctctgcatgcgctgaggggtctattccagcgagccaaccgcaatgagctgctagccctacggagtctactggtgagcaacatcagcccggacgacttctccaggcggcaggctacccaaatcctcgacgaggagatcgccaagcagtggcgctgacaggcgtaaatacaactctgtaatctcttgatggcatgacgggaccaagcagttttcgaccttgacgaaagagcggctccttccgttgcccccgtgcccattctttgtattgttgtgtccatgctccatgccataagatcttgtccccatttggatgcgatcgaatgaccgacgacggctcatcaactgaccagcgtacataccgtctgcctggaaactcttgtggtgttgtaggtttagttatttttcttttaaacgaaatattttaccttcttttttagtgaggctgaaacgcaggctcatgagacgtgagtttttacatgaaaggttgtgtacatcagaaatgtgcggggcctgttgacactactagcagataggcgtgatttatgtgccgagttggtcagagtcgaacagtccatgagcttcaggtactcatcctgcatggttgactgggagttggtacttgcaagctgctgttacagaatacagaccagtagtccaatgaaccccaactgactggtcgctgccatgtgggccaacttttcactctgaccagtctgaatattctgcaaatacggatgatgaaatatctattttgtaaaatctaatccatacatattagaattctaatctaac

SEQ ID NO: 24570 - DNA, 787 bp, Zea Mays
tttgaaaaaggaacggcccatgttcagggagaaggctccgactgggctaggaggcgctaggctatcgccgcggccgccgttctctcacctgctgcatcgctgcttccgcctccgccctacaaggctacaccagatgcccagattttcgtccggttcttctccggcaacgagcagccaccagagtcatgtctgcaaagatacgcgtagtgatgaagtcttttatgagccaaagcaaccaggtctcagggcttatgccattcacaaagaagattggactacctgaatcacgagccctgtacaccgtgttgcggtcacctcatatcgataagaagtccagggaacaattctcgatgcatgtcaagaaacagtttgtggaacagacagccaaaccacacgaacttcacaggaagttcttctggttaaaacgcctgcggatacctggggctcagtatgaaatccaaatttctttcaagacacgtctcgatatggcgagcctaaggtcccaagctccttgctgactctcagatcttccttaccgtcctgaatgtttgaagtgacttgtatccatcgacatttcatatgttatgaagacatgcttattttgatggcttttgaaaaaaaatgtacctgctaagtcttcattaccttgacagatcactagtcaagaaaatgcagcatgatatgacttgattcacaaaactttatggttgtactgtttccgatgcagtttaagcagtcatcatgctgaatcccttttaaattcatataatgatgttttgttttgatc

SEQ ID NO: 24571 - DNA, 1462 bp, Zea Mays
cttccccttcgtttattgctcttctccggtccttctccgcaacccctggccctgtcaagcagacgcagggtgacaccaggcagcagcccacctccacgcgaacacgccgcaccacaccatcaccggcaccgcagcacggcagccagtcaccaggactccaggagtgatctttgatccccaccaggccgccacgctactgtcggtaaggccagggaccctgctgcatctgccggctgctcctctccccgcccccggttccatgagaggtcggcggtttcgataacacacaccaactgctccctccactccttccccctgccttcagcccttcccgcaccactcccaactcgtaaacgctgtgcgccaacgccgtcgcccttccggatccgtcgtccttccgccggcgccgtgatggacccaagcgattccaactccgccgcaggaggaaagacacaaaatgtttcagtaccgcctgttgaaggtgtagctggaggaggaactagctatggatgggtggatggaggtttgcggggtacaaatattggtgctggtgtgattgatcctacaaaagtacactcagatgatcttttgcacgtctggtctatgcccagcacagcaaatgttagccagcaagaagcgcctcggcctctagagaaagtcaaccttttggcagcaagaaatgaaagggaaagttttcaaattgctttacgcccaaaggtttcatgggcaacttcaggtattgcagggtctgtgcagatacaatgcaccgatctctgctcctcctcaggagacagggaagaccagcattcgcacagttctattccgatggttataaatgttgtaccaggtgtaccagatgcacttgttcctattgatccactcagtcctcaaataagtattcaaccaggggagacagctgcagtttgggtatcagtaaatgttccatgtgggcaaccgcctggtttatatgagggtgaaatattcattactgcagttaagacagaattagattccagaacagaatctctaccaaaatctgaaaagtgtaggctatacagagaattaagaagttgtcttgacctcactggacccagagactactcgtcaccagaggaaatggtacaaagactaacatcagcttctactgtactaaggagggtgttggataatccagcactccaggactgtcaagagaataatggatttggagacatgatggatgaagatgttataaacaatatttcagttcgcttgaagttaagccttactgtttgggacttcactctcccagtgacaccttctttacctgctgtttttggtatatctgaaactgtcattgaagatcgattctgtttggagcatggcactgaaggatggtatagtgcactggatcatcactttaggtggctcctccaatataggattagtccatttttctgcagatggggtgatagcatgcgca

SEQ ID NO: 24572 - DNA, 79 bp, Zea Mays
gggaggaagaaggaaggggtgaagaaggagttcaaggtggtggacctccgaatcgtacttagtaccatttcaaattccc

SEQ ID NO: 24573 - DNA, 3187 bp, Zea Mays
tacactgttgctgactgtttctggtcatcagtaagcagaagcctggctagctggcctctggtatgtggttggctcaaggattacaggatttcaatcagtaacaatcaagtatgaggaaggaacaacaacgggtgtccaagcttgggtggttggcttgccggttacagcaagtcaattagtaactacagatgggaggaaggcgaccgacggtatggctgacatgagaccctgtctaactcatgtttcttccttccttccctcatcagccgtcccgtcgatcgggcaaataaagttgcgcctagggaggaaggaaccaggcggcaggctgcccgtgccgacgtggatcgggccagagctaggtaagtgcacctgtgggctgtggtcggcaggcgatcgaaggtgagtgagccggtgagccccgccatgcactgacggagtcactgccgactctcgtcgtccgatctctttttactgtggacgaatgggtgcgtgcagcctatctgcctatgggaagcgagagggggcccgggactgggttgagcaccttgtgcgcaaaggcatggtggcgtctggggccggctgcaggcgtgtgcgcacctgcacgagcgtgcagtcgcggcgcgtggctgcagtttggtgtgcctgggacggggactcgtgccgtgtgtcctgcgcgaggtggttttgcggctggctgacggaatggttgatggaatccttgcgtaaggacgcaactgagaggtaagcccccctcgtccccgtcccccgtgggaaacgggagtgccaaagccttgtggcacaccaaactgtagcttttgatcgtgcatggtggggcgcctacctgatgctacgcaaacttttgtgtcgcagcttcagttaccctgaagagcagggcaagctagcaaaaggtgaaagcgtttggtcacgtagaatccatacaggtcatacatatatagcagtcgcaactcgcaactcgcacgtagagcgtagaggttcaaatctgagccttagttcagaatgcagcttcagtttgggagttcgttcgtgcatagcaggccctatagctggggttagtcgtgtgcaaggattctccatgtggacaacacaacacaagcaagcaagctaatataaggttggatttaaaagtcgcagaacaattcatgacgtgcttggaaaacgttggtagcgtcttttaatgcttgatctaaaggctaagttatcatccatgggctaggtttgtttgttagtattaccctgtccagtgcaagggcaggtaggaggtagagagagaccgagcaagtactaacctttcatggccccggtctgccccccagctccctctttcccttgggggccgctgtgtgctccgtcgccatcgcgggggataaaaggaaaaggctccgaggaaacagtataaaagcgcccccggcacgcacgcacgcacgcaggctcactccacgcagcagttgccaggcgcttgtcactccagccagcggcagcccttttccttggcgaggcttggtttagtttagcccgcctgcggtctgccgcctgccaagtgccacctgagacctgatagccgcaaccgtgagaggctggtagcccgtagccggcatccctcgccctcgacccatttgaacagggcctcgagctttgcctctgctgctgctcgcttgatccgtctcttgccgtagtatactacgcgtgctcgatcggcggcggcggctctacgacccgcggccgggatgggtcggcagccgtgctgcgacaagctgggggtgaagcgggggccgtggacggcggaggaggaccgcaagctcatcaacttcatcctcaccaacggccattgctgctggcgcgcggtgcccaagctcgccggcctgctgcgctgcggcaagagctgccgcctgcgctggaccaactacctccgcccggacctcaagcgcgggctcctcacggacgccgaggagcaggtcgtcatcgacctccacgccaagctcggcaacagatggtcgaagattgctgccaagctaccgggcaggactgacaacgagatcaagaaccactggaacacgcacattaagaagaagctgatcaagatgggcatcgatccagtcacgcacgaacccctcgaccggaagacaaccagcagcggcccggctacaacctctcagtcaaccaagtctgacgaggcgaccaaggagcagagcccgcagaacgacgacgccgtgataagggacgtgccggccgatggttgcagcccgacggaatcgagcacgaacaccgtgagcaccggcggaagcagcagcagtggtggcggcggccatgaccaagacccgctggtgaagtggcttttggaagaggagcctgccaccggcgacgaggcgtggctgaacttcactggcagtgtcgacgtggacgagttcagcagcattgccgccggtccggagttgttgccgtgggatggcgcgaccgactggctgctcgactaccaagattttggattgggggactcgagcttggtcgatggctacatggtcaacaacaacagctcaaacggagcaaagttctagctagctagccgaagatgtcatctcatctgcttgtgttgctttgctgccagtgaacgtagatacgtaagtaataaaagcattggtatcgaggttgtcaaaggtggatgaccacatcgcaggaagatcatgaagagtccttgcacgcactcctgtatctcgaaccaactaacggctgggatgcaattgagaaggggaggagcacaggccaatcaatctcaaagagataaaactggttcttgaagatctcgaagaaagatgtgtttcttcacaatcacaaagagaggttgtagaagttcttgctgttgtatacatggttgcgtatatattgctaaattgtaccttgttaggccattttgttcgcaaattgcacgagtcactaattagtcagcaaaaatgtgtgcataaagaagagcagttgaaatcgcctctttgtacgttgtgggtgacgttcttttagttacgttgtggatgacgttgatgcatttatagggtatttggtttgaggaataagttatctggtttgtagaatggaataagttatccatcatcacctcattaatcatggttagtactaacatgagtaattgagtcattccaccaaatttgagttttgg

SEQ ID NO: 24574 - DNA, 3374 bp, Zea Mays
aaatccaatcaacagccaacgtaaactagagagcattgcaaccagggacagagtggcgaacacaatattagggaaccattttaaacgcaaaagttcgcttgcaacaagaagcaggcaattatgatgtttcatcacaaaatctatgacatcacgacagttcagagttcttagggattttgatcccagaatctgatactacgcatctcacactagaagtctagaaccaacgactagtgacaggcttgctgatgctctgaatcagtccacaagtgtgcccaaaatgtcgtgctctctgaagaggaggtacctgaagatttttcagaagaggttaaatggcattaaacagaaggaaaaaaacaatcttcaatgataagaatccaacaaacagttgacttggtatttgcgaccacaactgattgtgttgccagttagcgaacaaaggttaagatgcatcattttttttctaagtcgcaaaaggcatagttgacatgcagtatcaaacagcctatcaccaacacaacatttgacacaattaaaacagtcactatcatgattccacatcatatcatgggtttgcctgttcagcatatattttgatgatttcataggacagcaaataatacagctgcaagacattttttataagtgcaacagttctattgtgtgcctaattgagaaattaatcatgcactagcagtataacacgacgtacgtactgaaacagagaagaatggttttcttactctttatcagctgcaagcttaacttcagttccaccatactctggcaggagaacagtgtcaccttccttcagagcaactgggatcagattgcctgccttgtcgcgctcaccagggccaacagccaccactttagcagcattcagctgcaacaagagcaacattgtcaagcagagaattgattctacacccacaataattagtttctccagtcgaacacaccaaaatacagtgctgaattgaatgctaattgataagtaaaatccttatttgaattctgaaagacaagaaataccgtcaaacaggaaatcaatgggatcccacagacaatagcaagtcatgtatcttactgaggtacattttcaggtaaaaacttgaaaatagcaagtaatgtatcttactgagatcccacagacaatgcggtcaaaacaatgggacagaacagtttggaactgcaggtagccataaacatgctagtatttcacaagtactctagtatataaatctacccttaataaaaaaacataacatgactgcttgaacgataaaattgttatagctaaagttaagaatggcagcctaaaccaagcaatctgaataacatagagctaatcacaacccaaacatacataaattcaccagagggaggaagcatggtgagaaatttttagctgcttacaactattggtaacctacaaaagcgatccaaatcgcccaactgctgcagccgttttcagttcggcaagcgacggcgcggaacaccttgcccgacaccatgatctaaacgtcccgccggaaactgaatcccctaaactactaaaaaacaacgtagcggacgatggtgctacctgcttggatgtttccgggaggaggatgccgccggcggtcttcttgggctgcaccagcttctcaaccagcacccggttcagagatgggagcagcctcttcgccatcgccgccgtcctcttgttacccttcttcttgcgcagtaagccaaaaggaagaaaaaaaaaactcgaagcttccactcgcctcaacaccaaccgatcagccggaggttttagggttttatggacagacgccggcgcagcggaaaaattacgagcctgcccctttgagatcgttcgccgcgccaacgcaacgtgcgccggcctctcgggtgccctctagaacgttcctcgttaactgatctgggccgagcctcatgtatccaggtggcccactgtcaagcgttttggagcccgctaagcatgagcttctgcttattgatgtgtcgttgaaagcccacggaccatttatccagcggcccaatccagcaggtgggttaagcttgggagttgggagtgacaccgcggcacctccactgcagtagtcttgttgccggcggcggcggcggcggcggcgcggagaaattcggcgaacgatggcggactccggaagcctgaggaagcgggaggagaaggaagaggaggacgacattgtctgcctggatccttccttcttcgtggaccgcagctacgagatgacgaccttcaccttcggatcccacgagttgcgcctcctctgcctccgcgccgcttccactgattttgatcttactggacagttagtgtggccaggggcagtccttatgaacaactacctatctcaacaccctgaaattgtgaagggatgttcagtagttgagctaggatctgggattggcattactggcatattgtgtagccgtttctgcaaggaggttgtcttgactgatcacaatgatgaagttctggagattataaagaaaaatatagagttgcagtcatgttctgagaatgcacatgcagtgttgacagccgagaaactagagtggggaaactcagatcatttaagcggtattattgaaaaacatcctggtggatttgatcttgttcttggagctgatatttgcttccagcaatctagcatttcctgcctctttgatactgtagagaggattgttcgtattcaagctggtaaatgcagattcatattggcttatgtatcccgaactaaagtcatggatgcactagtactcaaggaagctgaaaagcatggaatgcgtgttgaagaagtgaacggaacaagaacaaccatctcgaatcttgaaggagtcatatttgacattaccctgaaatgacagtccgtccttcgactctcctttgtcgaagtgcttgagtggttattcgtcatgaagtcctgtgtaacttccttttagcgggaaaatcgaagttccgcatcatgatgagctggagttgtgtcagttgtatctctgtagaggaggaggcaccacagtaagaacattagccgatgatggtctttgattcatgcgcccatttggtgtggctttctactgttcaactgctccatcctttaagctaatatataagatgtaagatgcgtgctacaactttctcggactatctatctatctatcggtgagatgaccagactgtgaaagttcctgtgacaaggagttgctgaaagcagtgccatcatgtatgggttgcagatgcttggtctgaactctgtaaaaggctctggattaccatgagtttttcgtgcttggtgcagtagcatgctgggcgacgggaggttggaactggggcccgg

SEQ ID NO: 24575 - DNA, 1961 bp, Zea Mays
ctcctttggtccacgcttttttcgctgatgatcccaccgtgaccgaggttttgtcaaaaaaaaaaaaaaacaacaacagtccctcccctcccctccctgctcctctaccccttcctctcccggcgaccagctggcctctcctttgttgaggcgagagacccccacccgatccggcgatggacgccgcgtccaggccgcctccgccccacggaacaggggtccgcgtccgcgccccgctggtggagtctgtctcctgctactgcagattagatacaggccttaaaactgttgttgaggccaggaagtttgttcctggcgcgaaaatgtgcatgcaacctgaagtcaaacaaaacaagcgcaagtcaaggggctcaaaaaaggaaagcccaaactcaggatggtttgcaaaagatggaaccgtcttttgtctgggaattacttttactccttgcgtaagaaaattggagtggcagaagaatgggtatatgtctttaaaagggaccgtgaagggaagatatcctggtatgcctttgatccactccaccagctatggaagtcactcccaccagttccacaagagtattcagaagcattgggctttgggtgtgccgttctgagtggttgctatctgtacttgtttggcgggaaagatcctttgaggggttctatgaggcgtgttgtattctacaatgctcgtacaaacaaatggcaccgggctccggatatgatgaggaaacgtcacttttttggttcttgtgtaataaacaattgtctctatgttgctggaggagagtgtgaaggaatacagaggacgctgcagtctgcagaagtttatgatccaaataggaacagatgggcctgtgttactgaaatgaacaatgggatggtgcctttcattggagttgtatatgatggcaagtggttcttaaaggggctagattcccatcgccaagtaactagtgaggtctacttaccatcatccaatacatggtcagcaattgatgatgagatggtcacaggctggcggaacccaagtatttctttcaatggccgtctctattcagctgactgccgggatggctgcaagcttagagtctatgatgagaacacaggaacatggacaaggttcatggacagcaagcaccacttgggcagctcacgtgcctttgaagctgcagctttggtgtcactaaatgggaaactctgtgtcatcaggaacaacatgagcataactcttgttgatgtctccaacccaacaatgagtgtcgagacagatagtgcgcgcatgtgggaaactgttgttcggaagggccagcacaggtcgtttgtggcgaacttatggtcgagcattgcaggacggaacttaaagagtcacattatccattgccatgtgctgcaagtttgaggtcaggttttgttagtgggaacatgatcaagttttttaagaagcaaaaggttcagatcagtgacagaaccctccatttcgaaggtagtaaggtttcattgcagaatcgcggggaaaaaggtcattggcgtgccactgctgcccccaaagtcccaaatagttatttgctctcttccagaactgaaaattccaattactttctggcaacatttgaagactcttatcattcatggataaggttttttcagattttgagtgcaaaccagaaagtgactaggaacttccctagtgtaatgacattttccccttgctggcaggctgggaaatgtgtttggtggatatattggtctcttatcatatttatctatctttgcattgtgtaatatgtggcatcttactgtgtaatgttggtgtatattgtagcggcggactagctagactccaggattagagtagtcaggattatgcctattatgcttcaattttttgttggaatgcctgatatcctccgttaataaatatgtgttaataaatatgtgataccgtgggctttttt

SEQ ID NO: 24576 - DNA, 675 bp, Zea Mays
attcctatgcgcctcccgtctggccgtcttccagacgtctccaatcggagctcccagcgtctcggagaagaggagcagcacggcacggcagctgtggcgaggaaggctcttgtcctgtcccatcccaacccagcagccgtccaaggaggaggagatccaatcggcgtgcaggcgtccaccgtccatccatcgatccaattccaatctgcagacgaaaaggggaagtttgatgagcttgtcgaggagaagggagtgaaagtgctgatcgaccccaaggctctgatgcatgtcataggcaccaagatggactacgttgacgacccgttaaagtccgagttcgtgttcgtaaacccgaactccaagggggagtgtggctgcggcgaatctttcatgaccacgggcagcaaagggtcgccatcgtgaggcggcgtcgtcgtctgtctgttggtgtaaagcaaacgcgtccgccgcaggatccagagctatacaggttctttaaggtttatcctgtaggcatctgtggctccgccggagtccttatagttgtataaacacagggcagctgactcgcatgtacttgtaaattcacttgaaatgttgacatggtcaggttttccccccatgtttatgcgtatctggtaatctcacggttcaagggctcgaatttgtgtggaa

SEQ ID NO: 24577 - DNA, 2851 bp, Zea Mays
caaaagcatagcgcaccaccacgggccacggcaatacggcatcatctccaaactcccgaggggggaccatcaccgctgctgagcacgcccgccgcctgcccttcctcctcccacccgtgccgcagctttcgattcctgcccgcctcattgctacctggtcgggccgcggaattaatgtcgcgcggaggaaatccgcaggtaaacaagtctagctgaagtgacgattgccagcattgttcgaccgtgcggcttctgtttggctggaaccgtgatggatccagaaaaacaaaatgagatgagcctgatcgacaagagagaactagtatacgaagttgcaagatggcctcaaggtgccatggagattcttcggtgctggacccgcagggaacttcttgagcttatttgtgttgagttgggcaaagagaggaagtataccaatgtcccaaaagctaagatgattgcttacctattgaaattagtttcacggaatagtggaaagaatggacaactcaagaatgataatccgaatgttatgttattagggcaggataacaaagatgaaatacaaatgaaggaatctgatgaacaatcacgaccactcaaaactgcaaactctgactcatcaataagcagagaggcttgtgccggtagttcagtggtgtgcagcaatgttgcatgccaagccacaccaaatgcaggagataaatattgcaaacgttgctcttgctgcatttgcaataaatacgatgataacaaagaccctagtttgtggttggtttgcagctctgataatccatacagtggttgttcatgtggtgtctcttgtcacctaaactgtgctctaaagaataaaagggctggcattgtcaagaatgggtgcaacaagttagactgtagtttctactgtgttagttgtgggaaaatcaactggctaatgaggtgtttgcagaaacaacttgcaattgctagggaggcaagaagagttgatgtgctttgtgagcggttgtcattgagccataaaataatacaagggtctgaacgttacaaggaaatagcgagcataatcagctcagctgtgaaaacacttgaaatagaagttggtagtgcattggatcaggtctctgtgatcacggggcgtggcatcgtgaaccggcttacttgtggtgctgaagttcagaagctttgttcaagtacattagaaattgtagactctaaagtggataacatcttggagttcgagtccaataatagtccaaaactcctaggtcctcagccccaaatcctttttcatgagatcactccattttctgtggttattgtgttgaactatcagcatgacatcggtaaggagcagattgatggttccaaaatttggcaccgaagtgccagggtttgcaactattcatcagagcccacatgccacatactgaggccaaacactaggagcctggtttctggtctgagcccttcaactgaatacttcttcaaggttttgccttttagcagcacacatgggtttactgagtgggagacaaaatgcagcacacgcagcctggaccatggcagcagccagtgctcaactcagaactctgagagcatgtgcctcaaagacgattcaatgcagcatcacaaaaaggatttgaatgtgcagaatcaccagagaaccattcaatatgattcacctaagggttctacaaattcaagtgagaacaatttatcatgtgatcggtattccaagcgggctaaggttgcaaggctagatggtgcaagcgacaacgatgaaagccagttgccgccaacttctgaagttttaccatttgcaagctccaactcttctccttccgaagctccaagtaaacctgacttgcttattggcaccccagattcggcctccaagaactatgtggagcagcagtacgagtactgcgtgagggtggtcaggtggctggagcatgaagggcacatggacaatgacttccgtgtaaagttcctcacttggttcagcctgaaggcaacaacacaggacaggcgaatcgtgggcgcctttgtagatgttctcatcggtgatcctgcaagcttggttggccaactggttgatgcattcaaggatgccatctgtatcaaggagaagccctctcaagcacaacagaaagatgcatgctgcaaggtttggcactagaaaccttcataactgttctccatcgctgtgtgacgtaagtttttctggtgactgaaggatgaaatattgaagttatcacctagcaggttgcatctgaattgtgtcgagacagacattgggcacttgagataaacttttaaggttataaaagacgataaaatgctgtagatgcttcattcggcattcaggtccatctgatctctcatttatttattccaattcagtcgatacgcggactattgatccatgaaggcaatcgtggtggaaccatgtgctgatgagacatggttcatggaccggttgagtttaggtttcaactagtgaagtagttggagtttgttagcagacaagcaattgtatgcatgtggaatgctatcttggatctgcaagctaactaatcatatcatgactttggtagatgtttattgttattagttgatagttgactcattcttttcgtgtgacgtgtttgaagtgccggaagtagcagttcatgtacagtcttggagccttagaccgtgtccagcagtctattcgtagcttacctaaaatattgtttttgcattgcctaaaatattgtttttgcaatgttctgtactgtagacttgtagactgtattgttcacatagtagagtaggtatgaggatgtgtaagctgttagaaatagcctta

SEQ ID NO: 24578 - DNA, 1893 bp, Zea Mays
actgctctctgcctcaatgcccgccccagcctcccaccctctcactccagtcagtccctcccagcggctcgccagccacctgctcctccagtcctctctccatccctctccggctctccgcctctccccctcgtgaggaggtgaggagaggagaagcaacagagggggccgcggcgaccgaccgaccgaccgacgtgtcctgagtcctggtgctggtggtgggtgcttctcgttcctggcgggtccatacacggcggggtgctagctaagggagaggtgccggcgtcggcgtcggctgcgaggagcaggagcagcaggccaccgacggattcggagatctcgccggagaagatgaagagatctgcatctctgtttcaagtccttctggttttcacagccgtgattgagatccaatggtccactgtatccagcatttactgcaaggacatgccgccgaacgtgtatcggcctcacagtgtcacaataactgaatttggtgccgttggggatggtgtcaccctcaatacaaaggcattccagaatgcaatcttctatctcaattcatttgcggacaagggtggcgcgcagcttttcgtgcctgcgggaaggtggttgacggggagttttcatcttatcagccatctcactttatcactggacaaggatgcaataataattggatctccggtgctaatggttcaattgatggtcaaggagctatttggtggggctggttccacaaccacacattgaattatactagaccacatcttgtggagttgatgtattctaccaatgtcgtcatatctaatctaaccttcaagaactcgccgttttggaatatccaccctgtgtactgcagccaagtgcttgtccggcatgtcacaatcctagcgcctttgaattcgccaaacaccgacggcgttactccagactcttccacgaatgtgtgtatcaatcattgctatgtaagaaatggcggtgatgttattgtcattaaaagtggctgggatgaatatggcatttcatttgctcaaccaagctccaatatcagcataagcgacatcacaggggagacaaggggtggttcagggattgcctttggaagtgagatgtcaggtggcatatcggaagtacgggctgtgggcctccgcattgtcaactcccttcacgggatcagaatcaagacggccccggggcgcggagggtacgtggagaatgtgtacatagcagatgtgagcatggacaatgtttcgatggccatcaggatcactggaaactatggtgaacatcctgatgacaaatatgacagcactgctctccctgtgataagcaatattacaatcaaggatgttgttggcgttaacattggggttgctggtatattggaaggcattcagggggacaatttcagcaacatttgtctgtccaatgtttccctcagtgtgcaatctgcacatccatggaattgttcacttattgaagggtattcgaactcggtgatcccagaatcatgcgaacagctcagaagcaattgtagacagacatccatttgctacgatggaagcagttcttcagtaatgagtgtgcagcaaccaagacatacatcgcccaccagccggttgctagatctttttactggagttggcttcattttagtgtaggtagagctgtgcttgttcttgctgcaaagggggcttgcttcatgtagtgagagccctattagtcatgtatatctgattcttgcaattatttgtgattagagtgccacttgcttcatgtatatagctgttgagatgactgtcggtgtatctttgcctgttttgttccaatttttggtatgtgaatgcaatctgcataactttatggttttgaacacactccctctgtttc

SEQ ID NO: 24579 - DNA, 2326 bp, Zea Mays
tgaggtctcttgaatgcgtggcacaagtggcagcagcagcaccccaattctgctgtgctgcctacaaaaaaaagtcattgggatgcagcagactgatggttgtgcggcggacgaagtcgcagggaaaccaggaggaaggctagtgcagagaatcagagctgtctgggtgaaagggcaaaggcaagcagcagagggaggccattacgtgtctccttcctccaggttcctctcggggctgccatggatttgctcagcagaggggcggtgttcaaggccctggtgttcctctgcttcatcagatcgtctcaaggaggagatctgaatctccctcccttggtgaaggcaagcaggttccaaagcgaggcatacgactacatcattgtcggcggcggcacggccgggtgcccgctggcggccacgctgtcccacaagtacaaggttctcctgctggagcgaggtgggtctccatatggcaaccgcaacatcacgttgctggagaacttccacatttgcctggccgacgtttcaccgcagtcaccgtcacaagctttcatctccacggatggcgtgataaatgcccgcgcaaatgtcctgggtggcggaacatgtatcaacgccggcttctacagccgggcgaaaccaagcttcgtccagcaagcaggctgggacgcagagctggtgaaccagtcctacccttgggtcgaagagaggattgtccactggcccaaagtggcgccatggcaggctgcgctccgggacgggcttctggaagcaggggtctcaccatacaacgggtattcctatgaccatctctacgggactaaagtcgggggcaccatattcgacgacaccgggcgccggcacacggctgccgacctccttgctgctggaaacgctagcaacctccgggtgctgctccatgctaccgtcgacaagattgtcctcgcaaggaagcacggcggggggaggaagcagccgagggctactggagttcggttcagagacgagaacggagcgcaccaccaggccttcctcacaaggaagaggggtagcgacgtcattgtttccgccggcgcaattggcagcccacagctactgctgctcagcgggatcgggccgaggggtcaactcagcaggcacaacgtttctctagtgcacgccaacgaacacgtcggggaagggatgtcggacaatccgatgaactccatcttcgtgcctatgaagagccccacgaagcagtccttgattgaaactgtcgggataacggacgctggggtgtttattgaagccagcagtggtttcagccagtccgacgatagcatccattgccaccatggaatcatgtctgctgagattggacagatatctacaattccaccaaagcaaagaagtcttgatcaaatccaagagtacgtgcgtaacaaacatagcctgcccaaagaagtgtttgacggaggattcattcttgagaagatcgatggcccactgtcgactggcagtctggtgctcgccgacaccgacgtcgatagcaaccccagcgtgagcttcaactacttccagcatccacaggacctcaggcgctgcgtctacgggattcagacgatcgagagaatactcaagacaaaccacttcgctaaccttaccgccaacggtgccgggtacccgatggaaacgctgctcaatctgagcgtctcggctaacataaacctgatacccaagcacacagacgacaccacgtccttggagcagttctgcagggacacggtcacaaccatctggcactaccatgggggatgccatgttggcaaggtggtggatcgacactaccgggtgattggcatctccggcctccgtgtgatagatggatcaaccttgttcagttcaccaggaacgaatccacaggccacggtcctaatgatgggcagatacatgggggtgaagattctaagggaaagattaggacgagcagctggagtataatggactttatccagctcatcaagtatgaatgtgacttaggaggagacaagtatatagtgatttttgaaagcgattcattaaatcgccaaacaaacaaaacaaaattaagccaggggttccatttgtattcttgctgctctcatatatatatgcatggtctatcacaaattcacaaatgtgtattattagttccacgttcatagaggattttctacattttgggcaacattattgcacactgtaataacataatctgacaaacttggactcagaagacaatggggcagagatcgatggcggcaggtccaaatcaggaccaaagctcaacatttatttgtattttcat

SEQ ID NO: 24580 - DNA, 4447 bp, Zea Mays
aaaaggcttaaggaaaaaaaaccattttccggaggagaaaaaacccccgagaagaagaattcctctcgctcgaggggtgggaaagaagcggaaggggagacgagtcgagaggaagccctcgcctccggcacacgccatggtggagactcgccggagctccgccgccgccgccgggaagcgcacgtctccatcgccatcctcttcgtccgtacctcccccgaagcgctccaaggcggagtcctcggggtcaccgacggcgtccgcgcccggcagggccgaggaggattctgtggcgggagcggcacccgcgaggagcgccggctcggtcgatgacgcggcagcggtcgcacagaaagatcaaggagtcgataagccgtcttccgccgctgcagagagttcaaagcggaggaaggagcaggagcaacagcaacccgcagtgccatgggcgaagctgctctcggagtgctcacagactcctcactatcccatcagtgtggatcagatttctgttggtcaaagcaaaaactgtaatttgtggctgaaagaccaacctgttagcaaagtgctttgcaagctgcggcgccttgagcaaggaggtccatgtgagttagaagttatagggaagaagggtatggtccaattaaatggaaggtccgtaagtccaggcacaaaagttccccttacaggaggggatgaagtcatattcagttcatgcggcaagcatacttatatttttctttatcctttgaatgacaaagttcctaaaacggtgctatcatctgctgttagccttctagaagctcctgttgctagtgtaaagcgtatccgtacagataagagaacaggagacacttcagctgttgctggtacagagatgatgacatctacatctaatcagaaggatgtagcagcagtacctcccgcgtcagctggagagaacagccaaagagtagtgcggccattggcatcatctgcttctgataaattgaaagggcgtgctgtgagccctgaaaaggaatttgcgaatggggaaaatgctaatgaggttaattctaacatcgaagactctccaatggttgttgctgcagcccccatatctcctgatgctgctgcgaacgatacctgtcaacaaaatggctttgtctctgattctcatctcggtgcggaaatcgctcttgaagatcagagggatcacatcatcagggagcttaacgcttcaaccaacgtgcctccaagtagatgccaagcctttaaggatgggatgaaacaaggaattatcaatccaagtgatattgatgtcacctttgagaattttccttattatctcagtgagaatacaaagaatgtgctcttgtcatctgcgttcatacacttaaaaaagaaggagttcatcaagcaatttgttgagatctcatcaataaaccagcgaattttgttatctggtccagcaggttccgagatttatcaggaaacattggtaaaggcacttgccaaacattttagtgctagactccttgtggtggattcacttttgctgcctggggcaccttcaaaggatccagaattccagaaagatgttgggaaggctgataaatcaggggataaggcagctgccgagaagtttgcaatatatcagaagcatcgttcttcgttggcagacactgttcacttcaggaggccagctgcaccaacttctagtgtgaatgctgatattgtaggaacatccactctgcattctgcatctctaccaaaacaggaatcgtcaacagctacatccaagagttatacttttagagaaggtgatagggtgcgttatgtgggtccagctcaaccatgctcgttgtcacaaaggggaccaagttatggttatcgaggtagagtgatgcttgcttttgaagataatggatcctcaaaaattggagtccggtttgacaagcagatccctgatggtaatgatcttggtggtttgtgcgaggaagatcatggcttcttctgctctgctgaattactgcgcccagacttttctgctggtgaagaagttgagaggctagctatgaccgagttaatagaggtcatttcagaagagaacaaatctggacctctgatagtgttacttaaggatgtcgagaaatcattcacgggggttacagagtcactatcatctttgaggagcaaacttgaatcgcttccacctggtgttcttattataggatcccacacccagatggacagccgcaaagagaaggcacatcctggaggttttcttttcacgaagtttgccagtagtagccagactctttttgaccttttcccggatagctttggtagcaggttgcatgaaagaagcaaagaaagtccgaaaacaatgaaacatctaaataaacttttcccaaacaaaattttgatccagcttccacaggatgaagctctacttacagattggaagcagcagttggatcgtgatgttgaaacccttaaagccaaatcaaatattggtagcattcgcatgtttctgagccgcaatggaattgaatgcaatgatcttgaagaattattcatcaaagaccaatcattgagtaatgaaaatgtggacaagattgttgggtacgcagtaagttatcaccttaatcagaataaaattgaaacctctaaggatgccaaacttgtactcacaactgaaagccttaagcatgggctcaacatgctccaaagcatgcaaaatgataacaagagctccaaaaaatcactgaaggatgttgtcacagagaatgagtttgagaaaaggcttttggcagatgttatacctccaaatgacattggagttacctttgatgatattggagccttggagaatgtaaaggacacgttaaaggagctggtgatgctccctttgcaaagacctgagttgttctgcaaagggcagttaacaaagccttgcaaggggatattgcttttcggacctcctggcactggaaaaactatgcttgccaaagcagtagcaactgaagcaggcgctaatttcatcaatatatcaatgtcgagcattacatcgaagtggtttggtgaaggggagaagtatgtaaaggctgttttctcactagcaagtaaaatagcacccagtgttatatttattgatgaggtcgatagtatgctaggaaggagagaaaatccaggggagcatgaagcgatgcgcaagatgaagaatgaatttatggtaaattgggatgggttgcgcactaaagataaggagcgtgtgcttgttcttggtgctacaaataggccttttgacctcgacgaggctgtgattaggaggttcccccgcaggttaatggtaaacttgcccgatgcatcaaatagggagaaaattctaaaagtaattttggcaaaagaagagctgggatctgatgttgatatggactcgcttgccaatatgactgatggttattcaggaagcgacctgaagaatctgtgtgtgaccgcggcgcattaccccatccgagaaattctggagaaggaaaagaaggagaagaatttggctaaaacagaaggtaggccggagcctgcattatatggaagcgaggacatccgccctcttagcatagatgacttcaaatctgcccatgagcaggtttgtgcgagcgtttcgtccgactcggcgaacatgaacgagctccttcaatggaacgacctgtacggcgaaggcgggtcaaggaagaagaaagcgctgagctacttcatgtgatggggtgagagcatagaatccagaaggatcacagccgtggcataagatcagaaggaacacagagcggccatagtaccacacccactatggccctaaatccagtcaagttttcgctccttccccctccctcagtagccgccgccgccccgccgccgcctggtgtaattagaactgtgtacggagtcgagttggtttgccagctgtttcaaggttacagagttgagatttggaattacaatggcgccattgccctcctccaacccccccccccccccccccccccccccgttttcttcctcccataagttgcggtcactgtccttcttggactctctggcctttgttcttgtaaatgcgaaatgaagggatgtgaaataagaacatcttcgtcctgttgttgacagtatggtacacatatttaatttttgtacttgaccggcgatgataaattggatcggtgccaacataagaattatggaaaggtgcctttcctgcccgccgaaatctgtgtgtatgtcgagtgggctgggtattgtgaggtgaaattttatgcgtctcctgtcgtcttgtggttgcgaaatgcgtgggagcaaacgtccggcataatgaactttcgtcatttcttatggctgcgaaatgcatgggttcggtatgtatgaattttctctgtcataatgaacttggattctgataacggtgcattgc

SEQ ID NO: 24581 - DNA, 1914 bp, Zea Mays
ggtaccaccacgtccaaaacgtttggagcccttttcctaatcttgctgctaccgcgcgctccctctccccggccatttctctcatttcgccctccctccgccggctagggttactgccaccgccttccacccctccccgactgcccgtgggtggaggaggctggttggcgtgcagggtacctcggcggcggagatggagccggacttctcgaccgtgggcgggcccagctttgagttcgctttcaacgaggccaacttctccgaccgggaattgcggatcgaggtcgtcgcgggggattacgacgcgccggggtccactggcggcggttccggaggaggtggcctcgccgactgggcgcgccatcggaagcgccgacgcgaggagctcttcaaggagaaaggtgatgatgagcaaggtattgatccatcttgggctgctgtggttacgccggttttacgagtcaagacaatttatatcagttcggcgattcttgctgcgaagagtcctttctttttcaagcttttctcaaacggcatgaaagaatcggaccagagacatgcaacccttagaattactgactcagccagttgctcacaagcttgcagatgaccacagaatctgcacttctctacctagatctcccttgctcagtttcaatggcagctgcagttcaacctctgacagatgcagctaaggattttctcgctgtaaagtacaaggatttgattaagttccaagatgaagtgatgaacatccctcgtgctggaatcgaagccatcttgtcaagtaatgacctccaggtggcatctgaagataccatctatgacttcttactcagatgggcccgtgcacaatacccgaaatcagaagagagacgtgaggtccttagttctcggctgctccctcttgtgcgattcagtcatatgacgtgtaggaagctgcggaaggtcctagcctgcacagatatagaccacgagcaagcaaccaagtgtgtcaccgaggctcttctgttcaaagctgatgcaccacaccggcaacgagctcttgcagcggacgcaataacctgccggaaattcgccgagcgggcttacaagtacagaccactcaaagttgttgagtttgatcggccctacccacagtgcatagcatacttggatctcaagcgcgacgagtgctctcgactctttcctgcagggcggatatactcgcaagcgttccaccttgcagggcagggtttcttcctctcggctcactgtaacatggagcagcaaagcgcgttctactgcttcgggctcttcctggggatgcaagagaagggctccacgagtgtgacagtggactacgagttcgctgcaaggacgagaccatccggcgagtttgtgagcaagtacaagggtaactacacattcaccggtggaaaggctgttggatacaggaatctctttgcaatcccatggcagaagttcttggccgatgacagcctcttcttcgtggatgggatgctgcatctgagagccgagcttacgataaagcaaccctagagcaatggtctctgtatagtggtagttgttacgacagatgaaaaagatatcggatgggaaacctcacgagttccagttcgctgcaagtttccagatttgccggtatctcactgccaatgagcttgtttgcctccgtaacggcgcagggtgtataatggcttatttattcctagtatatacaaatacaagttgatgagatgcgtagggtgtgcacgccagcacggacgcggatacgagaatcgaaccgacagcgcaagacgtgccagacacatgctgctcacaatcacacgtggagaaagctgcattgccggtcgccgcgctagctagggggtcgccgtccagcccagcccggccgacgttgcaataggcccg

SEQ ID NO: 24582 - DNA, 5638 bp, Zea Mays
cggaggacgagggcgcgacggcacgcggcgaaaacgacgcggccgcgtcgccaaaaccgtcgcctcgcttcctccctcccatgacgggctcgaaacccgcgcccgccgcctcgcagaaccctagcgcggtcccgcatcgtcgtcctcctcctcctcctcctcctcctcctccgccgccggtgacagcggttgcgagggtgcgcgaagaaggcgagctctcctccggcgccgacgacgacgagactctgcaaactcagctaggtgccgcatccattcttgggaagtttgtggaggctggatctcaagtgccatcggcaagtctcctcggtaaaggcagtaacaccttgattgtctcaaatgctctgaatcataaagcgtctgctccaagttacaagaagatcatgagggtgaatcaggggcaattcaaacctggcactaaccggaatctttcatggcagaagcctgtgtcaagtgataaccttctgataactttctcagatgatgatagtggggcagactctgggaagacagggcgagataaagttaggaaggctagctctcaaggtacacagagaacagggaacagtatgcaaactaggatcatgagagaggaagtatctcagcagaaaaaccttggttcaaaagtaggtcctgcacacttgcctgcttttccattcacacatagaaatgttggggccggcagggcatcaggtaatacctttttcaggaaagagctgcctgtccgccaagttaatcctctaaagtctaaacagaaagttcaaaatggggtaggagtacattctgaagatcataggttagaaatcttgcgccataagatagctgctaaagaaaatgaactaaaaggtcaaaaaagacctttgtccgctgttgctacaaagaatgcagatttttcttccaatcagccaaggctgccatctgaaaagataaggcttgaagcttccagcattggtgaatattcacgctttaatagtctgtctgaacatagtggaggaccaaataaaaggttgaagctcaatcagcagtacaaccaattttgtagtgacctgacaccattggcacctattggttctatatcaggaaaaaccaatgtgcaatcttcagaagtgacaaatcggtctgaaaatggaattactatgaaccttaatgttaatgaaacagatacaacagacacaacagaacttgcagatcaaatacaacaaggtggggcaactaagagcctacgtcaccacaaagattcaggaggtgctgagaaccatgttatgcttgagtcacatgatgggcttgcagcacaaccaccatttactgacacacaaactataccagaagatacaagtgcgttggcccctgtgacgtcagcccaagctaggcaacaggtactggctgttggtacttcacctgtgttagacggaacaccacaattgcaacctggaaaggagaatgacgaatgtttgaacagcagtggccagataggcgtagagacacagaacacaatattgttctctctacttgagatggaagaattacaagacaaggaattggaggatgctcaggagcatagacaaaaatgtgaagctgaagaaagagaagctcttagagcttatcgcaaagcacaaagagctttacttgaggcaaatgaaagatgtgcaattcttcgtagaaaaagggagatttgctcttcacaagtccatggtttaattgcagagaattcttctttggtgcagtctttgagtattcggaatcctgaagatggccttgcaatgccatcactgctcaattctcagattcatgcagttagtcagattcctgaaaatcagggtggtagacacaggctgtgtcctgaagaaccttctcagcagcaaattgataagcatgaagatgaagcacgtccacactattgtgataagcttgctgccagcacagctgatcccagctctgtgagtgctgtcaatgctgacagcatcctttcagattatatggaggatgatcttctgttcccgactagacaggcaagatcagaatgtgctctggatgttgagaatcaaatggaagaaactatacatgtatatgcagaggaaaacagacaagtttctggtgacggtggtgaggattatgaacttttagaagcttctttgaggtctagattggtggaaaggtttgggaagaaatcatgtttgaatggcaccattgatgaaggtactgaaggacttgctgttgggaaagtagctgcagaacatggcaagcagtctgcatatgttggacatcagttacaggaagcagagcagaatattatgacaactactcttgaaggtacaatggagctggaaaatgatggtgctgaaaaaactgttggcctctctaattcttgtagtggtccttcaatgggcaactgtgatcctgaggacaacatttcctctctcaaagagttatgcatgccattggttatggacagtcttatttttccttcttcagctccactaaatgctgctagacaaatcaagcgggcatttcctgggatttgcaaggagctttcagattacaaaaatgaccatctgaccagtgatgcagtgtctgaagttacaggaagtgtacaagatatgatacacgaccttgttggagaaaatatgaagatgctcccaactacccaaaatgataataatatggtgcacagtgtgattgatcccttctggcccttttgcatgtttgagcttcgaggaaaatgcaatgacgaagagtgccagtggcagcattttgagcatcatgattggagaaagctagagcttacaaaacactctatgatctctgtttcaggccagatcccttatggtttgtctcagtatattcttccagtgccagtgtatcgtgttggttcaaatcttattaaagctgatctgaacttgacacagtcagtgttggctagcagtttatggcaatattggcaaagggggttttgtgcttcttttcctttacctttatctgttcaaagagttcttccatcagatgcaccattctttcaggctggtgatggccggattgctgattttgataggaacagacaactactaaaatttcgaatgctggatagcaggaaggtgggtagagcacactgtattgcagttatcatcacatcacagaagtggcatacatattggagtctggttctttacactaaacttattcttgaagttttttgctctttctattcttgcataatggcatattgattatgttatattggtacttgttaacactgcactcttttcttgtggttccaatgaaaaatgctctgattttgacaatttccttctgcactggaccaagaatttacagacatttaaagtatacatttcatagtagttgtaagttggaacatgatgatatgacatttttggtttgaatgaatatatttacttcattgatatctgatctgcttgcattttgattattgctgtgtaacttcatatcgtgtagaataagattgtacagggttctgttgatattgaattcttcttggaggcagcccttgatttatattgtggaaaagtaaacaagcctgacagaatcaaggctctttcatttctggcgcggtccattgaggctgatccaagtacagttatcctgtgggtgttttatctccatatttactatcaaaaggatgaaggacttggaaaagatgacatgttttctgatgcggaaccttccagaggaaattattgatcagctggagtttcagaaagctttacctcgtgctttaatatggccttctattgatcccagtgtagacaacagagataagattacagatcttctaaattttgctgcttgtaagatggctgaagatattagtgagtgtgttaaaaacggggatccatcttacctgatgttatcacaattcctcgctgttaaccacattagttgtctagcggccattggaggcttaaaatcttctgttgatatgctggtgacctacatgaaggagtacccaatgtgtcctcagattcttctgatctcagctcggttagacagaaagcatggtacatgtccaggtctgaaaagctttgatgagttgatcttgaattggcctaaagaggcacaaggaattcaatatatgtggaatcaatatgttgaacatgctctggccactgatgccgagttagctgagaaggtactgacttgctggtttgaagaacatggaaaggactgtgatatccaaagcaatgctgctatttgtatagaactgagcagtgaagaacctggaacatcatcacttgtttcacctcaggcagttggttctggtccatctatatcagaagatctcgtctttcggttactaaacctctcactgtataagatactggagaacaacctacaggaagcacaaatggctgcgagtaaagcattgaaattggctcatggggagtggtacgagcactgtataagagaacatgctgcaattcatgcactggagctggagaaatcatcatcttcgacagatgctcaaactcgggctacattcagtttaatcattggctaccttgctgatcattgcaacttgcccacgagggagctgctgtcacgaaggttttgccagaatattaagaagcataggcttaggcagcttatagatgatactattggttctgttcctgcagattcttctctgataaactctgtccttgaagtgtgctttggcccatccctccttccaaaaagcattagcgatgtgaagtacctggttgattttgttgaaacagtcatggaggctcttcctgcaaactatcgcctgggcttggctgttggtggattcgtagctaagcacttcacaggttatggcgcagcctccactgggaccaggttctgggcaagctctgttctgatcaatgccatctttcgagctgtacctgtcgcaccggaatcagtatggctagaaggtgcaggcctcctggagaaactgcatgccacagagattttgaagaggttctatcagcaggcggcatcggtctatcccttctccttcaagctgtggcacgcccatctgaattactgcaaagccagtgggagcaacactgagagcatcctggagagtgcgaggcagcgtggcatcgagctgaatctgacaccaacatagtgtgtcccttggatccaagctgcatgatgttttgccagtcggagatgttggtagtgttgtgttaactggagatggcgtgtagatatatcggtgatcatggtggtgtgagatcatttttgttctttaggtgcaggtttagtgggacatagtcgtcggtatcttacagcatgtgtttctgatggagtgatatggttagtaagcagtggtgaaggatacaggcatacgggcactggggcatataccatacttttggactagacgggctagagactgattttggagtccgttatgtttccattttccgttctcttggttttctctgtcgtcaatgtattataatcatgatgatgaatggatggagaaatgagatgagatttttttgagttcactcttgcagtttcggttattatatttttgtgctgtcttcgaatctgatttggtcgacggcatgtttggaagtaaagtattttaaaatcaggttttggaatacta

SEQ ID NO: 24583 - DNA, 1494 bp, Zea Mays
atgcacgttatccatggcgcctcgaggagaccccggcgaatgctggcccttggatccaaccgagctagcatgcatgcgcattcgctgccttccaaacggaggaaggggaaattaacaacgcgattacgcgaagccttcaaaaagccagccccctcctctcccttccaggcaacccaaccacaggccacagcgcagcggtgtgtgtgggtgtgtgtctgcgccagagaccaaacaccaacctccccccaccctcgacccatccccacctcgccgccgccgccgccgccgcacggtctccttccccgagatttgaatgcgttaggaagtgcatggggagaaaggatgccagagttgcgtagtggagtccggcagtctcggttgagggcaaagaaggttgaggatcttgtggttcaagaccctactgacaacttggttgtggcggcacctacggtggcaggaagacgtggtagaggaaggggtgggaggggtggagggagaggagcaggacggggaaggggaggaagaggaagaggtgttccagtgattaacttggatcctgaccagcctcttgaggttcttccaggagctggtgttggtgcccgcgctgcaggtggggcgcagcccattgaagacattgctaataaggtattgaagatggatggtgggagtgctgagaagattgctggaggtgaagatgaagggactacatctccagtcccagagaagccgctggggtgtagttatgtcaaggaactctggatactctgaacaggtagtggagttggattttctttatcctagtgaaggtattcaccgacgatgggagaacggatatagaataacttctacagcagctactggcgatcaagctgctttcatattgagtatacctaaaagaaagttaatggatgagacacaagaaactcttagaacatctgcttttccaagcaaccatgtgaaggagaaatgggccaagaacctttacattgcttcaatatgctatggccggacagtgtcatgaggcttgctcggctgcatccctagttgggaagagcatgttctgatgagtaacccgttcaagatgaagcaccttacagtggccagagtaggagctcaagaaagaaccgagaggaaggtggaaagcaatcggccaataagcagacgaggagtatgtgatctggctagtagcgggtacaggcgctaatggcgtcaaatgttttgtatcagcatgttttgcttttgcttcgctcctgaccgctgtgcaaagagtagacagcttgtttctttcggaggcaagtcatctgagaaccatcgtgtatagcgtatgatgtcattgtattttctttagtggaggccaagttccatctttccggaactcccaaaatgctaagttattatgcgaggaaacaagtgtactgataaaatcggtgtatcaattccattattcgacaattctcacctgcattaattaatgcaatgctgcattacttatca

SEQ ID NO: 24584 - DNA, 1952 bp, Zea Mays
tgagatttcatcaataaaccaacgaattttgttatccggtcccgcagtttctgagtcgcaatggaattgaatgcaatgatattgaagaattattcatcaaagaccaatcactgagtaatgaaaatgtggacaagattgttggatacgcagtgagttatcaccttaagcacaataaaattgaaacctccaactcgaaggataataaacttgtactcacaagtgaaagccttaagcatgggctcaacatgctgcaaagcatgcaaagtgataacaagagctcgaaaaaatcactgaaggatgttgtcacagagaatgaatttgagaaaaggcttttggtggatgttataccacctaatgacattggagttacctttgatgatattggagccttggagaatgtaaaggacacattaaaggagctggtgatgctccctttacaaagacctgaattgttctgcaaagggcagctaacaaagccttgcaagggaatattgcttttcggacctcctggcactgggaaaactatgcttgccaaagcagtagcaactgaagcaggtgctaatttcatcaatatatcaatgtcgagcattacgtcgaagtggtttggtgaaggggagaagtatgtaaaggctgttttctcactagcaagtaaaatagcccccagtgttatatttatcgatgaggtcgatagtatgctaggaaggagagaaaatccaggggagcatgaagcgatgcgcaagatgaagaatgaatttatggtaaattgggatggactgcgcactaaagataaggagcgtgtgcttgttcttggtgctacaaatagaccttttgacctggacgaggctgtgattaggaggttcccccgcaggttaatggtaaacttgcctgatgcatcaaatagagagaaaattctgaaagtaattttggcaaaagaagagctgggatcggatgttgatctcgactcacttgccaatatgactgatggttattcaggaagcgacctgaagaatctgtgtgtgaccgcagcgcattaccccattcgagaaatcctagagaaggaaaagaaggagaagagtttggctaaaacagaaggtaggccagagcccgcattgtatggaagcgagcacatccgtcctcttagcatagacgacttcaaatccgcccatgagcaggtttgcgcgagcgtttcatccgactcggcaaacatgaacgagcttctccaatggaacgacctgtacggtgaaggcgggtcgaggaagaggaaagcgctgagctacttcatgtgacggcgagagacataaaaccagaaggatcacaaccgcgccataaagccagaaggtatcgcagttgcgccatattgtacagccgccatagtacttcccccctccctggccctaaatccagccagggttttcctcctccctcctgggtagccgtggccgcctgtagtccctccctcgtgtaattagaaccgtgtaccgagtcgagttcatttacccactgtttgaggttccagagagttgagatttaaattttaagtggcgccattgcccttcctttcttcctcccctcctaagtattaactttgttgcggccattgttgtcgtgactctggccatagatccttttatgtacatgcgaaatgtaaccaagggatatggaataagaacatgttcatcctgttgtagacagcatggtggtacaggaattctttttatttttcatagttgattggtgatgaactggatcggtgccagcataagaattatgataaggtaccttttctgccgctgaattttttggtgtatgtcgatttgtcgagtggatttagtattgagatgaatgatatgacatcacatggatttttatgcgtctcatgttgttaattgtcttctaattgcgaaatgcgcatgatgcagagctgaattttgtctatttactttttacaacaa

SEQ ID NO: 24585 - DNA, 2470 bp, Zea Mays
cccggcccccctcatcatcctcgccctcttctgtcgattgtcgttggtggatttgtgatgtgggcttttcctctccttcgtgcttgtcgcggtgtctgggaatttctcttttgtggactgctgtcgatctctgcttatcgatttggcaagagtgcaagaccaactctgttggctagagtattgcatttatacagatctgcatattagagaagatttttcgtatattttggtgaacatgaagagaaaggcgcagtcaggaaaatctcgctcatggtggtgggacaatcatattagtccacaaaattctaagtggctctctaaaaatctagaagaaatggagaagcaggtgaaacaaatgttggggctcattggcgaaggagagttttctgcagaaaaagcggaggtgttctatgagaagcggcctttacttattactcatgtggagaacttctattgcatgtatcgtgctcttgctgcccgatatgacgatgtaactggacaactacgcaaaaacattccatcatctcttcaatcatatggctcggttggtgtctctgaatcagattctgagacacaatgtttcacatctccagagtttgatatgccacagcaaaagcaaaagcctggaccagatttccttgatttttccattggctctggtgttagctctgatgtatcaaagaagggtagtgaaaggtcttcatcatcttcagattctgattcagagcttgatgaggccaaagaggaaaatggcagtatgttttatgccttgagccaaaaaaatattgagctagaagatgagcttcaagaagtaaggggaaaacttgatgctttagaggaaaaacatgctcattgccaaagagatttgagtaccaactcaaaagatactgaacatgaagaaaacctgcacacttcagatgtggaatccaacacccttcagaaggatgcagaagaaacagattttgctttagagagctcaacagaagtcaacagcgaaaaggaagcattggaagctgtgctgtttgagcggaaaaatgagattgaaatgctgaaaggtgcaatggcctcagctgctaagcagtttgaagttgaattggcacatcgtgatcttgaaattggtaagtgcaagcatgaacttggagtactctcggagaagtatttgcatgataagtctactctcgaggatgagcttagaaggctccatggaataatcaagaatatggaaggtgacttagaaaaaatttcacaggagagattgcagctcaggtctcggattaaagagctcgagcaggcagctcacagcttagactattcagcttccgagatagttgagctacaagaagtaataaggaatacacaagcagaattagaaaaggtcacaaaggagaaagaagtgctcaaagaacacgctaacgaatttgagcaacttttaaagggccttgaggtctcaggtacagaggttgcaaagctaccagaaactatcaagaacctggaagcccagctagaaagatccttcgaagagaaatcagtactccaagaccagatcaagcagctggagcaggttatgtctgaatcttcggagaaacattcacatgagcagttctctcttactgcggatcttttgaagttatctgaagtgaacgcttctcttgaagacaaattgtccgatgtggcggcagagcttatccaagtttatgctgacaaggaagaagaatctctcgataatgagaagcaaatttctgtcctcagtaaagatattgctgatctcaggagaaagcttgaattgttgtcatctgagaaaaccacagttgatgatgagttggccaaactgctagctgatattatgattcgtgacgaaaagatgaagcaaatggatgaccacctaaatcagcttcagttagagcatgccaagctgatggcagaatttgacagtgcacacaggtccttgtcagagctgcatgcgcaggtttctgagctggaagacgaggtagagaagcagaagcttgtgatatccgagagtgcagagggaaagcgggaggccatcaggcagctgtgcttctccattgaacactaccgcagcgggtatcagcagctgaggcagctgctgcaaggccacaggaggccgttggtgatggcaacctgataaatgaacaaagtccgtttgccaacaaattgcgcagttgcttgtctctgggcgtgttctatttgtagctctgttctttcacaacttgtgccgtgtagtttatgttataaagaattctgtgtggtatgtgtgtagaatgtaatgggatgggatatttatgttgttccttcatactcctgtggctgttttctttttccttgctgtccgctgatgaatgttatgatatgcttgaaccttcgtcttttcagtcacgactttatgtggtcaataactgaactgcacaatggaactcccttttcaatctaagacgtgtttggcagaaacata

SEQ ID NO: 24586 - DNA, 2719 bp, Zea Mays
gcagattccatctcgtcgcccccttctccgatccgatcggtctctgatcgctgcgtttcctggttcctcaaggtttattggggaatttttttagcgagttacctctttcccctcttgtgggctctgcggggaaatttagggtttagtattggggttgatcggacgatctagtgtggttaggccaacgattctccctgctgtggctcatgattttccaatttcgtgtaaatccggttcggtgtggtgccttgtttttttttctgttttctttattagggctcggattctgagtcacgaaatgaatgatcatctgatcttgtagttttgggggacttcgtctctcgtaggagggattctttggctgaggtagtgaggttgccctcggattggtccaaaaacgaaaaagttagccctcttcctcaggtccaatttggctgcttctgctacacgatccattaactgctttccgatccgtgttctgtgatgtttgccctcttcctcagggccaatttggcaatttgtcagaacacacacaggcaacttttggggaactacacgtgtatggagttttattagtattccaggggcgtcacaatggcatactttcctgatgaagtagtagggtatatccttggttatgtaacgtcgcatcaggaccgcaacgcggtgtccttggtctgccgggcatggtacgacattgagcgtcatggccgccattcagtgcttgtaagaaactgttatgcggtgtgcccagagcgtgtacacatgcggtttcccaacatgcgtgcactgagcttgaagggcaaaccgcactttgctgaattcaaccttgtcccggcgggttggggtgccactgcaaatccatgggtggatgcgtgcgcccgtgcatgcccaggtcttgaggagctccggctgaagtttatggttgtgactgatgaatgcctcaagttgctttctctatcctttaccaactttaaatcacttgtccttgtttgttgtgaggggttcagtactaccgggcttgctaatattgccaccaattgcaggtttcttaaggaactagacttacaaaagagttgtgtgaaacatcaagaccatcagtggattaattgttttcccaagtcttcaacatcactagaatgcttgaatttttcctgcttgactggggaggtgaatgctgttgcactggaggaacttgttgcaaggagtccaaatcttaaaagtttaaggctgaatcttgcagttccatttgatgttttgtccagaatcctttctcgcacacctaagctagaggatttaggcacaggatcctttttacaaggcaatgaccctgctgcatatgccagtttatgtagagctcttgagaactgcacttcactgaagagtatatctggtttttgggatgctccaggcttttatgttcaaggaattttgtcaaattgcaagatcagaaatcttacatgcttgaatctcagctatgctacattgattcagagtacccagcttatcggtattattcgtcattgtaagaagctccatgtcttatgggtgttagatcacattggtgatgagggcttgaaggctgtgtccttttcttgtcctgatcttcaggagttgagggtatatccaagtgttgttgcaccaagaggtactgtgacggaggaagggttggtagccctatcttcgtgtcggaagttacagcatgtgctcttctcttgtgttcgaatgacaaacacggcgctgatgacaatagcaaggtactgcccacggctaacgtccttcagactatgcattcgcaagcccaggtcagcagacgccgtcacaggacagccactggacgaaggctttggggcgatagtgcggtcctgcagaggcctgaggcgtcttgccatgtccggcctcctcacggacagcgtgttcctgtacatcggcatgtacgcggagaagctggagatgctctcggtaacgttcgcgggggacaccgacgacggcatggtctatgtgctcaatggctgcaggaacctcaagaagctggtaatcaaggagagccccttcggtgacgccgctctcctcgcgggcgcgcacaggtacgagtcaatgcgcagtctctggatgtcgtcctgccagatcaccctgggtggctgcaaggcccttgcggccaccatgccaaacatcaatgtcgaggtcatcggtggggcgagctttggtgcgatggatggtggtgtcagcggtgcgaggaaggtggacatgctctacctctaccgtactctggctggacctagatgcgatacgccagggttcgtctcgatattgtgagctgtatctatggctactgttggtggcgttcagggaaacccgatgttcttaaccgtgcctgctgcgggctgtggctgtgctactgtctggtagtgtttcggaaacatgatgtttatttgcgtaaggtagtgtttggttctggaaccattttaagccttgttcagatattcatatacctcatggattggaagtgattagaaaaaaatatgaataattttgacttactatgtattgaaactcacttaatcccctctaatccatatgaaattgagatgaaaccgaacagacccttaatccatatgaaattgagatgaaaccgaacagacccttagatgaaatggctctgttttctagatcctaagaacagaatggcttagatgaaatggctctgttttctagaacc

SEQ ID NO: 24587 - DNA, 2911 bp, Zea Mays
tgcgtcacaaatttcagctgggacttcatttatgcagagtacgttgtagctgctggacatcatcatcgctcaattgtgtggcagatagcagaggattactcccattgtgaattcttgctcagactccccggatactgccctatgcctgctttccgtgatgtcattgatgttcctctggtggtcagaagattgcacagatctagaactgaggtgagaaaggaactagggatcgcaaatgatgttaaggtggtcattttcaactttggaggacagcctgccggatgggaactgaagaaagagtggttgcctgacggttggctatgtttggtatgtggtgcatctgatactcaagagctccctctaaatttcattaagcttgcaaaggatgcctacacacctgatttgatggcggcatctgactgcatgcttgggaaaatcggatatggcactgtgagtgaggctttggcttacaatctgccatttgtatttgttcgaagagattatttcaatgaggaaccatttttgcggaatatgcttgagcattatcaatgtggcattgagatgatacggagggatttacttactggccattggaaaccttatcttcaacgtgctatcacacttcaaccctgctatgatggtcccataaatggtggcaaggtagctgcacatatcctccaagatactgctgttgggaagaagtatatttctggaaagtgtagttgagcggagcaagacggttgcgtgatgccattgtgcttggctatcagcttcaaagggctcctgggagagatgtaggaattccttactggtattctcactctgagaaagaaattagtgttggcccagcgcccacatctcatgatatgaatggaagtgatgagtcatcgttcgaggactttgagatactccatggtgacatgcaaggcttaactgatactatgtcctttttgaagagtttatcagggcttgttggaaatgacttaagaagccctgagaagcaaactcgagagagggctgctgcttctgtgctctttgactgggaggaggaaatatatgttgcaagagcacctgggcgattagacgttatgggtggtatcgcagattactctggaagtcttgtattgcagatgcccatccgagaggcatgccatgttgctgttcagagaagtgaccctaccaaacagaagcaatggaagcatacacaggctagacaactagcaaatggaggagcagtaccagtgttacaaattgtatcctttggttctgaattaagtaatcgtgcacctacgtttgacatggacctttctgattttatggatggcgacaaaccaatatcttatgataatgtgaaggaatacttttctcgggatccatcccaaaaatgggctgcctatgttgctggaactatttttgtattgatggctgaactaggggtgcgctttaaagacagcatgagcattttggtttcttcatctgtccctgaaggcaaaggtgtctcctcttctgcatctgtggaggttgcttctatgtctgctatcgccgctgcctatggtttaaacattgctccaagggatcttgctttgctctgtcaaaaggttgagaatcgtgtcgtcggagctccttgtggagtaatggaccaaatgacatctgcttgtggagaagctaacaaactcctagcaatggtttgccagcctgcagaagtgaaggagttggttaacattccaactcatataagattttggggtcttgactctgggatacgtcatagtgttggtgggactgattatgggtctgtaagagtaggcacttacatgggccgcaagatgatcaagtgtgctgcatccaacctactttcagaattgttgctctcgtgtacgtctacgcaaccaggcgactcaagtcccgacgaatatgaaggacatggcgtcgacctcctgaaatctgaagcgtcaatggagtatctatgcaacttaccaccacataggtatgaagctgttttcgcgaaagaaattccggagacgatcactggcgatgcgtttttagagaagtatggagaccacaacgatgcggtaacagaagttgacccaaagcggtcttactgtgtcaaggctcctactagacatcccatatacgagaacttccgagtcgaggccttcaaagcgttgctaacagctgccaaaacagacgagcagctctcagcccttggagagctgatgttccagtgccactacagctacaacgcttgcgggctcggctctgacggcacagacaggctagtgaatctagttcaagaaatccggcacaggaagagctcgcgcgccggagggcccagcctgttcggcgcgaagatcaccggcggagggtccggcggctcggtctgcgtgatggggaagaactgcctgaaaagcagcgaggagatcctcgagatccagaagaggtacaaagcggcgactgggtacctcccgactgttttcgacggctcgtctcccggcgccggcaagtttgggtacctgaagattcggcgccggtccacgtcgccgtctgattgaagaagaagaagaaggaagagctctgctcggtcggccgtaccctcacggtcgtattgatcgtatcgtatcccacgcactacgcccaagatgccaataaatgggacagattgatcggcaataataatactagtagccatagaaaactctagtgataagctgcgaaacaacttgtatgtcgaagaaaatatttgaaaccatggtatctttgtggtcgatatctgaagtgagatgatgtgaatggctattggcgtatgttcatgtttgagctgtacggagaagaaaaggccgtatccaacaagagttcatctgcatagttacctcaaacacattatagaatgcactgaatataagagataagc

SEQ ID NO: 24588 - DNA, 580 bp, Zea Mays
ggcggcgcctccctacccgcggcacgccctcgtcggcgagataccaaatccgcggacacaagcacaaatctcccaatctgaaagctcctacgcgatgcagaggtaatagcgaacccaacggagaattcttaccggaggaggagatggagagagggtgccacgcggtgaatggcggctagtggccggatttgaacgacgacgagcaatcgggggcgccccaacagtcgatttccccccgacgcagccatgggagcatccaaggagatgcaacggatgtccccgaccacccttcgaaggattggatgcggcgtacttgggatttgaccgcggcggcgaaattcgtttctcctccgcgacggtggtggggcgacgatggcttgggctatggcttcaggggggtctcgcttgggtatatatgggcgaggaacgatcccgaggcgtggggatggggtcctcaaccgatgcccgcgcggattcctgggaggacgttgagctcgagcgtttgttgcgctaagatatgattcctgcaccgaggtgggagaacgagctgcgcaaggggggcccacacgtcatggactcg

SEQ ID NO: 24589 - DNA, 383 bp, Zea Mays
gcaacatatgcaaaattccctaactacccacacccactaagccaccagcgaagacccagccgtcgcgggatcccccgctgccggctccgccgccatcttcacaggatcctcagccctcggcgcagcagttggcgacgagccaccgtcggccgcagtggctgcgggggcatcaggggcgccttcgacagtttctgggggcggcgccggggcgacctccgacacagccgcgaccgggttcgactccgaatcaggcagcgcgctgttcaaagccccgaagtcctccactttctcgttacgcgccgcctgagacacagcacacagatttagcaagcccacatataacccacattcagcaacactaaacaagagtcaaacattacctg

SEQ ID NO: 24590 - DNA, 2886 bp, Zea Mays
gtttgaagaaagttatttcattttttttctgaacatatattgtttgattcgtaatttagtttacatggtatgacatcatttatttttggtttaaactttagagtatatatgctaattgtatgctctagatcagtttaaaaaggatgcagatgtctagtcgtaataggccaatctacaaactttcatagcctgaagtttatgaacagtgaatacacatcggttctaacttctgtgtttgtaaagatgctaaaagtattctcgctctattaatgtcttcttaggtaaaatagatttgatttacatgtgccagtattttggaagcataatagacactgagcttcaaacgtttggtcaggttcatcatttttaatgcaccaacaccaatgagccccttctcagcacaatgaaattgtttacattatcttcagggccagtctacaaactttcacagcctgaagtttatgaacagttaatacacatcggttctaacttctgtgtttgtaaggatgctaaaagtactcagactctgttaatgtcttcttagataaaatagatttgatttataagtgccagtattttgggagcataatagacactaagcttcaaacgtttggtcaggttcatcatttttaatgcagcaacaccaatgagccccttctcagcacaatgacattgtttacatgtatgcatttttttcttgctattgttatgaagaagctttatttctgaaatattgatttccaatttatgaaatattgattttaatttctgatagtacctttggtgcatttcttaacttctttattccagccttgggatactgtataatcttaccaaatgaacatagataggtctatgtttggtttatgttcattactgtcatttttctgttgtgtgctctgacaaggtggacttaacacaccctaatctactatgacaaacagagcagggcctgctgtagccaatgagttggatacagtggacacaatcacatcaattttgcggttcaattactttgcaaaaggttgtatatgcagcctctcttttgtagtcaactcttttataatggctaaacctagaatttcttttacgcaaactcgacatgatccaaatcagttgctcccagtcaggagctgatttgagtctagcgccaaatcacctcaaacttttatagcccaatttgtctctctgtgttggcatcatgagccatccgtcccattcagcttgatagcaggttatgacacagccaggcagaaacctggaaggattacccaggtctaaattggaccattgcatcagcacacatctcttgctctcgccctattttagatatattgttattttgttctcacacattcgtgctttgctccttgttttgcagttatgcatatatctaataaaagtggaaggataccatatgccacttttttctaatataagataacccttcatatttcatttttctcttaatgtaggacaactagatttatatactctccatagtagctgctcttgacagaaaagaaagcaacagaagtgccattcatacatgtcaaaagattaatttgcagcaataaattataattccacaggtctgaattgtgtgtacatacatacatgtaaaaaaataatttgcaaggacaggtaataattccacatgtccgacttggtgggttacacatcctactatccccttgtttgttttttaaataatctggtcggatgacaattctactatttgcttctatattttctccaaatctccccttctcttgttctgttacagcttgttaatatcacttgctgcagacaaagtacgtcaaaaggcaacgtctaagtaatatgttgatacacaaagcactgatccttagagacttcatccaacgagatagaaggttacatgtgcgttgttactatctcacgccaactcagacctctactggataacgttgcacaccatgcgactagacagacactaaatttgggtacctctacaaagcacttaatttattgtgcctctttcgaaaaaggttcttttctttcgtaattacctaaccactgctatactatactaacattttgaattcacatatacaaactcggcttcattactactgacggaacatccgaagcagaattttttgtgtcatggagatacaaattaaaagttagtttattgtaatttccaaaaaaacagcagagagcacttaacaaggcaagggagtatcaatttaaattatgctaccaaaattgtgttgaaaacttacttttacacaaatccttgaaattaacaaaaaaaattgtcttccttgttcactcactgagaacttgtggtgataacggtcccaggccagttgcgagcaacatatgggttgttctcgtgaaggaagttgaacacctcgtccaacagctgcaacagaaaagctcaaggtcaaatttcaaaaaaagaacgtgggcatgagcgtgcgcaatacactagtgttgggaccatgcttcgtcgccgaaggtcctgcaaaaagaaacagcttcggctgaagctgcttgaacatgatgccgaagacaccgttcacgaagcttcggagctacaacatatccgaagacgaagggtcgaaccgacttaaagatagaatgaccatttagcccataagggtctgagtcattgttgtaaacttttatgaggggcataattgtaattcctcatgagttgtgtcctgtgcctataaatagtgaacagtattcctttactgttcacggattcctgtaattgccaacgcatcactcgggaattattgtttgtcaaggcaaaggtataaatgtacctaaacattgtgttcagatattcaaaattcatttaacaagatatgtgaatgatgtcgtttattttca

SEQ ID NO: 24591 - DNA, 2395 bp, Zea Mays
cgccacggcggtcggcggcgtaagcataccattccggaagggacccagacgcagcctacacctgcacggctgcaccgcagggaggcgccatctgacccggccccggcggcgctggctgccccgtcgcccccagacccacccagaggaatcacgcagatattgccttcccccgtggcatgcacccaccgacccacatgcgcgcgcgcgcacccatcgggaattccggacccgattcgctttcctatttcattccactccacccgcttttgggtgtgtggacgatgcatggggagagagagagggagcgggagagtctcctcctcctccccgaccggagcgccggtgccatggaagggggcggcgagcaccaccacccgcttagcgtattcctccgggacgcgaggctcgcattcagatgggacgagctcggtcaggagatcatgaggatcgcggtgcccggcgcgctcgcgctcatggctgacccagtcgcctccctcgtcgacaccgccttcattggccacataggtccagttgaacttggagctgtaggtgtatcaattgccgtgtttaatcaggtctcaagaattgcagtgttcccacttgttagcgtcacaacatcatttgttgctgaggaggatgctatgtccaatggcagagacaatgacaaaatacatcaacaaaacgaacgcaatgtttcggtcagtgaaatggatgaactgattcctcctgaaggggctagtgccagtaccagcatatcgtcttttgaaactgattcatgtgaggtcagtgttgagcagaagaggaaaaatattccatcagtctctacagcactactacttggtggggtgcttggcctacttgaaaccctactgcttgttctctctgcaaaacctatcttaggctacatgggtgtaaaaccggactctgcgatgatgaagcccgcattgcagtacttagttctcagatctcttggtgctcctgctgttctgttatctctggcaatacaaggagtctttcgcggatttaaggatacaaagacgcctctatacgcaactgtggctggagatgcgatcaatatagttttggatccaatatttatgtttgtgttccaatatggtgttagtggtgccgccatcgctcatgttatatcacaatatttcattgcatccatactcttatggagattaaggttgcatgttgatttgttgccacctagcttcaaacatctgcagtttggccgatttcttaaaaatggttttctgctacttgcacgagttattgccgcaacttgttgtgtgacactatccgcttcaatggccgcacggctaggttcaactccaatggctgcattccagatctgcttgcaaacctggttggcttgctcacttcttgccgatggattggcttttgctggacaagccatacttgcaagtgcatttgctcgtaaggactatccgaaggccaccgccacagcttctcgtatcttgcagctggccttggtcttgggacttctcctaagcatacttcttggtgttggtctgcgcatagggtccagattatttacatccgatcagggtgtactgcatcatatctacataggaataccgtttgtctgccttactcaaccaatcaacgctctggcttttgtttttgatggtatcaattacggagcatcagatttcggatatgctgcctactcaatggtccttgttgccgttgtcagtatcatttgcatcctcactcttgaaagttatggcgggtttattggaatctggatagctctggtgatctacatgagcctccggatgtttgctggattttggaggatagggacggcacaagggccctgggcttatcttcgcggctgaacatagaggcagagctagtaacctgactcaccagcacgacgagcacatggtttattattgttcacggaagtggcagtccttgatgtggtctcgtaaatatgccatacggactcagggtctttttggtttgctacctaacttgtcatactttgcctaacttttctgcttaaggttagttcttcaattcggacaactaaccttaggcaaagtgtgacgcagttagccacgagccaaacagtccctcagttcgtcaaacttaggtctgtgagtttggcggatgtgtaggcactcacatcgttaaacaaatctgttgtactggcctagattgtgacagatgcaaaattatgtcatggttggctactatgcgtagcagggctgcaatacatgtttccatcaggaaggctgtcacaagtttaacacacttgttgtaccaaggcgtgtgaactatagctattttttctgtcctaggacaaactgtgccacgacgtgttgtagctatttttctgtcccgtattcatatgagcaga

SEQ ID NO: 24592 - DNA, 589 bp, Zea Mays
gatccatcactgttggtcacatgtaggtcacccttgtgaagatggtcaatgaggccaccgcaaacattccggggtgggaggacgatagatgattgatggtctggctgagttgtagtttattccagcacccagctggactgtggccacatttctatagtttaacataggttagtgtccgggaagaaaaaagatatattaacgttgatctaggagtttgatcattttttgtattgtaagacagaaatatagggttttggttactctggtccatgttgctgtgttgtaaagcagtgatgtagtttagattcccccaagccatgccttgagagatttgtttagtagtatcgtcttgggaaaacttctgccgggtattgacaacatcctgctgagttctgactgctgagtactatgactggaaaccacctaagccttcagaattaatccaaatatacttggacttgcactttcctacatataggtgtaatatggtttgctttgaaacctatgttttaatttgttgtataacattatttttgcaatgctcataatacaaatgttgtctcaaggcgagcctttgcgcacttggagc

SEQ ID NO: 24593 - DNA, 1390 bp, Zea Mays
ccttgctgacataagtttccttatctctgatagctagattattggataacttgtcgatggcacaaaaagtagcacgcggataaccataacaaaggggacagaaacaaagcacaaaagttgtaggccccagtacaaaagggatagaatcaatgactgctgctgacgcacactacactactagtactgtcataaccgaactaaaacagtttctgagaggaagcatcgcgattgccatggaagctgggagaatggatcagccatttatggctgctatcaatagccagcctttcgtggaggatattgagccagtgaagaaagccagtggggacatgcctgcgacaacaggaagcggatgcttcgaatgcaacatctgccttgattttgcatcagaaccagtggttactttctgtggtcatctctactgctggccttgtatctacgagtggctgcgccctggggtggagtcagctgccagcgacaacagcagttcggcaaggcggcaatgtcctgtatgcaaggcaacactctcaacggacacccttgtgccactatacggccgtggaggcaactcaaagaagtcacttgatggcatggccatcccgcgccgccccatggtacaccgggagactgttgaggagcaacagaatgcacagagcaatgtcaatgaccagcactaccaccagagcatggaagacaactctcagcgccagccattgctgcaagcgcaccaccatcccattcccactgggtttgacttcatctaccctccagcaccagtagggcgtggcttgatccactcaactgccggaggggtgctcggagggatggcagagattgtgcttcccttggcgctccgtggccagatgccagcgagcttgtactacacgaatccataccatgctgcgacgcagaacgtgaaccccaggctgaggcggcatcagatggaaatcgagaggtccctgcaccagatctggttcttcctctgtgtgtttgtggtgctgtgcctgctcttgttctgagacaagactattctatacacctctttgtagatattgaaagtgggagggggatactaatggatgatgcgtatagtaaacagggtaatggtctgtgtcgacaggcatgtgcttaagcatgctgatgtagagttgtaatatgatgagacacggaggtgaaatgcatatttcattcttctctatcactgtcggcctgttaggttgcctacctgacatcttcatgttaggtttagcatcatctgttgtgtattggttggtgtcactgccaagggccttttgatttgtatataaatagaaaatgatggtttgtctaccaatttctgctctgtatcctctttaatccctgttccaagattgacacagcaattttgtcc

SEQ ID NO: 24594 - DNA, 416 bp, Zea Mays
cccgcatcctgaggaacctgttgcattcgctccacgtcaaggaggttccaggaaccaagcaggtagcgtgctctcacctctcagtcactgtatatggctaaatgttatcatgagatttaagagaaaaaaaacttcgcagttcacaagtgattactcaatgcagctcaatgcttctagaattaaagtccttcaagctcaggatgatttggtaacagatatgttgaagtcagcaagcaaagagctactgcgcataagtagagatcacctcacttacaagaagcttctcaagacacttattgttcagagtttgctgcgcctgaaagaaccagctgtgcttctgcgctgcaggaaggaggatctccaacttgttgatttagttttggagtctgcaaggaatgagtatgcaaataaagcaa

SEQ ID NO: 24595 - DNA, 1023 bp, Zea Mays
acggcacgaccctcgctcatgttctcatcttcccactccttccatttgtcctcttcctctccctcccacgccaccgtcaacgagctccagagccccgcaccgcgccgcccgccagcaaccaccccctcctcacccagatgccgcggctgccgggatcgcagcctgcgccggagcggcgactcgccgtgctcctgtcccacttccacccgtgttgcgaacctccacgcaccatcgcctgcgtcgccagcgtggagtgcctccggaccgcagccgaggaggaggccgagatgcagttgagcctctccacgtcgccctgcgcaggaggtgagaaggggggatcctcgggtggcgggcactgcgtgttctgcaacatcgtcgcgggcaccgcgcaggccttcaagctctacgaggatgatatgtgcttgtgcatcctggatgctaaacctctaacaagcgggcattcccttatcattccaaaaagtcattatccatcagtgcaaacaacaccaccaactatgcattcaatgtgctaatcaacaatggagagaaggcagggcaagttatttttcatactcatgtgcacatcattccacgtagcaaagatgataacctgtggtcttcagagacctactcaaggagccatatttcacatggccaggaaactacgcatcttgttagcagcatcaaggaaataatctcttcttcccccgaagactacagtactgtaatgtcatccacgccaaaggaactctgaaacaaattgaaaagaatgtagacaaccgattaaaagggcatcttttacttttcctctcgttcagcttcaagagcattgctgcgagatgaattgatgtacagctttgtctcagtcatgccttgaaattttgatagatattgataaagtactggttttagagaaggcaaatgcggtagatcctaaggtcgtagttggtacgtgacagtgatcaggaaccatcttgtgaagaattgtgaagatttggtttctggcagttggttggttaaact

SEQ ID NO: 24596 - DNA, 2274 bp, Zea Mays
taagggtctacaggatcttatgaccttatttaccatcgctctgagttcgcaaggcataaatattatggttcttgtgaactcatcctcctacatgtaacatgtcgagtgaagcccaagcctggcccaacaaggagtcatgttctttgcagaacaacaatagatagatgccatttaaactaagttgatggttgtttcaatataacacttgaaagaacagacccaaggatgtaaactcaagtgttactacccctcatgcaaaactcaaactaacaagaagatggtctccccaaaggcagttgctcacagaaaatttttgggcaactcaatctggtataccatcacatgtcaccaaggtgctatttcaaatcaaaacaagttaaaaatgtacatctaacaaagataccattgtcagatctttatacaacacaacacaccaatgttgctattcaaaaactgttgctacctgcctagagcccagttctccaacctttccatgtccggggctgggtgcctgggtctgcgttaatgctggacagcagcttgtgattgtttagtgtctgaaaactctagcaaaagtctggtggcaaacaaggttctcaatttagacatatcactgtgtggtagcgtttgctccttaattctatttctaaaacatctgcttattggtgtccatgtgctggttcatatgcaatgatgttctttgtttgtgatggaatcttatgattttgctaaaatgtgcattgttttagtggtacttccaaacagtggccactaaccatcatggtgaggatgcatcatcagtagcagtcagaagtaagaaaggcttaaagacgattagacataccactatgtttatttactatactattattttgatgtactaaatgatttcatttgagttattttggtgttttgatggcatatggaggcctccaagattttttgactgaaaagaaagatttaacaattacattgatcaggaaccggattctcccattatattctttggatccttgcagcccatatttgatttcaatggctaattgggttattggtcagcttgcgatatgcctaccagaggacatgagttctagtatttatcagtccttaatgaaggcgttgaccatggagtatgtggaggacataacttgttatccggtttgtgcctctgcttctggtgctattgcagaactcatcgagaatagttatgttccacctgactggctcattcttctgcaagtggttctgaaaagaataagtactggagatgaaaatgagtctgctcttctgttcaagcttctgggcacaatagttgagggtggacaggaaaaagttgtttcatattcctgaaattgtatccaacattgcgagtactataatggagctcctgccccctgtcccagatccttggcctcaggttgttgaacagggtttcacagccctcgtagcaatggtgcaagcttgggagagctctgcaccagatgaaaacaagacacctaaaaagaggttctggcagtcaggccagtctgctattgcccaaacaatttcattactgttacaaaaagcttggttgtttcaagctgacaatatggagggctctgcattaccacctctgtcatgcgtaaacgatgcttctgtgttacttgagtttgtcatgagttctgtcacttgcatggaagaaactgaaagtctgaaggtctttgagctggtagctacatgggctaacgctgttgccaactgggactcctgggagatggaggatcagggtgttttcaacacaattaaagaagctgtcaatttccaccagagatttgacctcgacggtctcttcctgaaaacgcactttgtgagatgtcattccactagctaaaagtttgcagaaatggcaccatcaagatcggtctggagaccaacaagatcatggacttcatcaagtttgatgtcggcaacgtggtcatgatgaccggtgggaggaacaccaggcgtgtaggagtgatcaagaacagggagaagcacaagggcaacttcgagaccatccacgtgctgcttagagctttttgctatgtctagttttctcctatttgttgtataggaaaacatagaatggaattcaaatttggtggccgcaaaatatggagacttgaattcatataaagttaggcttaacattagtgcaaacaattgtattttagtttagatttagagtacacttatgtatgtgttgtttgacaatgcttatttatgatatattgaatggtacttatttatattata

SEQ ID NO: 24597 - DNA, 3034 bp, Zea Mays
acggttttcatgtgctcggtgacggacctgacggtacccacccccaccccgtcacatgcctgggctttccagactccagagggccacgcgaaatgaaacggaactgggacagcaaaggaagatacggcgcgatattttagattacaggagagtaggagaccggcgccgaaagctccgtggcctcgtctccttccccacttcggcctcggcagttccgcgtgccggccggagcctcgtctcgcttcgcatctcgcacttcgcgccttcgccgctgcgattcctcagcagctcctcggccgctccacccacccctgcgccggcgagatggagctcaagcccggcatgtcggcgctcgtcaccggcggcgcctctggcatcgggaaagcactttgtattgcttttgcaaggaggggtttatttgtgactgtcgttgatttctcagaggaaaatggaagagaagttgctacattagttcaaaaagaaaatagcaaatttcacggagatcttagaattccatcttcaatatttgttaagtgtgatgttagtaatgcagataatcttgctgcttgttttgagaagcatgtacagacatacaatggactagatatctgcatcaactgtgctggaattgctaataaaacactagtttatgatgatacatctgatggaactagaacatggaggcatgctgttaatgtgaaccttgttgctgtcattgatggtactcgcattgcaagtcaaataatgcgaaaccaaaagaagcccggtgtcataataaacattggttcagcggcaggtctttatcctatgttcctcgatcccgtatatagtgcggcaaaagggggtgtggttatgtttacaagatcactttctccattgaaacgccatggtgttcgtgtcaatgtgctctgcccggagtttgtccaaaccaatatggcggaacaaatgagccgcaaagttatagattcatctggtggatatttggagatggaagatgttgttaacggtacaccatttctgtaatctagtgttattacaggactattagctttgtaaccatattttatgtgccatgatgatcaatgcaagcgtcagatgaattgttttaaacttctagtgttatgttgaggtggggtgttttaaagatgaactgcacaaaaacatttgttatcactgtaaaacatgtgaattccattgatataaattcaataatgtacatggtaggttgtgtaacctgcatgaataggccagttctgtttctgatcttgagaactttagcaagtgatggttaaccaaccaaatggtacggtatctcctggtagatatggttcagggatcttgtgatgtcatatttaacacaaacgtcagccctccaccccacctatttttttctattttttggcatcaggcacatttgagcttatacaggatgagagcaaggctggtgcttgcctttggataacaaaacgacgagggatggagtactggccaacaccagaagaacaaagaaagtatatggtgaatcctaacaaatcaaaaaggatgctgacaaacaatatatatcctagcatccgaatgcctgaattctttgagaagatagttgttcacacactcagccataattttcgcaatgctacaagacttgagcgtgtgcaactgagatttcctatcaaagcgcatagtgctctggttaaaataatatatgctggcgtaaatgctagtgatgtcaacttcagttcaggacgttattttagtggtaatcctaaagaaactgcttcacgccttccatttgatgctggttttgaaggtgtgggaattgttgccgctgttggagattcagtcagtcatatcaaagttggcactcctgtggcccttatgacttttgggagctatgctgaattcacggaggttccagccaaacatcttcttccagtgccaagaccagaccctgaggttgttgcaatgttgacatcaggactgactgcatcaattagtcttgaaaaggcaggacaaatgacatctgggcaagttgttttagttacagcagctgctggtggaacaggacagttcgcagttcagctggcgaaattagcaggcaacaaggttgttgccacatgtggaggtgaaagtaaagctgaacttctggcttccttaggagttgatcgtgttatcaattacagaaatgaacgagtcaaagatgttctgaagaaagagtttccaagaggtgtagatatcatatatgaatctgtaggtggggaaatgtttgacttgtgcttgaatgcacttgcagtccatgggcatctcattgtaattggtatgatctcccagtatcaaggagaggatggctggaagccaaagaactacactggactatgtgagaagattctagctaaaagtcaaactgtggctggatttttccttgttcagtatgctcacttgtggcaagatcatcttaacaaactttttgacctgtatgcctctggaaagctaaaggtttccctagaccccaagcaattcttgggtgttgcttcagtcgtagatgcggtcgaatatcttcattctggcaagagtgttggcaaggtcgttgtgtgtattgatccatcatacggtcagatcgttgcaaaattataatccatggacatgatgcgcattgtcttccatggtcacgtaggttattgtcttatagttacacatatacatcaagaccgtattttcccagcgggtgacaaatgaataagggaacatgttggtgtatagtttagtttcatttttccaaagtgtaagatgcacaactatactgaaggacaagcatgggcatggaaatcgattaagtttctaatcccgtgcagtaggatatgcattcgtgtggcctcgttccacgttgtatgtatacagtatatattatataacttgtctcagtgccacatgcttcaattcgaaccggtaacaataattcaaacagctcatgcagatgcattctcaaatacacagcttggaacatcgatattttcttttgaagaaaatttgtttgtgc

SEQ ID NO: 24598 - DNA, 1589 bp, Zea Mays
gcggggacacgtgtacctatcgtctgttttgtgcccaaagttccaataaagtattgttgaaattcgatgagcaaaaccatggaccagcaccgccggtatcccgttcccaattccacagatttccgctccccactccgcactcccagtacttaaaccacctaaaaaccaagcaaaatcccacctcccgaaccctggactcatagacaaggaattgggagattcgatttctgctattcagcccacgcccactggttcaaccggtttcttcaaatctcaggcttcaaggccgcaacttttcccccgttggggttggacttggacagctgccgtgcttgggaggcattgccggcaacgggaggtccaatcatcgatccttcggtagatagattgtatataaggaccacggttcagattactgtcaagcatgtctctactttcaaagttgcgcttgatcaccgtggatgttactggtacactgattgcttacaaaggacaccttggggattactactgtatggcagcaaagtctgctgggatgccatgtcctgactataaccgcatgcatgagggcttcaagcttgcatacactgagatggcaagacagtacccttgctttggatttgcagctaagatgccgaacatcgaatggtggaggacatgtgttaagaattcattcgttaaggctggctatgattatgatgaagagacatttgagaaagtcttcaggcgcatttattctgcatttggctcctctgcgccatactcggcgtttcctgattcgcagcccttcctaaggtgggcacgcgaaaagggactcactgttggcatcgtcagcaatgcagaataccgctacaaagatgtaatcctgccagctttaggattgaatcagagctccgaatgggactttggggtgttctcaggtgtcgttggcgttgagaagccagacccaagaatttacaagatagcgctggagatggcaggaaacgtcgctccggaagaagcgctccacataggtgacagcatgcggaaggactacaccccagctaggagcatcgggatgcatgcgctgctcctggaccggttcaagactgccgacgctgagagctggaggcagtcaggcgccacggtgctcccggaccttgtcgccactcaagagtggctcaccaaggatcagaatgacgaacaggaggaaacagtggcagcacgagtgctgaagagaatgtccgaaaagctatagatgggggctttaaccatgcattaattctacgagtgttcctttatattatctagctatggactgaaggtccaaaagcaacttatgctgatgagaggttggtgacgattcttggctactggctactgtaattagcttgagctactattctggttgcagcatctgtggctgaacacgagtaccatatctgagtgtcataagtcatgttgcgaagaacatgagtagcatatttcagtgtcatgagtcatgttacgaagatctcgagttgtcttacattcacctgcgtggagcagtagaggagcaagtggaaatgaatctgaacatgagcacaataataaaggacgaagcagtgaat

SEQ ID NO: 24599 - DNA, 1960 bp, Zea Mays
cgagagaaagattaagaatgcaacgaaaaatttgttggagccgtagtttttggtttgtggataagggtcttttaagtcttcatatgaaactatccttttgatatacagctgaaggacaataactatcatggatgctactgcaaattcagatgtgcaaagggctgaggaatttaaacttaaggcgaatgatgccttcaaggcaaacaagttctcgcaggctatagagctttacagtcaagccattgagctgaatagttcaaatgcagtttactgggcaaaccgtgcatttgcacacacaaaattagaggaatacggaagtgctgtgcaggatgctacaaaagccatcgaaattgattctagatattcaaaaggttattatagacgaggcgcagcttatcttgccatgggaaagttcaaggaagccctgaaggattttcagcaggttaaaaaaatctgcccaaatgatccagatgctacaagaaagttgaaagagtgcgagaaagctgtccaaaagatccgttttgaagaagcaatatctgctggggatgatgagaggcggtccgtggcagactctattgactaccatatcatagaagtagagccacattatgcgggaccgagaattgatggggaagaaataacgatagagtttgtcaaagcaatgttggatgaatttaagaagcagaaatgcatacataaaagatatgcttaccagattgtgctaaaaaccttggatttgctgcgatcgatgccttcccttgttgatgtggatgttccaaacggtggacattttacagtttgcggtgatgtgcatggccagtactttgatttgctcaacatatttgacctcaatggccttccatcagaagaaaatccttacctcttcaatggcgattttgtggaccgaggatctttctccgttgaagtcatactcaccctttttgctttcaagtgcctctacccaaaagctatgtaccttgcaagaggaaatcatgaaagcaagagcatgaacaaaatatatggctttgagggggaagtgaggtcaaagctgggtgagaagtttgttgaactttttgctgaagtcttttgttggttacctcttgcccatgtcatcaacaacaaggtctttgtggttcatggagggctatttagtgttgatggggttaagctttcagacattaggtccattgatcgtttttgtgaaccacctgaagaaggtctaatgtgtgaattactatggagtgaccctcagcctcagcttggaagaggtccaagtaaacgtggtgttgctctttcctttggcgcagatgtgactaagaagtttttacaggaaaataacctggatcttattgtccggtctcatgaagtaaaggatgaaggccatgaaattgaacatgatggaaagcttataacagtcttctctgcgcctaattactgtgaccagatgggcaacaagggtgcatttattcgcttcacagctccagaaatgaaaccagatattgttactttctcagctgtgccacatcctgatgtgaagccgatggcatatgcaaataacttcctcaggatgtttcaatgacggaatataacaacattgtttagcaatttttatcagatgagtctgttgtgtgtcagctcccaaatcacatttcttggctaggtttaagtatatgctcccttgtacaacaaatcaaatgatgcaagggattcaactgtcgatttacttggatggtacatccatttttgtgcacgagttgtgattcttgtaactatccgtaaagtcttagatcattagattttagtttacttgtaaaattgctaaatcgtcatttcctgtcttgcttatcagtgagttacacacgtttagtgcttttatcaaattacatgtgtttcagcggtacaattcctaatatctgagtaatccttccattttaacccacaatgttcttacatagtttgg

SEQ ID NO: 24600 - DNA, 2527 bp, Zea Mays
gtacatgagaagaaacaagcgcaaatccctgaagcaaacggcgacgcaagtactcacggccagccgtcaacggataaacccatggaccacccaaaaccgcttgctataaacccaaaccggcaaaacatcacctcatcatcatctgcagtcctcttacctcttactatacaattccttcgtttccaacgacccaacggagcctttctcgctgccactgccacgcgggtcccggacccgcacgtcatccacgcgcgtcgccgactcaggagtcgataacgccctcgctttctctgctttccttcctccggttccattccaagtccacctgcccctcctccctccctatctatcctgtactctctctcagtttctctctccccccgttctccgttccacatcgcgtgcgcattgagacgacgagtttctagagcgccgtaccgcgcacggctcccgagccccaccgcaaagcgccggaatcgtgagcgcgtccggcctcgcctagctgctccgcgccgagaggcggccgaggaggacgggcgatgtacccggtggtgacgggcacgccgccggcgcggctgccggcggcgtcgcgggtggacaaggccacgagccacctgctgcagggccccgactgggccgtcaacctcgaaatctgcgacaccctcaacgccgaccgctgttattggagacaatgatgaagaactgtggtgaatatgttcattttgaagttgttgatcagcatgttttacaagagattgttaaaattgtccagaagaggcatgatatgcaagtgagggataaggctttgttacttctggattcatggcaagaggcatttggtggacctggtggcaaatatccacagtactactggtcatacattgaactaaagatgctcctccaatatttactcctcctgcaacacatcaggcatatggttcacctagatatccttctggaagtctaaatgagagaatcacatctgaagctggaacgttgagctttgagggcttgaataatattagaaatgcaacggaactgctgtatgatatggtgaatgctttgaaccctgctgaccgcatggcagttaaagatgaaattattgcagatcttgtaaatcaatgtcgttcaaatcaacaaaagctcatgcagtttgtcagttccacaggggatgaagacctgctaaagcaaggactagaattaaatgatcgcttacagagtgtcctcacaagacatgatgctattgcttctggttctccattaccagttgagacaccgattagagaaccacagagagaggatccaaatcctgagccatctacaccaattacacatgataataaggctcaagttgaagaggatgaagatgatgagtttgctcaaatagcacgaagaaaaaacaaatctgtgatatgcggtgatgaggcatcatcgagtgctggtgatcaagccctggtacctgttgatccagcactttctgaagtttcttcggttgagagcaatgcaatagtacctctcggcgcaacttctgttagtggaaccaggacgaaggagcaggatatgattgaccttctcagcctcaccttgtacagtcctgaatcatcagaagactcttcaactcagaaccaaaatgggagtcagccgagtgtcacatcaaatggatcagaaacactgccaagctatcagcctgctgtggcgaacggggcaaattaccctgccaacacccaggtttatccaacaaatcagggatatgttccatacaataactatgtggcaccatgggcccaaacgggaccggttgcacagcctggggcatattcgactcaaacccagcaatatgtgtcgagcaatccggcacccccatgggctatgcctgcaagtgccaattcagctaatcctttccagcctgtgacataccaaacgccaaacactcctcctgctgcttctgttgccccttcagctgctccatcagcgcaacatgttccatctccagaaccaacaccggtgcaaagttacaacttctctattcctcaaacatacactggttcgaacgtggctacaaatgctcgggtgaacggaaatcagcggccaaaagaaactccagtggcagcagccagaccatattacatgccggacaatttgttcggagacctgatcgacgtgaagagttttggcgccggaagcaagatcagcaggtctaccagcatgccgagtccaaagggtggtggccagcctatgatcggtagaaacaaataggcctctgctgtttaagatagggatgagcatatatttagctggtagccactgtcgtttggtttgatgtaaatttgctgtcttttttcacgtgtcaatttgcggatttgttactttggtcaatttcggagttgctgcatgtttaactttactagagaattgtagagaagtcattgctccagatgatcagtgacatcattatcgtgacggtttgatgacggaaaccattgcctgcttcgtgttttccattctcatgtgacctgatgatgatcat

SEQ ID NO: 24601 - DNA, 1960 bp, Zea Mays
tttgatttcgctcagaaaagtagaaaacgccagccgaacacaccggtccgccgcccacgccagcgctgagctcaccaggaaaccgtcttcttccactggcgcgggctaggagcgtcgccgccgcgtcgcggttatgggtacggcggctgtcgtggaggacacgatacgcgtcgtcctcacctgcctccctgatccgcccttccgcaccaccggttcctcccgtccctaccagagtcccagcggcggcggcggcggcggggaccgcatcagccgcctctcagacgcggtgctctctaacatcgtggcgcgtctccccgccaaggacgcagcgcgcactaccgcgctctccaggcgctggcgccgcgtctgggcctccactccactcgtcctcgacgactccgacctcctcgtcttccacgacgacggcggctgctctacgcccaactgtactggctccgggtcctcgctgcggggggagtcgaggatctcgtcctcgtcaaccgcccattacccacctccgtgggcctccccatcgacgtcctccacctcgcctccctccgcaccctctacctcggtttctggtgcttcccggacaccgccaccctcccgcgaggccgcgccaccgtgttcccctgcctccaggagattggactctgcgctaccgtcatccacgccagggacatcgaccacctgctcgcctgcagccccgtgctcgagaagttcgccagcatcaccagcatctacttcacagaccctgtccggatccgcagctgcagcctccggtgccttgtcttctgggagtccctggccaatgagctcgacttggtcgtcgccccgcgcctccagcgcctaatcctgtggcagtcgcgccaatggatgatcggctccgtccatttccgcagcaggatcaggattggctccgccaccgaactcaaggtgctcggctacctggagccaagcatccaccagctcgagattggcggcaccataattgattggaacaaagatgaccccatctaacatggttccaagtgtcaagatcttggccttgaagatgcagttcagaatccgcaaggaagtcaagatgctgcccaccttcctgagatgctttcccaatgtggagacattgcatgttctgtcacatgaaactgatgagcaaaatggcaagttcaatttgaagttctgggaggaggttggctccatcagctgcctagagacacgcatcaccaaggtggtgtttgacaaattcagaggagagcgttgtgagctcgcgttcctcaagttcgtcctagagagggcagaatcgctgctgaagcttgtggttgtattggccaatggagatcaagcctcagtggatgagatgcttgctaagttgaagtctctgaccacggtgaaacgagccagcgatttccctactctgttggcagttgcccgtgagggtgacagcgcctggtactttgagagagcatccgatctttctgttactgaccccttcgatttgtgaagctcaaggcgatgacatattccatgaccaattctattgttctcctgagccaatcagttgttctttgtcattcagggtatacttgctaggcattccctagaatcttgtctcgtcttgtgttgactgtaaatgtgagtacagttctgagtgaatcaggagaggtatatagtttatggaaagcgctgcttgacatttcgctattgaaaatataggttctgcatagctgctcttgagttgactacctccaaatgctgtcactggctagtttctcagttgtgatgtactgcatactgggcatagttggaactggaaaatatcgtattggtaaccccagattctgtgtatcgttgatatgattctggtttatgtaatttcttgagcctgacgtttgattctactcggttaatttccattgcttgtattgaagattgtacctgcacagtgaagaaagatatg

SEQ ID NO: 24602 - DNA, 3016 bp, Zea Mays
ggagccacgcccttgcccaccggcccacgccaatcgtccccttccctctgcccatcccaacccaacggcgatggccgacggcgacgagcgagcgaccctaccagcgccgatggcggggcggcgatgtcgtgcctcagtcgctcgccccgcggccccgtttccagcttccgctgcacagcccagagctccccccatccgacccgcctccgctgcttgcagcaactcgtcgcacgggtcgccggggagcgctgggctgccgttccgtcttcttggcgcgtcccgctagatttgtcgcgttgccacttctctgatgtctagatctgcggcgtgatgagttgtggctgagagctgagatgcccagtgcgcattgtgcaatcagagtctgctatgtgcctaactgaagatttcatcatgtggactccaatgcattatacgttgttgaccttgctgagattgattgcaatcatcctattcttcatatggcgtatccggcatccgcatgccgacggaatgtggctctggtggatatccattgtcggagatttctggtttggtgtcacttggttgctaaaccaagttgcgaagctcaaccctaccaagcgtgtcccagacctttccctcttgagacaacagttcgatctccctgatggcaactctaatctccctaggcttgatgtttttatcaacaccgtcgatcccataaacgagcctatgatatacaccatgaactctatcctgtccattcttgccgtagactacccaatcgataggactgctacctacctctcggatgatggagggtccataatccattacgagggcttgcttgagacagcaaatttcgcgacactctgggttccattttgccgaaaacatagcattgagccgagagcccctgagagctattttgctgtgaagtcgcgcccatacactggaaatgtaccagatgagtttgctgatgatcatagacgcatgtctaaggagtatgatgagttcaaggtgcgtttggatgcactttttactaaaatccctgaacgctcagatgcacacaatgcagaggccaaggaaggtgtaaaggcaacctggatggcagacggaacacagtggccaggaacatggtttgaccctgctgaaaaccacaagaaagggcaacatgctggaattgttaaggttatgttgaatcacccgggcgatgaacctcggtttggtggaccagcaagtgctgaaacccctctggacttcagtgccgttgacgtgcggctcccaatgctcgtctatatctcccgtgagaagagtccaagccatgaccaccaaaagaaagcaggcgccatgaacgtgcagctgcggatctctgcgcttctgaccaacgctcccttcatcatcaattttgatggtgaccactacgtcaacaactcacaggccttccgagctgcgatgtgcttcatgctggaccggcgggatggcgagaacaccgcttttgttcagttcccgcaacgctttgacgatgtcgacccaacagacaggtactgcaatcacaaccgtgtcttctttgatgccaccttgctcggcctaaatggcatccagggaccctcctatgttggcaccggttgcatgttccgccggatcgctgtctatggtattgatccacctcgttggagaactgatgccttcaagcttgtggacaaccccagcaagtttggcagctcaatgctcttcatcaactccataccatcggctgcgaaccaagaatggtccatggcgtcaccaccggcacatgaggagtcggtcatggaagagctgaataatgtcatgaagtgcgcatatgaagagggcactgagttcggaaaggaaatcggctgggtgtacaacattgctacggaggacgtggtgaccggcttccgagtacaccggacagggtggcgatctatgtactgccgcatggagccggatgccttccgtggcactgcaccaatcaacctcacggagcgcctctgccagatcctgcgctggtcgggcggctcccttgaaatgttcttctcacactgcccgctccttgctggccgtcgactgaacttgatgcaacggatcgcctacaccaacatgacagcctacccaatctcatcggtcttccttgtgttctacctcctcttccccgtcatatggatcttccgtggcgagttctacatccagaagccgttcccgacatacgtgctgtacctcgtcgtcatcatagcaatgacagagctgatcggcatggtggagatcaagtgggcaggcctcacgctgctggactggatccgcaacgagcagttctacatcatcggggcgacagccgtgtacccgttagcgacgctgcacatcgtgctgaagctagtccttcgcgggaacggcgtttcgttcaagctgacggcgaagcaggctacgagcgccgtgaacgagaagtacgctgagatgtacgtggtgcagtggacgccactgctgatccccacaatagcggtgatcgccgtgaacgtcggcgcgatcggggcggcgatcggcaaggcggtcgtcggggggtggtcgctcctgcagatggccgacgcgtcccttggactggtgttcaacgcgtggatcctgctgctgatctacccgttcgcgctcggggtgatggggcggtggagcaagaggccctatatcctgttcgtcctgttcatgattgggttcgctgtagtggcggcggtggttgttgccatccatgctgcgcgcactggttctgttcggttccattccggacattcaggcggtgctagcttccctacaagctgggggttttagatcgcgttcatcattggttagtggcattggttgcaggttgttccattagctgagagcttcttcgctgtggagttcctacttgatgtaaatcgtgcattgattgtacatgtttgttcagtggatggtttgtaaggaacaaaaaatggtggtaaagtgaaagcacatttctgcctcgattttgacatgtaccggtacgtgagtg

SEQ ID NO: 24603 - DNA, 1926 bp, Zea Mays
cttcctccacatcgatcccctcccccctccactcgtctccaaaatcgccagcgagagccatgccgcctcctcccctgccctcgccgagcctgaccgactgaccccacctcgccactgttctttcccttccacctgggccccacagcgcccccttaccgtcgccaccaaatccccaaatcccggaggcacgaggagggaattcgtcgcctgaccgatcggccgatccactgccgtcggcaccccaatccgccgctgccgccatgttcaacaagatcatcaagaggggaaaccgcaagggcgcgcgcggggacaacgcggaggccgccgcgcgccccgcagcgccctcctcgtcctccgggagcggcggcggcggcgcgggggcagccgcgcccgtcaccgtcaaccacgcctcccgggccacagcgccttcgccgtcctcgcccacttcgccgcacgtggcgccgtctgcgcttgcgaccaacccggcgggggcggcgtcgccgccactcctcgagccgctcccgctcctccgcgacgtcgccgccgcggatcgcccgggcctcttcctccgcaagctccgcatcgtcgccgcgctctttgacctttcggactcgctcaagcacccgcgggagaaggaggccaaacgccaggctctcctcgagctcgtcgattacgtgcaggctccagctcaggctgcgggcgccaacgcacccacgcgcctcccggaccacgtccaggaggcgctcgtcgccgccatctctgccaacatcttccgcccgctgccacccgcgctgcacgaatccgccgccgcgatcgaccccggcgccgcgcccgacgaggaggaggagccatacctcgacccctcctggccacacctccagctcgtctatgagctccttctccgatacgttgtttcgcccgacaccgacaccaaggtcgccaagcggtatgtggaccacgccttcgtcctccgtctcctcgacctctttgactccgaggatccgcgtgagcgcgagtacctcaagaccgtgctccaccgcatctatggcaagttcatggtacaccgaccattcattcgcaaggccatcaacaatgtgttctaccggttcatctttgaaacgcagcgccacaatggcataggggagctccttgagatccttggaagcatcattaatggctttgccttgccaatgaaggaggagcacaagctattccttgcccgtgctctcatccccctgcataagcccaaatctgttgcgatctaccatcagcagctgtcctattgtattgttcagttcgttgagaaggactacaaattagcagatactgtgattaggggtctgctcaaatactggccagtcacaaactgccagaaagaggtgttgtttctgggggagcttgaagaagtgctcgaggcaacacagcctgcagagttccagcggtgcatggtgccactgttcaagcagattggacgatgccttaacagttctcacttccaggttgctgaacgtgctttgttcttgtggaacaatgatcatattgtaagcttgatagcacaaaatcgtgttgttatatttccaattatatttgaagctcttgagaggaatatacagagccactggaatcaagcagttcatggtctcactgcaaatgtgcgcaagatgtttttggacatggacagtgaactatttgaagagtgccagcagcagtacatggagaaacaagcgaaagccaaagagatacaggaacaacgagaatcagcatggagacaattggaagctgttgttgctgccaaggctgctggagatgacatggttttggtcaactagcacaaatgcagataaaagctcatctgtagtaggaactgtttcgacgttgctgtggttgttttagcaatataatggctcactggtacgcccgattaag

SEQ ID NO: 24604 - DNA, 2401 bp, Zea Mays
aaaaaaagtccatgaccgcgtttttctcttctgcctttcctgccgccggccgggtctactcgtcccatcttgtagctgcagcggcaccccctcaaaatcgtccaaccaatcccaccagctgctcatctcgaatccagcccgaaacctcgcgccacgcgtgccgtgggcccagttcgtgcgcgttcagctgctgccccgcgcccagggatcgggaaggcaagctctttggtggttcctaagggcgaatctcgtggcgattcgctcagatttggatttagggtttaggaggcggtgctggtgatcggtttgtgccgccgggagagatgtcggcggctgtggcgtgcgcggagagggcgactaacgacatgctgatcggcccggattgggcggtcaacatcgagctctgcgacatcatcaacatggatcccggacaagcaaaggatacactcaaactcctaaagaaacgtcttgcaagcaagaatacgaaagtgcaaattctaacactttatgtgctagagactctaagcaaaaattgtggggatattgttcatcaacagattgttgagcgcgacatattgagtgaaatggttaagatagtaaagaaaaagccagacttgagcgtccgagagaagatattgagtttgattgacacatggcaagtggcttttggaggtccatctggaaaatatcgacagtatcatgcggcttaccaagaactcagggctgctggtgttgattttccgcctcgcgaggaaaattcagtcccgttgtttacaccacctcaaactcaaccattaagacatccacatctatatacacctccaggtcaaagctatgaagatgctgctatacaagcttctcttcagtctgcccctcctgcatctgccctcagtctgagtgagattcaaagcgctcgagggattgtggatgtgttagatgaaatgttaaatgctctggaccaccggcatcctgagggtgtaagggaggaggtcattgttgaccttgttggccagtgccgatcctatcaatctcgtgtcatggatcttgttaacagtactggcgtgttgttcagcgtcatgatgacatagcaaaggggatccctcctggtactggagcacctttacctgcttctggaaatgtcaaccaagggactgccccacctaggcccactgcggtttcattttctccacttctaaatgtacatgaggacgatgaaccagaagacgagttctctgtgctttcccgcaggtctgcgagggatggtgcagtagcacagaacaatgtgccctctgctccaagaaatgagaggtcatacccaagcccacttcttcctccaccaccagcatctaagaggcctgtttataccgaggcaagcagtgttgactatcttagtggtgactcctacaagtcagagaaggtttcagatgatttcatcaacccaactgctccagctaacatatccacatcatcccattcaaaggcagaagcacatccacctccgagttatggtggcaggccagacagagtatctgacgacttcataaacccaactgcacctagcttctcggcgccttctcgtcctacaaatgaggagccagcccgcccatccgtgaagcggcaagagagcctacctgacgacgacttcataaacccaactgctcttcctggtttctcgtcgtcttcagctactaaggagtctggcgaggaccttccaaaggctccatgggaagcacaagctgccgcgggttccctaccgccgcctccggcgaggtacggccagagacagcagtacttcgagcagaacgtgtattctggcgggagcaacgaaggcggctacaatggactgacgacacagaccgaaggtctctcgctgaacccgcggagcagcgagaacgagaggagcgcggcacggccggcagcgtcccgccctgccaaacctgaggactcgctcttcaaggacctggtcgacttcgcaaagaccaagccttcgtccccgtcgaaaccggccaacagccgcaggacccgctagaacgactcgtgcgatgcatggatggacattgggtcgttcggatattcatttcacaggttagcggcttttagatggtaccatgaaataaggccgtctggagactggttttcattgcatatttgcattgcatgggaaattgttttggttgcgtttagagtggcagatgtcagaaacgttgcttgctcataatcctgggtgtgtgatgtctagttagctgctcctaaatttctgtgtcgttggcttccgattctcattttctttttctttcacttagctgtgtatatatatgttacccgattcgacagcaaatattcatagttgagtttgtgacttgaggaatgaggtgttcctattttcggtattggataaatt

SEQ ID NO: 24605 - DNA, 108 bp, Zea Mays
cactgatatgcgtccgtgtccactcaaagaagactgaagtaagcgtgtgagctttgagtctctataaggaatatgagtggccttaccatctgtaagtttagcaataac

SEQ ID NO: 24606 - DNA, 168 bp, Zea Mays
taccttcgcggttatgaagacttggtcactgccctatacgtagaactccagtaaagatgaagggattgttaagaaattagctagtacaggtcaagtgtttgaactagggtagaaagaactctagttgcaggtaattttacttaacttgacaaataaaactggattttt

SEQ ID NO: 24607 - DNA, 755 bp, Zea Mays
cttcgtgctcgtgctcgtgccgtacccgacgcatcggcgtctcctcgcgcatttcttctccccccaccccccttcctcgccgagcgcatttctccgtgagcggaagatccgatcaccacttcggcgccgcgcgtccgaaccccaacccaaccgcgctgtctatcctcctcctccctttccgcacttggtccggcgatcctgatcgaattggaaccgccttcacccccacccagtgcagtgctcgcgtgctccgctctgcgccggcagcccgcccggaccggaccaggccgtctctgcatttgcgcggatccgccggcgcggtccctgattcgggccgcgctctcgcagatgatggtggcggagaagcccgcgctggggttccaggcgcacggggacggggacgacgagctggagctggagctagcgtcgccggcgccgccgccccggaagatgcactcgctggaattcgagcacatcggctcgctcgccgccgtggccgagtcgctcgcgcccgggagcaggtggcagagggcgctcaccagcgtgcgcgtcgtcatcttccaggccaagatcaacgtgctcctccccttcggcccgctcgccatcatgctccactacctctccggaacgcaccaaggatgggtttttcttttcagcttaatcggcattaccccgttggccgagagattgggatacgcaactgagcaacttgcttgctacactggcccaacagatgtaacctttttccttttcca

SEQ ID NO: 24608 - DNA, 2594 bp, Zea Mays
aaaaaatccaaatttctccactgttggatggctgttgggccggccgataaacaattttcccgttcgagcgtctcgcttctcccgttcccgatcccgatcccgatcccgatcccgatccctgcgtcctttcgcttatcccgttgatccggcgttcactcgtgcgatctcctgtggcgacaactgggcgatcgacgccgccgctgctgtcgccgtcctatacgagaggtgcgcaggcgttcgttggtcccttcgccaggcttttgtctacccttcgccgacgacgagcacaagccagatttctttgtctgacttgtggaagcctcttacaactattgtacaaggctgctgtattgaagatgtctgagttccttgacctagagctacaagatgggataaggatgccctggaatgttattccaggcacaaaacaggagactgtgaactgtgtgattcctgtttccgctatctacacacctttgaaaccaatttctgatatccctgttcttccatattcacctcttcgctgtcgcatgtgtcgttccatcctcaaccctttctccattgttgactatgttgctaagatttgggtctgttcattctgctttcaacgcaaccagttccctcaacactactcttcgatctcagaaaataatctccctgcggaactctttcctcagtacaccaccgtcgagtacatatcttcaactgaaactggtcctatagttccaccggttttcatttttgttgtagatacttgcatgattgaagaagaaattggttatttgaagtctgcactggcacaagctgttgagctattgccagataattctcttgttggattcattacgttcgggacgtatgtgcaggttcatgaattgggttttggcttattgccaaaatcatatgtattcaaaggaacaaaggaggtcaccaaggagcaaatattggaacaaatgtgcttttttgcggggaagaaaatgcctaccacaggcgtgattgctggtaccagagatggcctttcatctgagagcatctctagatttctgctgcctgcttctgaatgcgagtttgtattgaactcagttatagaagaaatacaaaaggacccttggcctgttccagctgatcagcgtgcatctaggtgcactggagctgccttaagtgttgcagccaatctccttggggtttgtgttcctggatcaggtgctaggataatggcatttgttggtggtccatctacggagggccctggtcctattgtatccaaatccttatcagagcccattcgttcacacaaagaccttgataaagactcggcaccactctatgataaagctgttaagttttatgatcaaattgcaaagcagcttgtgcaccaagggcatgtgctggatttgtttgcttgtgcagttgaccaggttggagtcgctgaaatgaaggttgcgattgagaagactggaggaattgttgtccttgctgaaagttttggtcattctgttttcaaagactcacttctccgcatctttcagtcaacagatgacaaccttggtttatcattcaatggtattcttgaaattaactgttcaaaggatgtaaaggttcaaggcatcattggaccctgttcttccctggagaagaaaagtcctttgtcttccgacactgttattggtcaaggaaacactagcgcttggaagatgtgcggccttgacaggaagacatcactttgcttggtatatgatattgcaaaaaaagatggcccagattcaattgctcaatcagcaaacaatcagttctacttccagttcttaacctactatcagcataatgagggtcagatgagattaagatcgaccacaatctccagaagatgggtctctggtgacaaccatgtggaggaactagtagctggctttgatcaagaagctgcagctgcagtcatggcacgcttggtgtcatttaagatggaaactgaggttgattttgacccagtaaggtggcttgatcgagctttgatacgtttatgctcaaaatttggagattatcagaaggagacaccctcatcgttcagtttatccccacggctatcaatatttccccaatttatatttaatttgaggcgttctcagtttgttcaggtttttaataacagtcctgatgaaactgcgtattttaggatgatgttggacagagagaatgtaaccaatacagttgtgatgattcaaccttcacttatatcctattcatttcaatcagggccagagccagttctcttggatgcaactgcaattgcttctgacaagatccttttattggactcttattttactgttgtcatattccatggggtaaccattgcgcagtggcgaaatgctggctaccaagatcaagaaggtcacgaggtttttgctcagttgttaaaagctccacatgaggaagctaatttaataataaaggagcgatttcctgtaccccgtttggtagtctgtgatcaatatggatctcaggctcgatttttactggcgaagttaaatccatcagtgacatataactcggacaatccctcccctggtggagacgtcatattcacagatgat

SEQ ID NO: 24609 - DNA, 3749 bp, Zea Mays
tccacccccgcttacctctctcggccgccatcatggaaggtccgaccccgccatcgctgtccccacgcggttgctccaaggaaggaaactctgatcccgctatccccgcccccgctctctctcgccatctccgtgcggctgctccaaggaaggaaggtccgaccccgccatcgccatccccgcgtggctgccttcccctctcgccatccccgcgcggctgctccaaggaaggaaggtccgaccccgccatcgccatccccgcgcgcccggtcgagcgccaccagccgcataagtctgggctagcgccgccggccaccattggctcggtcgagcacctcatgcccacgacggtcagtcgccgccttcatggctcagagtcgtcggtccctgcccaccaaggtcaccatgggctcgacgacgatggcaacaaggtcaaggtcgtcatcacaacccaaggttcgaggcgttcaaggcgaactctaggcacatcggcgagttcaacaagatgaaagacgttccctacaagctcggcctcaacaagaaaaaatcatcttctacgattcagagaaattatgtgaagcttcaatttgactccatgcaacaggtttagctattgacaacctcgattacattttcacagtgggagctccttcgattattaaccacagttgtgtaccaaatgcagttttgatatttgatggtaggacagcatatgttcgtgcattgcaaccgataaataaagatgaagaggtatctataagctacattgagactgcggcagtcaccaagaagagaaacaatgatctgaaacagtacttcttcacctgcacatgtccacgctgtgtaaagggttttgatgaggatgcactacttgaggggttcaggtgcaagagccaagcatgtgatggctttctgctgcccaactcaggtaaaaaggcttatacatgccaaaaatgtggtgcttctagagatgtggaagagataaaaaatatgagaagcaaaatactacagttatcggataaagcatcttcatttctttcatcaggaaataaggctgaagcaggttctatctacaagataatcaaacagttagagagaaatctgtaccatgctttctcaactactttgctgcacacgtgcgaaacactattgaagatatatctggaattacaagattggtggactgcgttgacatactgtagattgacaattcctgtttatgaaagagtttatccaccttttcatccgatgattggattacaattctatacttgtggaaagcttgaatggtatggactattagcccttacctatttacctcacacaaggacaacaatcatatgagtttattccttatccggtataaatgtttgctgttaatgtcttatgctttactaatatagctgttattgattctgacaaaagttgattttggatttgacactgatagtatagggtcaataagagcaactctaaaagcctctgtaaatttcaatctctatatctaacatttggagagccattcaatgaatattatttttgtatatctctcttatctgcaacaggttttccaatatttgttctctatacttcgatagcttatcatattttttctttgttgaaaaacaagaaaactaaatgtagccgcctcttcaaaaatggagtgaaggaaggatggttttggagagtggtttagagaagtttatctattggagtttttttatttgttttctaaattttgttataaagaaacatgtagaatgtcttagagattctctaagaaaaatgctagctatgaacttttataaagagaagttcagaatcagttctttttattctctaatatatatgttgttcgtttccatgtaattattatgtactaacatttatcgaataatttttacgccgtcgcaacgcacggacacacacctatatagatatatgatggtcatgtttcgcccggacgcagggactggttcggagggagacggcccctcactctctgccctcctgctgcctgcctactgctatactgttctcttgtgttcatgttcatataaaattcagtttcatgttcatattttcataactgtatatgttcatcttatcatacagtttgggtccttgaactttggaacactgaatccctactactctccccccataaaggctccgccgccggtgccgtggcctgcatcgcatgcccgacgctctacgcctacctgaagaagacagaccccggagtgcccgcgcagctgctggagtacgacgagcggttcgggcagtacggctgcgacttcaccttctacgactacaaccgaccggaggagctgccggcggcgatgaagcacgcctaccgagtcatcgttgccgaccctccctatctggtactgtttctaccctaccagagattgcctattaaaaagtgtttgatcagttcttaacatttgagatgagaggaaatatcgaggagaaatggctattattcattggttgatgatgtagagtaaggagtgcttggaaaaggttgccaaaacagtatctttcctcgcacgacctgaaggttcattcctgctgctgctcacaggggaagttcggatggaccgggcattggagctgctgaatgttcgtccctgcggtttcaggcctcgccactcgaacaaactaggcaacgagttccggctgttcacgaattaagatcctgctgacagacttggtggttgggagcaaagtgatggtgcccccatttaactataaactaatacaatttttgttctagagctgttccatctttatgaacatgttgcatctttgatccacagctcactgatccctccaatttaaattgtagtgacaattatttgaggaatctgtgtgctatgatgtatgattaatcaaacatttacactgttagtgtacctcattttaatttcattttaaaatacactgttagtgtatgtttcattttaatttcatcagtattctttagaatgtctcgttggcttattcagatttatagccaaaatgacattatcttggggatagttcatcagtattttttaatttcattatctcgttcggcggcggcatcccggacgggcacagcctgcacactggcgggcaggtcgtgaaggcacccaccatcgagcagaacctgtcgtgcaaccttgagtagctgtacaagggcatcaccaagaagttgaatatttctagggaaattgttgacgcaagtgggcgacgcttctccttcagacgctcaaccagtcaagaaggagtccgagagccaggcatggctcggattaggaccgaatgccgtcaagtccaacctgaacctgagctagcacacaacgacacagccaaataagacagcacagcaacctcaccaaagcctttgcaggacgatctgaaaatatgctttgccactagagtaccgaaaccataaatatcctctcgttatcgtgttttagtgttctgtttaggccgtggtcctacgccctcttgtcacatagtctggatgtaaagataagtagccagccatgactgagagaagttttttgggggggggggtgttaacacacggccactctgaattggccatgctaaggaaaatgatagtagtgcaaagagaagtatatgtcttttttctttttctttttctgaaagccagatcgtttggctctagccttgatgtatgcagaacaagtgattgtaatggattctgagtatcctcatcgtcttgctgttgcttc

SEQ ID NO: 24610 - DNA, 1553 bp, Zea Mays
ccagggtcctcatcagtacgttgcagtcgcgcagcggcatggcctggtggcacgccgtcgccatcgtgggacatgtggccctgtgggtaggaggcgccaaggtggaatcttttggggggccgtacgtatagaaacgggagagcgacgcggatggttgtggacctgtggccttgtggggcaattggctagatgggaaagaaggtggctgttgtggtgggagggagcgttgctgggctagcgtgcgctcacgccgtggctggcgcgggatgggaggtggttgtgctggagaaggcggcagcgccggcggcggggagcggcacgggcgccggactgggcctcgacgcgcagtctatggagattatctcgcgctggatcccggggtggggaatcgacgcggtcacgctgccgctcgccgtcgatctgaacatagccacggacagcgcgacgaaggcggcgcggacgctggcgagggacgaagacttcaaattccgcgcggctcactggggcgacctgcaccggcggctgcacgaggagctgccgcccgcggtgaccgtgctgtgggggcaccagttcttgtcgttcgaggcgccggacgacacacgcggggtcgtcgcgacggcccgcgtgctgcggacgggagggacggttgaggccacgggggacctgctcatcgccgcggacggctccacgtcgtctgtccgtcgcagcttcttgccagacctcaagctcaggtactccgggtactgcgcgtggcgaggcgtgtttgatttcagcgggaaagagagctctgacaccatgaccagcatccgaagagcctacccggagctcggcaactgcctctacttcgaccttgcttacaagacccacgccgtgctctacgagctgcccaggagcaggctcaactggctctggtacatcaacggcccagaaccggagctcgcggggaactcggtgaccatggaggcgactgacgccatggtgggacgaatgcggaacgaggcggagcgcgtctggtgccccgagctggcgcgtctggtcagggagaccgcggcgccgttcgtaaacgtgatctacgacgcagacccgctgcggcggttgtcgtggacgggcggccgcgtggtactggtcggcgacgcggcgcacccgacgactccgcacgggttgcggagcaccaacatgtcggtcatggacgcgtgcacgctcgggcagtgcttggcgaactggaactcagagccgacgcctgcgcgcgcgctggcagagtacgaggcggtgcgcctgcccgttgtggcggaacaagtgctccacgcccgccagctcgggcggctcaagcagggcctgccagtggacggtgaggcggaggacgggtttgacgtgacgacggcaaaggccgaggtgctgcagctacggcagaggacaatgccgttcttcgatggcgcacctgccgcagttggcggtgattttcctctcgttggcagtacaagatgaatcgagacagcattacctaagcgaggtgacgagaaatctgaagcctaacttttggggcagcatctgga

SEQ ID NO: 24611 - DNA, 547 bp, Zea Mays
cactaaaccgacacctagacaagtgcacacagtatttgaacaagctggcacaagctaagaaaaatcttgctcaagggagaaggtgatgatggtgacatcgagtctgtggaatttccaaagtgtgtggtggcaagtaattgcacatggtcacatactcacattgaggagatggaggagagggagagataggacccgggagaggagacatgagaggcacatggtcattatattttgttggctgtaactgtaagcctgtaattgttggttgcaacttgtaagttgcaactgttgctaacctgacatattttgttggctccctgcaactttgtcctgaactcctgaacctgaagtcctgatctataattgttggctgcatcactgcatgtatttggttctagaactgaaactctgaaagtatggaattatggattatggaatggaatggaactattatgaacataagtctataattggtggctgcatgtatttcaatatacaattattttttgtttgtttaagtgaatgagatggctgctattttgtaaat

SEQ ID NO: 24612 - DNA, 1716 bp, Zea Mays
ctagtatgtgccagcaagtgtaggggatgacacctgggcccgtgtgtgtttgatatggagagagagaggccgtagcaggggtactttggggcatacgaaaatacggatacccgcaatgatatctagagcgtacaaagtggcgtctgcacgtagaattacaatagcaccgtttcgaatatgataaatattataaatccgtacaagttgcaatggtacggtttcacttcattcttatttaaatgtgtcccaaccgagagtgtggtgaaaaaaatagaataaaacctgagtttgtgccgcactaccgcgagcaaaaaaaaatgtcaaaattcttctctttaaaaaatggtctaattcatcacctcaaattcaatctggaacaatgatttggattggatcaatttctatgcaaaaacacagttatcgccctgagcccctgacgctggctgaaccgacaaacaacagcaataattcatagttgaagacaggcacagggcgagaccgccgtcatggacactgagaccgaggggaaggcggcggcggtcgaggagatgagggagtggtgcgtcgctctccccaaggtggagctccacgcccacctcaacggctccgtccgcaactccaccctcctagaacttgcaaaacatctaggcgacaaaggagtcattgtttttgaagatgttaaggatgtgatcatgaagagtgatagatctcttccagagtgtttcaagctttttgatctgtttcatatacttacaactgatcatgatacagtaacaaggattgctaaggaggttgaaaagatcttgctgcagacaatgttgcatatttggaaataagaacacacctaagaacaatgaggcaaaggggatgaccaagaggtcttacatggatgctgttattaaaggtctgaaagcagttgaagatgttgatgtcgaattatttggttctaatttcagaacaaatgaaacactaagttctaagcttttggatggtgtcacaaagaaaaagaagatatatgttaggctccttcttagtattgatcgccgcgagacaacttcggctgcattggataccgttaatctagccgtggaaatgatggaccaaggtgtcataggcattgacctttctggcaatccagtcgtgggggaatgggaaacatacctgcctgccctacaacatgctaaaaatatgggaatccccgttacaatccactgtggagaggtggcgaaccggaaggaaatccaagcagtgctggacttttgccctcagaggctgggtcatgtatgctgtctgaatgatgtagaatggaagaagctcaagtctctgatgattccggtagagatatgtttaacctcgaatgttatgacaggaggtgctccttccctagagcttcaccactttgctgacctctacaatgcgaagcaccctttgtccctgtgcacggatgattccggcctgttttcgacaagcctctcaaatgagtattacctcgttgcaacaactttcggcctcagcaagttcgagctgttccagctggcccaggatgcagtgcagtttgtttttgctgatgatgtggtgaagaagtctctgaaggaggtgttcaagcatgctgaaaagaggctgctcatgtgggatgaacttgctgcaccaagctagtgtacgtacccgttatgagatcagccaatgcatcttcgatatcatgtgcacccatctgtg

SEQ ID NO: 24613 - DNA, 844 bp, Zea Mays
cataatgactccagtatcgctctatataacaagtggatccgatctagtcgccagtcgtcgtcgttaaaaccgagaagagaccaggccgaaggaaaacaatcctgaaaccaagccatgggtctgcaggaggaatttgaggagcatgctgagaaggcaaagaccttgcctgagagcacgagcaatgagaacaagctgatcctctacgggctctacaagcaagccacggttggagatgtgaataccggttaatcgtccgggcatattctaccaaaaggacagggccaagtgggatgcctggaaggctgttgaaggcaaatcgaaggatgaggcgatgaatgactacatcaccaaggtgaagcagctccaggaggaggctgccgcctcttaaaagtctcttaatagtgttgccaaacagctatttgtcagatgagctttgtgccatttcctcattagaagtatatcattcgatccattggggatctgtgaaccatgtacctgtttatgtaacttttttttttttcgaaagagcgcaggaggactgcgcacccatatattaaagtagagggaaaataaagggccataatgatgatatccatctatctatctatgtaactggtttatgtaccatgtacctgtttatgtaactggttaccagtgttatccatctatctatctataagagaaagagaaagataaaagagatagctaaattcacatagctcacagcaacttgtttttccagaactcaaagttgaaccagaatttgagttgcataataacactggtttgcaaactagtttgtatcttagataaatcagtaggtaagcataaggctgtctccagc

SEQ ID NO: 24614 - DNA, 1688 bp, Zea Mays
gttctgacgaagcaatgttctataatcacaaaaatctcggttaaacctatcttcccattttgttcctcgtcgagctcctcgctccgcagccaatcatcctcagccaaaatttctagaacctcgcgcagtcgcccgcaccacgccaatctgctgctgctctcgatggtgcgcctccatcagctcctctctcgcacgcttgcatctcaccaaatcctcgcttctgccacctccagcgtccgctccaccccgcggctgcttctccctctccggttgccgccgcctgctcctcctccccatggccgtactctgcttcccatcatcgtagccgcgtcgcgtcaatacgcctcgtcgaccttcgggaggcgagggcgctcgacgcggccgccgatgttgctgaggcgcaagagagccaggagtccgacgcggaagggccctggcgagctccgcgtgcaaattggcatagaggaggcccttcccgacgaccctggaatcctgagcattgcagaaactcttcggacggatgttgggaaggcagtgaagctggccctcaacgaccttgaaggctcggattacatgaccagagatccttctatatgcaatgtggacaagtatgctagcattgaggtctctgtgttgctttgtgatgatgatttcatcaggaagctcaacaaagaatggagggatgaggatcatgctactgatgttctgtcaatgtctcagcatatcccagagcttgatattcccattctgcagttgggtgacatagtaatttctgttgacacagctcgacggcaagcagaagaaaggggacacacacttgttgatgagataagaatcctcatggtgcatgggctattgcatttattgggctttgaccatgaagtcagcaaggtggctgaagaagagatggagaaggaagaagaacatattttaaatactcttgaatggagaggaaagggattaattaagagtgcttatgatattgctactgttatggaacatttacaaaattctgttgaggctgatagcaatatagagaaagtgatcctacaagagaaacatcaacccaaactaagccatatcatctgtgatatagatggtactatcatggattatgaaggtggtctgcatgaaaaatcaataggatctttgagagaggcaattgcaacaggagtaaatgttatcatggttactggaaagagtcgggcttccactattagaaccttcaagcttcttgatttccgcgaaaaaggtgattttatttcagagacttcacctggtgtatttttgcagggttcacttatctatggaagggatggcaaaaaagttcatagagcagaattggatttagatgtctgcaaggaggcattgctgtactccttgaagcatagaattcctcttgttgcgtactgtgaggaacaatgtctaacattgtttgaacacccatttgttgaattgttgcacactgtacataatgaaaacaaggtaaaagtgatgcattcaattgaggaccttttggaatattcatctattcagtgttgttgctccatgttgcctctcgacactcctctcgtcgaccccgacggcgatgctaccatcaacgtcgctgccagtgttgacctgtagcgcgcagaggatgcctacgccgctaaagaggctagaaagtgcatgactaagatcacctacga

SEQ ID NO: 24615 - DNA, 453 bp, Zea Mays
tcaaccacatatatcattaccaaattatgatcatccacaatattagacaattgagaattaatactttcaaacaaataaacttcatcatagaattcaatgattaacataattaaaacttatgcatactcaatgacagggaataggatgcaaaccaaacggtagcaaccaccactgtatttacttgcctttaccggaagtttgggcaaatccctaagtacgatccggaagtccaccaccttgagttccacctttttcctccttccttcctcccaccaattctccaattgaaacttgcacccacacgaagaagatccgacgaggaagaacgacacttggagaagaggagatgggggtggcggctagggttgagaagatggctgctgcaaaaaacttgagaatggagagggggcggctgcagcacttggggaagagagaagagggaagagggaagag

SEQ ID NO: 24616 - DNA, 1856 bp, Zea Mays
ggtttttttagtgcattcgggtgatcgactgatcgggtcttggactcttggcttgggcagacgaccagacgctagggctgggcaaggcgccgccgcagctctggcactagagaccggccgactgcaccgccgcgccaccgccagcgtgtgccacttcgaccccgccaccgcgccacaactgcttccgtgcaagtctgcagccagccagccagccaggcgctgttcacccgcgctcgcacgatgcagctgccccatgccagcaggtccggtcccaactcgtcgccacccgtcgtcgtcgccggctcgtcgtcatcggctccggcgtctcggcaacaacaatcggaggcgcctcgcggtcgaactctcgcgccgtggccccggtttgcagcccctcgctctcttctaagcaccatggatgtggataatatttgtgatattgacaacaatgtgtctaatgaagatgagatacatggtattgggggggggggggatgttaatggcaatgacagtgaccacatggaggaggaggatcatgttcttacacctactggtagtgaggtgaatgtcagaaaaaacaaatccatagatggagacaatcgtgtggtgaaacgactactagcaaccaagtcaactagtacctctacaagcaagtttatggcatcagcatttaaagcaacaaggtcaaacaagagcacagatttagtgcctcaacctcaagtttcgaaagttgcacaagatgcaagtgcgagtgcaagtgaaaatgcaagcatagctgcaagtgtccaaataagcactgaagatgattgtgatgaagaattagatgtcaagaaaaagaagctcacttcatgggtttgggagcattttacaagatggtgtgatagtagtgatcccataatctgcactatggcatactctatgagagacaagtttgataagtactgggagatgaacaatatggctttggcagtgggagcatttcttgatcctaggtacaaacacagaatggttgagctatacatgtctaagatgtatgatagtgagatggccgagttggagaaaatgacattcatgaatgttatcaatgaattatttgcattctattcatcaaccatcaatgcaaaatcaactaataagggtactagctcgaaggattctgtggcaagcaaaaatgttgttttgatggatgacgatgatgagaatgaggttaatcttgatgagttatatgcagcaacaaacaatgtgaagaaagtgtctgaattggatctttacatgagtgacggcctagtgaaggctaatgaaggtgatgcaccatttgatgccttatcatggtggaaggggcaagtgacaaattttcctattctttctagccttgctcgtgatgtactatcaatgcaagtgtcaactgttgcttcagagtcggcatttagctctggtggacgtgtggttgattccttccgttcgaagcttaaacctaaaattattgaagccttggtttgtactaaggattggaagcttgcttcagacaaagatttggagggtgaaataaaaactataagtgaagctatgaatgctatggaggtggacgatgaggttgcgacttgagatcttcaagcaagcatggattgcttgcactatcttatgttatttaaaaactatcctttattgtaatagtctattgtgttgaactgtcttgtgctatgttaaactcttgggtgatgtgaacttatgaacgattgtgttagactattgtatggtgtgaacttattgctatattgtgttgttgatctatggtttatgtaatgctatattgtatgatgtgttgaatgatgtgaacttattgctatattatcatgttg

SEQ ID NO: 24617 - DNA, 2198 bp, Zea Mays
ctccttctcacatcacatgggactggactgggagtgccaatgcctccagcccagcttgcctgccacctggtcttgaccctctcctggataggaggagcagcagccagagggacatcaaactgtgctgcctgcgtgtgtgtcttctttcttgcctctcccttcttcaacctttgctagcttgccagggagggagtccatgaattccagcagaagcctcctctcttcgcccctctttgctagctcgtctccaaacttcaggagcagtgcttccgtctcctcctccccatccccatcccgcaccacaggtatatatagcccttgtatgtgtttctaatctgcagatactattgtccctgggcactggcagagctcatccgctaccatctggcagcagttccaatgatacatgacaccagcagcagcagagcatccacggcgtgccactactcgccgtcgcttgtggcagaggagcagcttcacggctccaaagacaccttgaccttgaagggcgagaaggctttgctcgagttgcttctaggcatggctctggaccagcacgttgacggcaggaagctcattacccaacaggaggctgaggatagtgatttcgagagctatttgagagaagcaacaagccgagtgctttaccagccaacattcatcagtgaagaggatgatgatgatgattctgtttcggagagctcttcagcatcattggccaaaccagctggaacattggatcttggcaagctgacagaggaaccacagttggatgtaccacagcctcaccgccgcagtgtggatccaaaccattcgtatgatcaagtgtttattagatccactcggttactggagaggagatccaagaaacgcaacggcggccacagggctttggataatggtgtggcgtgcagtggtgtgaactcaaagagaaaagacaagtttggcagagttcttgatccagacgagccttttaggttgtttctacgggatcgagagacgacagagttcttgacagcgaaagaggagaaacagatgttcagtcaaatacagaatcttatgaagctggagggggctcagcgtaacctgcaagctcagtgtggtcgtgaaccaacagttgaagagtgggctcaagccgtaggaatgagctgcagggagctgcaatcctgtgtgcgcaccggaagacggtgccgagagaagatggcccgctccaacttccgccttgtgatacatgttgctaggaaatatgaaggatgtggccttgacattcaggacctggttcaggatggatgctgtgggttgatgaaaacctttgagaagttcaacccgagcaagggatgcagattcccgacctacgcgtactggtggatacgccagtcgatcaaaaagtccatcttcaagaattcaagactaatccggttgccggagagtgtgtatgcacttttgaggaaggtgggcaaagcgaggatggaatgcataatggacggggagcagccgacgaacgaggtggtggcaaggcgtgctggcatcacgattgaaaagctggcgaaactgagagcgaaaaccaggaaagtacggtccatgcaggatcgagtctggtcagacgacggtgtgacataccaggagatcaccgaggaccccaacattgaaggtcctgaggtgagcgtggacaggctgatgatgcggcagcaggtgcgcagcttcctgacggggatcctgagcccccgggagaaggagatcatcgagcaccggttcggcatccacgacggccagcccaagaccctgcatgtcatcggcgacatgtacggcctgtccaaggagaggatccgccaggtgcagaacaaggccctggacaagctcagaaacagcatctcagcacagggcttccacgtctactttgatttgctaacttaagactcttcaacacgcaaacattacatgtacaatgacattccattctgccaatgggtatattatgtatagatagacgaagaattcatgtttttttcctttcccttttgccatttgacattcattcatccttgtactcaacaatggatactcatacatggttgtttgaggagcaaagcttactttaaatgtatggatgtacgtttaagtgcacatatgtttatgaaacctctctttgtttcagtgtttctgcacagcacctaatggcaacattgaagaaactcgca

SEQ ID NO: 24618 - DNA, 2074 bp, Zea Mays
ctttctgcttctcccgtattgccgtgccctcctccctctccctgctcgctctctccctctcgtcgctttctttcctggtcgcgccgcccttcatcaggtctcctccgccttagccggtgaagagcgaccaggcccaataaataatcaccatggctcatcaaaagcgtgaaggcagctacgccgatgatgatagtacatccaagcgcatcaaaggcaccgacactgcttctgaaacgggggacagtgtagagtctagtgtttcacagcaaatggatgctgaagctaggaggacctgccaaaaggaaagcgaagcaccatcggacaaatgcgtttcagatggggaatgcgctgcaaactctaaggttttgggtgagcagaagatggtattgactgttgtcgaggctgatgcggcggacgacaagggttgcaggcacactatggaggacgcctgggtggtgctccccaatgctggtgcagaatccccaggaagcttgaggtgcgtacattttgcgatttatgacgggcatggtggtcgcttggcggcagattatgcacagaagcatttgcatcagaatgtcatcgctgcaggattaccacatggatattaaagctgcaaagaaggctgtaattgaaggtttccgtagaactgatgaatctttactgcaagaaagtactaagggaaattggcaagatggtgcaacagctgtatgcgtttggatcctgggacagacggttgtagttgcgaatgttggagatgctaaagcagtattggctcgttctatttcaactgagggtgaaggtgtggttgatgagaccaaaagtcaactaaaggctattgttttgacaagagaacataaagccatcttttcacaggagcgctcccgaatccagaaggctggaggttctgttggctctaatggaagattacaaggtcgtattgaagtatcaagagctttcggtgatcgccagtttaagaaggtttgctgatataagtatatttggtcgctacttaagtctgctcttttgtatctgtttatttggaaaaggtatggtgtttgattacctagttgaatatttcagcatcaataataaatggaggcattattttatgctgaaaataaagtacattttgagtgcaatgtacagaaacgattacaaagtctatttcctttggctatgcattctgttgatctagaccaaccagtgaagcgtccgatgacctttgctttgtatgctaaaaatgggggttttcctgattttgtgattgtatctactgttaagggcagtcctggtgcagtggtgagaactgtttcactgagtcaccaggtcgcggattcgaagcagcttttctgcacttgtggaaggcttgcctctgtttatccttttccagaccccactcatgtgcgagcctctcacactgggtctgccccctttatctactattaagaaataatataactgctgcttgaaacctttatagtcgataatgaggaactttgttagcttagttgtgttagaaagtaaacggcgacacgtagtgtccatgacgtgcgtctgtgtaccgcgctgtggtggtgtcgtgtgcatgtctgcatgcaagtgagctagctcgggctgattggtgttgggttagaaagagtccaggttgattggtgctagtcaagaaagagtccaggctgatttggagtggtttgcatggcgctgattcacatggtggaagccacatcgtccagatgaggaagtgggtcacggtgattgctgcacgagtcccgtggatcatggcacgaaggccggcatggaggcaagctccaagtctataagtagcgttgtacttctccatggtttctttgccaagtgcagtgagtaaaggagccaagataaaggtgagtttgacatcgtggcgttcatcaacggaaaacagtgtgcctgttgtgcttctgtctcttgccaagtgtgttggcgtgtctgtgttcaagtggttcctggacgaagccatcatttggtatgagagccgaagatgacgactttgttgaagaactcaggatcccgtgatctctgttcttaaggcgtcgcc

SEQ ID NO: 24619 - DNA, 293 bp, Zea Mays
aaaagacaggactgcctctgcacaccgccactcgcccacacgcgaaggcacctagcagccgccactcgccgaactgaggaacacgccgggcgacgggatacagcagcagcgcgcccctctatgcccgacgcgacggcgccctgcagctgcaggcacggctccacacctccactcttctcctccgtctccgttcatctctgctgagtagttgtggttgtggcgtgtggattaatcgcgattaatcgatctgatcggcgctctggcgatcagaaacgatcgaccgattagaaaac

SEQ ID NO: 24620 - DNA, 1777 bp, Zea Mays
cgagagaccatctcgatcgatcccttccgtgttccgtgctgggtgaaaatcgacgggccagaaagcgcacacgtgaaggcgaagatactgaccgtggagaacgcagcgtcgcagtgcgtcggcaccgctatcgcgcgcaacgactgctggtcttttctcaagggtggctttactctcaactccacgtctcaaacctcggtgctctatttgcagactgcgagcccaaatgcttctacgatctcaatcagaagcccctccttgcagccattctcacccgatcagtggaatcagcacagggaggagcgtatccaacagattcggaagcgtttcgtgaacctgcatgtctccgacggcaacggcagccgcgtggtcggggcggacgtggccgtgcaccagatcaccagagacttccccttcggctccgccatcagcaagagcatcctcgggaacgggccgtaccaggactggttcaacgcgcggttcaacgcggcggtgttcgagaacgagctcaagtggtacgcgacggagccgtcgccggggaaggaggagtacggggcggcggaccagctgctgcggttcgtgcagtccaacgacgtgacggcgcgcgggcacaacatcttctgggaggaccccaggtacacgccggcgtgggtgaagaacctgacgggcccggagctgcgcgccgcggtggcaggccgcgtccagagcctgctgtcgcggtacaagggcgacttcgtgcactgggacgtgagcaacgagatgctgcacttcgacttctacgaggaccggctgggcggcaacgccacggccgacttcttcagcacggccaggcgcgccgacccgctggccacgctcttcctcaacgacttcaacgtggtggaggcgtgcgacgacctcagctccagcgccgactcctacgtgtccaggctgcgccagctcgccgacgacgccggggtcaccttcgagggcatcgggctggagggccacttcgccaagcccaacgtcccctacgtgcgcgccgtgctcgacaagctgggcacgctccgcctgcccgtctggctcaccgaggtcgacgtcagcgccgccttcgaccacgccacgcaggccgcgtacctagaggacgtcctccgcgaaggcttcgcgcacccggccgtcgacggcatcgtgctgtggacggccatgggcgccaacgccacctgctaccagatgtgcctcacggacgccgacttcaccaacctcccggccggagacgtcgtcgacaggctgctgggggagtggcagaccaaggaggtgctgggcgccaccgatgaccgcggctccttcaacttcagcgccttctacggcgagtacagactctccgtcacctatctcaaccgcactgccgacgccaccttctcgctgcctcgcagcgacgacactaagcacatcaacatccgcctaccgcctggacctgcagcctgatctcatgcatgggatcggtccgtcgagtagaaatgtactactagaatttaagaactaaatatattgtggtgcctcagctgtgttaattggtacgtgtcactaaaaaataagtccgtggactgatacaactactactatacgcgcgcaactatctcctgcttgacctcttatgatgaaactagtgcaatgagtgtgttgtgatggtacacaaattattcgtgttagtgcacctagcgcgtagtatctttaaaaactctgttgtagtcaaccatgcttgtatatgaaagaacgcaagaaacgaaggatgatgtttaag

SEQ ID NO: 24621 - DNA, 2198 bp, Zea Mays
gtgatccctctcctcatcgtattgtttctgttggtcctgtgcgatgtatgtttaaatggctaagtgggtgcgattatttcgtggatattggccgggtaacccgtaatcccgccgtgtcttagcagtaggtggaggatcgatatctgtgtccctgttgaaagaattcttcggttcttcttctctttgaggtgacgaggacgacattcttggtggttggtgacttggtgtagaaggaatggcctcaaacgagtgaaatgatgcatcaaagtgatttagtgtagtggtacactgcatgtgaagcatcttgtaggaacacacttggatgaggttacaatacgcgtggaacgccatacccttcattctgctattttgtgctatctccacaaataaaatcttctccaacaacaaacctttcagcttcaccatagcgtctgctaggtcgttgcttcagattgacccaaattcaggacttgttcaggacaaggtaaaagttggacaaattttggaagaggacacccaaaacattgtcaatatgactatgaatgtgtcgtctggatggagcattgtgaaagaagaactcatacttcctgctagaggtgcccctttcaatagttgccatgcttctactattgtacagattgaggaagacaattttttggtagcatatttcggtggatccagggaaggtgccccggatgttaaaatctggttacagagatatagtgatggtcactggcatcctccagtggtggctgatgaacaagatggggtgcccatgtggaatcctgttttgtttcagcttccctcccgtgagctgcttctcttctacaagattggtcaagaagttcagaagtggagcggtgccatgaaaagatcgttagatggcggtgtaacctggtcacctagagagcagttacctcctggcatccttggtcctattaaaaataagcctttcttgcttgaagatgggcgcctactgtgtggatcatcagttgaaagttggaattcttggggtgcatggcttgaggttacgaaagatgccggatggacctggagaaagtatggccctatatgtataaaaggtcaaccacttggggtgattcagccagttccctacaggactgacgatggaactattcgagtgttgctgcgatcatttgaaacaattggtcatgtctgtatggccgattccattgatgaaggtgtgacatggagttatgtccgtgagactgagcttccaaacccaaattctgggattgatggagttaagatgaaggatggaagagtactgcttgcctacaacaccttctccagaggaacgctcaagcttgcagtatccttaaacgacggtgattcatgggacgaagtaatgacactagaggacacaaaaggtatggagttttcgtatcctgcagtgatccagtctatggatgagctcatacatgttacctatacatacaatcggacacaggttaagcatgttgttcttcgacctagttcgatggtgaaattgtgagcctgcaactgatgaaggcctacggctggcaacttcaggacacccaaatttatcaccaaatgtttggtgtgggggggggggggggggggggggggtcattgcatcggattggctagattatgctcagttgatgtcaaataaaatgctttcaggtgctacttaatggatttttcgaggttcatctaaaaaaagtaaatactgtttaaaatgttctgcttctttctcatctcggttattgttcaaatatacttttcctttggttgtgcgttggctttcacgctttaggactcctttggagcatagtggttttacagaaaccgtgtaacaaatttatatgaatcagttcattttcataaaaaaaagagaggaagaagcaggggaaaaaaactggcattcaaggggacatgggtaatggtaaatgtgtttctaagactgtccgcagaagatcatgtaaaatagacgatttacattgtagataatattatttgtagagtcaagtttgaaatagaggatgaggcatgatagctactgaagacagcattaaagaagcatccatgtaaccgggtaccttgtgtaacctgttgtttatccgggatatgtcaagccacgccccttatattgcggagaaaacattgaagtaacacaggaatctgtcgccggcgtgctctttgtgaaaatttcg

SEQ ID NO: 24622 - DNA, 225 bp, Zea Mays
gcagcggaaataactaacggagaaaaccgagtaacatggcgaagcctggccacgctactccataactaacggagaaaaccgagtaacatggcgaagcctggccacgctactcctcctggtcctctcctgcggaagcagtaacccactcgaccgtctatcccggtggcagggatgaaggccaagtcacaccatcaacaaaccatcctaaggagtacctgcaaaaat

SEQ ID NO: 24623 - DNA, 5126 bp, Zea Mays
tgttctgacgacagccattgcacgcaccagccagagaagttgaggttgcgccttctcctctcgggctcgggctcggtaggtatatgcctgcattcccattcccaaccaggtctggtctggtctgctccggtccggtcttctctcccgaccccgacctggcctcctccctcccctctccagcagagctctccctccccctccccctgaggtgaggtggctgaagtcgggggacatggtttctttctccgcttcctaagattcctcttcttccccccaacccaccacctacaccttttgctgcgccgcacctgcacggccgctccatgcgccgccgtatctcagtctcaggtcagcatcaccaaccgcagttccacctcccgaccccagccgcaatctaggaggagggccgccgctctcccctcggccgcatcgcatggtaaccaccaccagcagggcaggatgttcaagcttcaccgccaccgctcctccgaccgcgtcggcgagcgcttcgacttcagattctccaacttccgcgccgtccaggtccccgccatttcagacaggctcttcctttccatagtctccgtagacaatggaaaaacaattgcaaagtccactaaagtagcttctcgtagtggaatatgccagtggcccgacaccatcttggaacccatatggttctccaaggaccaagtctccaaagaatttcaagagtgccagtacaggattattgtttccctgggatcggcaaaatctggcattcttggggagattcttctaaatctctctaattttctgaatttggccgatccaaccgctatctctttgccactgaagagatgcaactctggaacagttttgcagcttaaggttcaatgtcttggcacaaaatctaagctgagtggtgtcagatcattgagggacatggctcctcgtcttgatgaccgtagtccaacgccaaccaatgacgagctggacaacaggtcagattgctctgatggtatgttcaacaagggtgttcattcttcatctgaaaatcatctgggtggaacttatcaagatgaatctggaaacatggaaacaggtttctcagcatcagggtcccatcggagttctaattctggagatagtactgcagatagaacaaacttctctcctagagtcaactctaatggagggctttttgtgggaaggcaggattctgctagttcctatgctagttatgttagtgccggcggtggtgatgatgggcttagatccaacaattcatcttttagttctcggacttcaggcccaaatttgctgcaagggagtactccaaaaacattttcgaatgacctttctcagttatctatgggggcgtctgactcatccaaagattttcttgaagctgctgaagaaacaattgaggagctccgtgacgaggcaaaaatgtgggaacgccactctcgcaagttgaaggctgatctagagatgctgaaaaaggagtgttctgaaaaatcaaagcaacatgctgaactagcagttgagctgtctgctgcacaagctgaacgggattcatataggcatgaaatagaagaattaaagtcatccttacaagatgtaaacacacgacagacaattacaggaacacctaaacgttcagactggatagacctgcagaaggaacttgaaggtgaggtgaagtttcttaaagaatcgaatacagacttaaccatacaactaaacaggactcaagagtcaaatatagagcttctttctattcttcaggaactggaggaaaccattgaagaacagagagttgaaatatctaagatttcaaaggtcaagcagactgcttatcctgagaatgggctgttagtaaaaaaagacagagagtgggctaagaaactgtcaatgaaagaggatgaaatcacaattccgagggagaaatcggatcgtgctctcaacattggaaatgcagatggtgcagcttccaatgccatttatcttgatttggagaaagaaaatgaaattttaagggctaaaatacaagagcttgagaaggactgctctgaactaacagatgaaaatttggagcttatatataagctgaaagaaaatggtctgacaaaaggtcaggttcctcatattgcaaacaacaatgagctgcaattcaaaaagcttacatcccggattcatcaactggaggaggatcttaggaataaggaaatgttaagagatgacagtttttctgagtcatcaatgtctaatgcagatgagatacagagaaaatgtgctgaccttgagctgaaggtgctaaattttaggtctcaaacctgtgagctagaagaaaagttccgaaaatgccaagaggagctggaacaaagaaatcttgagttatctgcgctgagaagaaagataaatggtttacattctaatgaactggaagtttgtgaatctggtgcgacatggaagtaccaagctagaatagcagatctagaggatactgaacctgagacagatacacttaaggctaggtttgaactgcagctacaggaaaatgatgaccttcgtcgttccaaggttgagatgcagaattttatttctgagtttcaggcagagaagagtcagcttgaggaacgcctgtccgcgtcgcttaaagaaagcagcatcacatctaaatgtctggatgaagtgcggaaagatatccttgtgctttccagcagtatagattcccatgtttcaaccaataaacttcttgagaggaacttagttgagctagagagctgcaaagctgaactagagttgcatgtatcggagctggaacaggaaaacatcgagttgtcagaacggatatctggacttgaaacacaactgacttacgtgacaaatgaaaaggagtcaagcgagctgcagttgcatgactccagatctctcatcatcaatctcaaagataaagtagagtgtcagcaatcagagatggaaactcaaaggctccagtttaagcagaaacaacaagaatctcaaagaagattgtgcgaagcacaagatgattctgaagttctgagaagatctaattgtaaactacaatctacggttgagagtcttattgaagagtgcagttctcttcagaatctaattgctgatctgaaaaggcagaagttggaattacatggtcatcttacgcaaaaagagcaggaattggatgagtcgaaaaaaaagaactttgagtttagcaaaacagtggagttccttgaggcaaaacttttgtcactacagaaggacatttcttctaaagaacaatctttattgtcagaattggagaatattttccaggagcacatggaacaagaagaaagaattaatcgcgcacatttcatgctcaataagatcgagaaagaaaagactcttgaagtagagaatcttgaaagggaggtcgtcagcctcgctgcacaggtctcctccacacacgaggagcgagaaagtgccactctgaatgctattcaagaggtatctgtcctgcgagcagacaatgctaaacttgaggctaatctccaagatgttagtgaacagctgagatgttacgagtctcaattggaagaccttcgtaaggagtctaaaagtaaaattaaaggattggttgattcccttaatgcctccaaacaaagcgaggaaatgttgacatcagatgctgaacatatgaaaaagttgatggaagctgctaaatccaatgaagatgcactaaggaagacttctaacgaactagaactgaagcttaaatccagtgattatgtgaaacaacaaatgctggaagaaatatctggcctgaaacttcaggttcagaaaataatgaatcttcaagatgaggtttccaaacttcagagttctcttgatgaggccaagttcgaaaaagggaaacttgaggagtttgtgcgctcggtgactgaggaatgtcaagaactaaaagcacagaaggctatgctaacagataaagtttcttatatgcaggagaccttgagaaatggtgaagaagaaaaccgaaacagaatagctatgcatgcaaagctcatgaggttggagagtgatctaacagcattagaagcatcacatgtacatgaagcagaattaaagaacgaactcagtaggatcaagagatcaaacagtgagtatcagaggaagatacaatctctcgggcaggaaaatgaggatctcactaggcgagttcaaattatggaaaagggttttgagcgaatgtcccacgctaaagagaaccttggaaagcaggagattggaggagataaccaggaagccatccagtcaacaattcagttactggaaattaagcttgcagaggcattggaggaaaataagatatacagagctcaacagaagagttcgatgtctgaggggcaacctgctggtggagatggcaaggagggcaataccgacaggattttgcagttggaaggagagctgagagatatgaaggaacgattactcaacatgagcttgcagtacgcagaggtagaggctcagagggaacggttagtgatggagcttaaagctatcaagaaaggcaggtggttttagcaggatgcggagttgttgcctgacataaaacatgaggctgacaccacaggtgggcatcatcaagccgtgctatgctccagcaccagtgagactaagagcaagcaagtgcaagtgcagagtcagacagtgatatagcctggacgtgctaactggtgctggagcatgtgtctctcactgaagctccgtatgatgcggtacccagcccttgtttaactggacgtgctaacttgcgttgtcccctagagtcatgatcccgttcttattggtatttatttttaatggtatataattaatatatacaccagtatgtattgagtttgactggagagtgatggtcagttgttgataccatccgatccctctgttttacatgattgattacgttggaaagagtcaacccattaagggctagtttgaaagccacaaaaccggaggggttggaggggctaaaatcccctctttattcaattttaaataaaaagtggattttagcccctataatcacctctgtttttttggactcccaaactagccctaataatagtcgataaatg

SEQ ID NO: 24624 - DNA, 1574 bp, Zea Mays
atgacggccaccgccagctgcttctccagccccgtcgcgtgggcgcggcctcgcgccggccccgcaggcgcgagtgcggccttgcgcgtgggccggtgtcccgcggccgcggtagcggcgcacgacgtggcgttccacccggacgtgtcccgcgcggcggattcgctgcaggcggagttccgcgccgtggaccgcgccatcgctctcaactcctcccgcgtggccgccgccttccgtcgcgcgcgcgtcgccccgcaccatttcggtgggtccacggggtacggccacgacgacggtggcggccgggaagcgttggactccgtcttcgccgacattgttggtgcggaggctgccattgtgcgcccgcagctcctggcagtcgctgggcccccgtacgacaccttggaggaggtgattgggatcagggggtcggccaatgtagggtcactcaaggatttcggagtgacgtaccgagaagttccgcttgtagcagatggtggccttgattgggatgctcttgcttgctccatcaggccggaaactgggtgtgccttcatacagagatcgtgtggatattcgtggcgcaagagcttaagtgtagcagatattcacaaagctataggtttgatcaagatgcaaaatccaaactgcatggtgatggttgataattgctatggtgaatttgttgagatatcggaacctgcaatggtgggagcagacttgattgctggaagtttgataaagaatccaggtggaactattgcgccttgtggtggttatgttgctgggaaggagcatttagtcgaagcagctgcagcccgtctatctgcacctggccttggggtggaatttgggtcaacacctggccatgttatgcgtgcgctgtttcaaggcctgtttcttggtccgcaaatggttggagaagcagtaaaaggaggtttgctcattgcggaagtcatgtcagccaagggatacaaagttgaaccacttccgagggttcctcgtcatgatattgtgcaggcagtggagcttggcagcagggaaagactcatagcattctgtgaagtagtgcaacaaacttgtccagtaggatctttcatcaaaccaactgctggggaaacgcctggctatgcttcagaggtcattttcgccgacgggacattcatagatggaagcacaagcgaactgtcatgtgatgggcccttgagagatccatatgccgtcttttgccagggaggaacacattggacgcagtgggcacttgtccttggtaatgttctgaaggtcatataaacgtgcggtgtgataatgttgtcacatttcttgtatgggcatgctcttttcctatcctaactctgtactcgtttactaggaatggtggatactcactccgtctcagtttataaggctttataaggcgtaactactttttattcttgtcccataatataaggcgtgctctctctaggcgtacgtacatcaatgcagtagtatagagaaaattaaatgtatttcttgatttttgaactagaggtggttacaccttatatattgagacgcagcgggtattgtgc

SEQ ID NO: 24625 - DNA, 3259 bp, Zea Mays
ttcacaggctgcacagcacacaaaccccgcgtaggggtagagatcacctcacccctcccgactccggcgcatccattcggtcgctgccggatgcgtgcttgacccggccatggatgactctgtccctttcaatgacctcggtccctccaagcccccgtcggcctctttctacgacgatatgttcgagtcctacttcaatcgcgcggccgaggcccccgagcccgcgcctaaggcttcttcctcgccgtcgacgccgccgcccgtgttcgacaagccagtcttcgacgacgatccttacacggccgatccattcgacgcgatccccttgtttggaggcggtggtggaggggaagaggaagacttgcacggtggcgtccggagtgcggcaaagccggagaggacggagttggaggtggtgggttttgatgaagatttgttccctgggttggctgggagcaccaattttcccatggagaagccggccagggaggtggagcgggaccgtcaaccagtggggttcgacgacgagttgatccctggattcgatggaagcatgaagccagcgccgcaaatggagcctgagacagtggcgtttgatgatgatgtgatccctgactgcagtggaggcacgagctatccctcttcggcaagggaggaacctataacgagacaagaaagtgaatcaatttcctctagcaaaattagcatgagcatgccagaagatcctttcgttactttaggtggtacacacaaatcgggatattcatctttagggttgttttcaaatcttctgaataacattggcatgcctagaaaggaagcggacacaacgcctgataataccagtgggatatttcagggttctgatatctttactgagtttccaaaagccatgccacccttttcgtttacatctgaaaaccagagtgatagaactgaaaggagatatactgaaaacataatcagcacgagtcactccgatcggctgcctcaggagaagacagtccaacaagcatcaacagaagcacctgccaatacattgactgagatgaacttccctgaagcatctgttgtccatgaagtacctgttaccactagttttcagacattgaacccatttgttgaggaagacgatttgttagaggtgaatcaatcttcacaaacgactaatgatgtgtggctaactgttttagatattgctttagtgacactacctacaagtgcgccacctccttcaaggcctccacctccacttgctgctaagaaaccacctactgaatctgtaactagtgaagcatatgcccatcattgtaatcaacgctaccatcactccatatgttcttcaaacacctctaaaacatcccaaattgatgaattggaagattttttcttgacaaagcctgcaaattctgccattggtcatccacaagttctaaagcatgaaggaaatgggcattatccatctgcagctactgcaagtttcatggactggactgagatgggacactgtaaaagggggaaccaaggggcatttgattctatgttcactagcagtcaatatcgacagccagaaatagatgagaaagcagaggtatgtgctcatgaaacagaaagtacagatgaagaaaagagattagagaatgaacaaatacaaagagaacataaagaagagcaaataagagcagaaagggagatggaagaagagcttgagagggaaagagaaaatgtgagacaaagggaacaagaggagcagaggaggcgtgaaaaagaaagagtggccaggcaggctgtagataaggctatacgggaggcacgcgaaagatcagctgctgaagcacgcatgcaagctgagaaggaggctcgtcaaagagcagagcgagctgcagtatggaaagcagcaacagaagctcgtgagagagctgcagtggaggcaaaggaaagagctgcgaaggctgctgcagaagctaaggaaagagaagcagcagaggctagagaaagggctgcaacagaatcaagggaaagggatgccaaagttgccgcagatgcaagggaaagagctgctagggctgctgctgaagctagggaaaaggaaacagcagaatttcaggagaaagctactgcagaagctcgggcaaaggctgagcgagctgctgttgagaaagctgcagcagaagcacggtggagggctgaaagagcagctttcgagagggttgctactgaagttaagcaaagggcttttaatgatgctagagaaagggctgccgctgcagctgcagctgaagcactggcaagagaaaatcagcaaaggagagcaacaacagaacctgaccttgagtcattctttggcatgccttctcgatcaagtagtctaccgagatcatacaacaacacaacaacgaatcctttcgatgttcaacctggcaatgctggttctggtggtgtaaggaggacaccttctggttcaggttttccctttactcagccttcatcaagcaatcttatggatggcctatcttctatatttggagcacctttaccatctgctgtatttcaagaagtggatggagagagtgaagagagaaggaaggcaagattggaacgacaccaaagaacaatggagcgtgcggcaaaagctcttgctgagaagaatgagcgtgacttgcaagctcagcaggagcaagaagagcgacatagaattggtgaatcacttgattttgagataaagaggtgggctgctggcaaagaaggcaacctacgggccttgctaacaacgttgcaatatattctttggcctgaatgtggctggcgacctgtatcattgactgatctgattacagcagcatctgtcaagaaagaatacaggaaagcaacattgtgtatccatcctgataaggtgcagcagaagggtgcaaatcttcaacagaaatacattgcagaaaaggtatttgaccttctgaaggaagcctggaaaaaattcaactcagaagaactcttctaacaacttgtttaggaaaatgttgatcgcaaaacaagtattgggaaggacagggacatactggtccctgtagtaatgaagaaagggagagtagcaggggccctgtttggtaagggtatgtagaagcaggcaccagctcgaggggcgattccggttagctcaaggccagatatgcaggctagtcgctcgtccaatctggagaagcagccgccagctcaaggacgtttcttgctagctctaggctagggaaaatttaactatttg

SEQ ID NO: 24626 - DNA, 8493 bp, Zea Mays
atggagcagaggttgggggcaacgtatcagtggtggtcatggagtcacagtaagagctgtgaatcggtggagcggaaggggcgggagtggctggatgaggcaggacttgcctctggattacagcttgtattggatatgttggtgactgtgggagaacctgagcttggttcaagccgcggacctgtgtcatggggcgtggcaggtttttgtggagtgactgttgctgagaagagaccaatgatgcaatctcgtgatgttgataaatatttgaacaaagctgacaacattaaccatgtgctcatgaactctggcgacatttctaaaattggtggtcactgcctgcatggtacacatggtttggggactcggctagattctgatgctcagagctcatcccctggagaaaatatgaacaacaaaatcagaaggcccatcgaaatatgtacctttgatgctcaaggtcggtgcaagaaaggaaagagttgcatctctcttcatgaaagggagggatttggttctgcaaagactggtctgctcgcaccagctggttctggaaatcatagaggtatgagcttcctaactagggcaatctgtgagcaacaacttgctataacagagccaacttcttattgctccctgctgtgcataggttctgaaggaggttctcaagtacaacatatatctgacttgaaagtgcatcagttcaaggattcagagggtttgtcaaaagatgaaatgtgtcggaatcttatttatgcatttggcaaagataatcagatgtcggtacatcttgctggtaaacacagctctcccattcctggggtttcacaaaggatgcccgtcagcattggtcattcattggctcagaatccattagttcatgagaagaacaacaaacgtttcatgggacaccatattgatgtggctgctgaaaactatttggatgctggaggtacctatccaagattagatggaggtatttttcagtttgacatagacaaggaaagcagtgttagtgattcccatgtctcaagaacttacctttcagattatccatataaatcatttggcttgtctatttcatctgatcctctccagctcagtgagaagctgtcagcatatggtggagtgacaaatactattcctaacatacatcagaaagaacatcactcatgccatgcttcatacagctcacatagcttaacaggatccagaaatccttgctttgctacctctgaacatactttcggtagcccatctcttctagcaacttctcatctgggaatacagtcccatcatctgttcacatctgatattgagaaggctgatctccatagatgccttgatgttggaaagggctatggtacttctagttctggacccgcattgcttgtgagcagtaaacctgaaccttctatgacgccagttgggccccactctccaattaagaatgaggtctgggaaacatcagtgccttttgtaccttcttttagttttcctgatagcacaacagcttcagaaagtcaatatgatccatttgttgactatgttgaacctcctaaagttgggaatacaaataatctcaagccctccactatatcctgcaacattacaagtcagcatacagatcagtacgcagttactgataaatccttgaattgcaatgacaaattgaccaggaatataactgccaaaggatcaaatgaacctgcttactttattgctcctgatagaggatgcagctctagcctggatgatactatcaaggtgaaagcttgtgacagaaaaaaggatgcagttgattacaatgagaaaacaagggatttccgttttcatttggcagaacatataaaggagttggtcaaaccaatatggaaaaaaggtaatctgagtaaagatgctcataaactggtagtgagaaaatctgtcgagaaggttgtggactccattgagccaaatcaagtaccaactactgaagagttgattacgaagtacatagccacatgtggaccaaagatagaaaaacttgtgaaggcatatgttgataggcacagtacatgtcatccaaccatcaaatacagcagctctgagatgggagcttgagcttaatggtgatgacagcttgaaccttctgtcctaccaatctggttaaccttcatttgtaggcccaacaagttaatattgttcatacaaacatgtatgtccatgacttcttgaggcaagtagtcagcgaagttccagatattggtgcatctgatgttattgctgatgataagcttggcaaaggacgtatatctatcctgtagttgataaggttcttacatgtcaaaataatcttctacgaagtgttaataaatgctgaattgtcatcaggaaagctggagatggaagcgaggaggaattaaagaggacaataaacgtaagtcactattatccataactccatgtttttgtgaacgggtccttaactccatgtggatgttccatatttcacaattctcatgcatctttaataataatttggtggaaaagtatccaatttgacccccaaagtttcactgctgaactttcagatcagccatttcaacctcataactttctcttcttctaactcaaacctgtccttcctcccatatggcatgctacattgcgcgccttgtcacccatggacatccattgctatttcatcacacatgaaatatcaattttgtccttgttctgctcagtttctaagggaatggctacccaataatatctcaatccagtcaactatgcacattcttaccgagaaatttggaactgtgtcattatgaaacatgggctccaccaaattgccatcaaatgagtgggtttcacttaggtgccattaaaatgatggcgtacacgctataatgccttttggctatttaacaaaaactgaaatagctttaatttaattataggagatgatctgactagtttgcccctctctgccttttcacggtcttctctttctgtcctggtgaccgcctccattctttccctgtgaccatgcactttttctctttttctttccagcgttgtactcaacgttatcctgcaagcataaaacatgtgaattcacgagagcatacggcgtgaggagcgaaaaaaatctcaaggtcacctacatgtagttgcacattgcctagctatggatacttcacgtctggacacaggaggatacacgcaggagatccgttttttccccaaccagtgacaagatctgcgggaacgtggatggccacgcagacacaggctgctctcctaggatgaaatgcggcaggccggactgctcgctcccgctgctgtcgttggagctgcacaccaccggtcatgggggaagaagcgtggtcaccagaagggaaagagaaggccattgaaaaccagagagggccaaaacagtcatatcatctcctataagctataactaaattaaagtcatttcagtttttgttaaatagccaaaagacattataacgcttatgtcattgtttataatggcacctgagcgaaacccacccatttaatggcaatcctgcgaagcccacatttcatgatggcacaattccaaatttctcattcttacctacttttttaccttttacccttttttgttcctttttactgttatctttactttctcttccgatgctcttgctttttttgttggattgtcgataattctactcacttattacataatctatccatagataaccttttatagctgccgggggcgtcgattaatcatgggctgtagattgcagtgtacattcctttatggcagttagttctccacagggggctttccatcttgggtttgccccctcttgcttccaaattaggccttggtattggagcaaaataagggtaaaaggaacgtcttttccatgatgacccaacaaaggatgacaactttgaggctgattaggcatgttgtaccgaggttatgttggagcaaaagaaaaaggaaacctaaatgactagattggtcagtttgaaagtttcaaggatggacaaagtggtcttattcgactaataataatttaaagtggcaggcctgatgcagcggtagagcctaccgtctgtaaccggaaggtcccgggttcgagccccagcctctgcatattatgcgggtaacgcttggcgcttaaagatacccttccccagaccccgcacagtgcgggaagcctacgacactgggtacgccctttatctgtcagaacttaatttccctttgttatgtaccttccatatttcactttttatctttttaaccgataaatttgtaggggagacccttatagtggtatatattaaataaaaaggaggaactgcacaataaagaaagtatagaagcaaaagcagacagaaggaaaaaagaaaataaagaagcaattataaagaacaagccataaggaaattgccaagcgaacgtccgagttcattctaagcatctggagcttcaacctgctactgaagcaaaacctttaagacgtaaaggatggaacaaaatctctgaatataacaacattcctctgcttccaaatctcccaggccgtaatagctagaatttccatgaagaactttttcgtgaattgatccctcgctgatatgatcatttcaaagaaattcaaacaatgatccctgtgaataccaacgtgattccagcaggctgtactgaatggacattcaaataaaacatgataggtgcctaggtggtttcctcacaattaatgtcccaaagcacataggttaatcatcatttgtaactttacacctcgttttttgaagaatattttttgagttgattctgtctctataggtcagccaaatggacaccttgatctttttactcactttagacttccagatccacatgaaaggaggtgggcaaatggattggaagtttagtctgtagaccttgcttgaacggaaattgctgtttcctcaagaatagatccatttgtccttgccatgcatgttgttttgaactgaaataattgtctcatagaacttgagatattcttcagtggcttccatagaaagaggtgcatgaaaattttcttggaagtccatgttgcccagaaactgagcaagaaagcagtttttctttttgacaaacgagcatagacatatgaaatccgatttgaaaagagagttattccagacaacatcccatagtaaaaaaaaggtttctcatcacctgccatcagcatagcaatacctctatagtaatctcccagtctaaaaatatctttccactagaacgagtctctttcagaggagcaatgaggaatctgccatgagttatagcgagtattccagatagggaacttctaatcgatcataaaacttatgaagatgtttcattagcaaagcaatattctgtatttttaaggttaataaccccagaccacccttgtccttgggggtggtaaccttatcccaagaaatcattggcttactatttgcattaatatcattctctttccataaacaatctcttctggctctatcaatagagttgatgactaagctggaagcttgattgtgcacatggtgtatgtaggaagcgtagaaaatgtggaatttactatagtcagtctccaagccattgatagccacatgctggtcataattggtcttctttctattttactcaacagaggtaagaaatccttaattctgggcttaataatccccatttgtagactgagatatgtaaagggaatagagccaacttggcaaccaaagactagccaattgagctgttttggtggcttccagattgatgggtaagaggcatgatttgctataattcaccttgagcatggtagtgtttgtgaatgagcgaagaatttctttcagacaaaacatatgctcaataggaagggataaaaccctaagatgggtagccttactaatgatgtattggagaagctcagttgcaatcacaaagagcaagggagataaaggatccccctgcctaacacctcttttgcaaagaattttttttcccagaaacaccatttaaaagaacagtagaggattcagaatttaaggttgaactgacccaacgaatccacctgacgggaaaacccaactgattgagtatagcaataatgacactatgctccactgtattaaaagctttatcaaaatttgagaacaaccacttcctttctagaaagatggcactgatgtaagtattcatagcaccaagcaagacacaatcctgtatggttctgtttttaataaaatcatattgatttttgtgcacaattcgttgaatcacaggcttcagcctattcaccaatagctttgtgattaatttgatggctatactgagaagagagattggcctaaaatcattcaccctaacagggttgttcacctttgggatgagagcgatgaaagaggtgttaattccatccagattaatgttaccatcataaaaatcatgacaaagtttataaaaatcaattttgatgatgtgtctcagaaactttccattaaatccattaaggactggagctttgtcaaaaggcatgttttgaacaattttatcaatctccttatggctatgataatcccgttttctattgagcctaaggtcccttttggtttgaggtcccttttgaacaatgttaagaggcattttggtcttcttataagtcatttaatgcgttttgaatatttttagtccctaaaactaaacagggttgggactaaactttagtccatagactaaaggaaccaaacaggccctatgacttttgagctctttttgctgattaagtttcttgtgtgcagaaagcagaaaaccatacaggcaatgacaggttgtgcgaggggttgtgtacttgtgtgagaggctgccgcggacgtgtggaacttagcgggtgttgtcatagttcataaacaattcgtggagaaccaatctagcaagctagtagcctaaaagtggagatagccgatgaggtcttaagatgcaactgaagcaaaagaggctactacatcaaggagcagttcaaccactcatttgatggcatagtccatttgatgaggtcttagatgcaactgaacccactccaaggggtttgctcaggaacattgacttgaatttagatccaactgatgaagaagatgagattacagtgccaccccaagcccagtcgatccagcgactagttccgttgcagccactgcgggaccatctgttgcactttctgggtgcttgggaactgcctgacatgaacaatatggagatgggccctgtccagtttgctttgtaaaaaaaatacagattggagagaatgggtattatgacaatcaagactagctctgcccttatagctttcagagtggataagtaggatagcaggacagttgtaggttcatcttaactctttagagattctcatgtatcatgtgtatcatagccgccaaagctgcagatgcagcttataatgtgccagaggtttaaggttggctggctagttgactgtaacgttccgaagctagattcgctcaacacgtagtgctttggcatgtagtaccagttgtacttgtacactcctgtctccagttgctctccagtttaatgttaattatatgcttatgcttcattggatagttgaggaagatcttgctggatgcatgtatggcaaataaaaagcaagaaagagtttcagattacttatcacagctcattccatgacaggagtcaatattttcatatatgatagacctgcgaaaagattgcgagccttcagggataacgcgtcatcatactgggagatgatacctttatttcctgaaacatggttatccaagcacaaggaaaaagttccagcagtgattgcgactcgccagctcaaggtgactgcggaatccaagatgggatcgatgcttctacagctgcttgaagttgttccacaccgcccccaccttggccttgcacagcttctttccgctgccggcatccacctcgacagtaaaatgcatggtcctggcatcacgttctgcacatatattatacatgggatgcatcagtggtggctccaacgatatcaactaggtttatgcagagtgacatgtctttcggtcttgctgttgtgctccgtgaccgtgactgaagcacgcgagctcaatggcctcgaggtcgctctcacacccagtgggtgcgttttggacgtcgtccaccatcccacaggccgttctcgtctcggccatggctgctggagcctgtggagagggagaaaagctgtgcagagggagaaagaggaagctgcggcgagacgagacagacgacgacagacactcctgagtcctgcttgtagtagtagagcaccaacaacgggctattgcataccatcaatgggcaggtctcctaatctagaagtgaatttactttctgccaattcttccattatctgctattgcatagctttttcattacttcacttc

SEQ ID NO: 24627 - DNA, 1486 bp, Zea Mays
cggccgtccacctaatcccgagtctcgagcgagtagcgacggccgcgcctgcgcctgcctgcgtcttccgtggcggcgcccctacctctcgaacccgtcaggcggtctggccgacctcgcttcctcggctagctacctactcgccagcgtctattgtccagcaggcgcccagctcccaagcggccgcagtgcccctgcttctgcccttgcacgttcggcccctgtgctgcactgcacagtgagccagacagtaaggtttgttttcttccattcagtttgttgtactgtggagatcaaactagctaagggcagagccaaatttggggattcttcaactgaagccttgtatagatatagtttgaaagatgatgaacgaacacagagaggaggatgccttgagaggtcaagcagtcaaaaaccagaaggcgatatgggacaagaccatggaaatgagattcttgctgcagaaggcgttttctacttccaacaagttaccccaggaatccatcagaacaaggttttgcaatcatgataagcagatagagcaagcatatgatgatcttttgaattcgacgaaacatactttgagcagcatgatggagctgcaggaggctttgcttgagagtaatcaggctacaaaggatgccaatgaaattccttctgcctcaaatggagacaatgacgagtggtcagaagtacagagattgcaggcaaggataacaacattcagaaataccgagatagataaatggcacaggaaaatacaggtgacaacgggtgctgctgcacttaaaggaaagctacatgcatttaatcagaacattagtgatcaagttgctggttacatgagagatccaagccggatgattaacaggatgtacttgaccaactctgctgttagagtatttggaaaggatgtgggagaacctggaacagctgaggaggggcacattatggaaggtgatcctgaacttattgatgattctgagttttatcaacaacttctcaaggagttccttgagtcatgtgatagaggggcatcaaagtcggcattttactctctaaaaaagcagcaggttaaaaagagaaagcttgtcgatcgtcgtgcttcgaagagcaggaagatacggtaccatgtccacgagaagatcactaatttcatggcaccggagcccatggttcttcctccaatggctccgaagttgtttgagaatttatttgggaatagcagctagaatccataaactgcagtaggtttacatttctttctgttgccttttctacttctataaactgtagtaggtatgatgtcactagacttagactgaattgtaagttttgatgtcctcatcagttttgtgcgtagacaagcagagcctagttcaccaatcaaattatgcttcgatttgggcctgatgagtgccatttaccggtggacccgcggtgagtcgtgatatacgtgattatcgaaaaatgagttttccta

SEQ ID NO: 24628 - DNA, 977 bp, Zea Mays
ctacataaaaatgtgacttaagtcttaacagaacatatggcaagttcttgacaggcaccataggttcgttttctggagtggacagatgatttggagggttttgttctaaaaggctatggtgagtcaattaactacaggatgggactgccattgctcaaggatgttgtccagtcaatggaagaagcaatcatagctagagaagaaaaccgtgctgatggtacgtttgaaaaggcaaggctccgatttgcacatgcagaaactgttgttccttttagctgccttcttggtctttttcttgaaggtccagaaattgagaagatacagagagaggaagcattggacctaccccctttgccgccacagggaagaaactggaagggcagtgttgttgcgccttttgctggtaacaatatgctggttttatatcaatgtccaagcaaaatttcggatggcagcacaatctctggaggccgaaacaactcttacttagttcaagttctacacaacgaagtcccagtttcaatgcctgggtgcggcaacaaagatttctgtccgttcgaggagttcaaggagaaaattgtgaaaccgcacctgaagcacgactacaacatgatatgcaaggtcaaatccccagcggcaagcgaggagcctgcctcgttcgcctccagggtgtccagtttcttcctaggactcctctcgcagaaagggtaccgcggtgtgggcgccgagggcgtcaagaccgagctgtaggcgtcaagacctagcttagcacgtgtttttgtacggggcgagtcgaatgtgtaggacaccaccacaggaggcgccagttcggttgtctccagggccagacgcctctgatactgtagtagcaataacataaataataaatgtgtttcgattcggactccctttcgcgcagaaagaaacaaatgcatgaatgaatgaatgaaatagtacgtgataagcatcttctgggg

SEQ ID NO: 24629 - DNA, 5462 bp, Zea Mays
acaggccccaagccttcagaattgtttggacgttacacttggaggattgaaaacttctcgaaggagaagaaaagagaaatgaaaagtgagccatttgaagctggtggttacaaatggtatattcttgtatatcctcaaggatgtgatgtctctaatcatctttcattattcctttgcgttgctaatcatgacaaacttctcccaggatggagtcattttgcacagttcactatagctgtagccaatatagatcctaaaaagatgaagtactcagatactttgcataggttctggaagaaggagcatgattggggatggaaaaaatttatggagctatcaaagattcaggatggttttcttgttgatgatgttcttgaaatcatagctcaagttcaggttatcagggagaaagtggatagaccttttcgttgccttgatcgtccttaccggagagaattgatccgcatctatatgacaaatgtggaacaaatataccgacgttttattgaggagcgaagaagtaaattaagcaagctcattgaggacaaaataaaatggtccagttttcgtgctttctggtcagcaattgacccaaacaccaggcatcgcatgtccagggaaaagactgacaccatattgaaaatgttagtgaagcaattctttgtagagaaagaagttacttccacattagtgatggactccttgtatacgagtctgaaggcacttgaataccagatgaagggcaggaaaggcaaaacaaaattagcagatttggaagaactacctgcgcctatggtccatgttgacatggacatgtttattttggctgatgatgtcatagctttgcttgagagagctgccttagaacccttgccttgtcaacctttagcccccaaggatgataaaacttcccaaccccgcatgaaggatggaagttctggtgaggtttacaatgtttctatggagcgtgaggaaagacgtctaactgagcttggtcagaagatactagagacatttgtgctatctcatatatttaggtaacagttgatgtgtccattttgatctttgtgattacttaaattggattgattctcttggggtcatgtaggaactgattggttctgattttactggcttaaaaccagacatagcaaaacctaactataattggaactgaaatgatggttcaatttgaatgttcggcaaaactaatggcttgggttggattgtagtcactgggattgtcatgttctgtgaccccaaaacgtcatgatccatgggtcaaaatcgatgtgggttgctgccaggggcgaagccaggatttaagtttgggagggacaaatcagattgaggggctgttagaagatattttacattatttacctgataattagctaaaaaattagtagctcttatggaatttggggagggtttaggggggacattgtcccccctctgcccctccctggaatcgctcctggttgctaccatgttccccacatggaacgagatgtgtcaatgaacaaaatagggagggggatgttgcttagatgtgggaggcattcatcatcgaagaggggcaccagccactggcagtatacagcaccacaccagtgagagtgtcagttacagctggcatggtggtcgattgcatatccatattgtatgaatggggcactgtacacagcatgatttactttttcttgttcttttgtatttttaattactttgtgttgatcttctgttactattcatccatggcatatcaaagcttatcgaacctgctcatcaacctagattagttggggtcactcgatcatatctagcccctttgatttatttttctagatatctgtggctcacgtccccagccctgacccagtcagcccaaattttgcggtgattattagttggatagagttgtggaaatactactataaatcttatatgaagcctcttcagcttagcttattacaaccatttgcaaaaatatgactgatacatgttcaccaaatatattttgtaaatgctctagagcacatgccaaatatcaaaccaatgttttcaagtcggatgacttgctggtcgttctagctaaccgactagggtgattaatcgtgattaatcacgattagtcggacgatttggacgattaatcgtgattggtccaaactgacttggacgacttgaaaacattgtatcaaactcagaagaggctaaaagacattttctggttatttttatacactaaaaaaagagggcctattttatcgtaaggtttgaatttcaaaaagaaaacttggttagtggaatatctttaaatcgctggctagctgttctctaatggcgatataagctggctgtttcttttgcttcttacattttgtttttgttagtggaattgaagttgcgtaccaagaagctgttgcattgaaaaggcaagaggagcttattcgtgaggaggaggaggaggctgggcttcttgaacatcagatgaaggggaagcgtggtggtggtgtaaatgaaaaggacaagcgtgccaagaaaaagcagaccaagcaaaagaagaaccgtaaggctaaagacaaggaaagagatgagaaatgcgaggttaaaattctggaaaggcttcgtgatgaaactgccattgataatagtgatggcttaccatctcaggtggaagtgatagcaaagattgatgccttggaagaaggttcttcagatgggtcagacatgtcaaatagagggaaaaatcagcgtaacaagggcttaagcattattagctttgccgaggaaggtgatggtcttccctccacctctaatgtcactggtggtttaggccgcaatagttctggctgctgcacagctccaaaactggatcaggatactgttctacttaccttgagagatagacttcgtaagttggggcagcgtctgcatgagaaaaacattgaggggcagaaacttctcaaaaaacattttgaagctagggacgcaaaagcgaaggaagaaccttctgactcatctaattctttggataagccacctgatgttccagagatcccggtgcattcatcagaagataccgttgatcttaaagtgaatggaacaccaaagaaggatgcatctgtggtcaaccctgttctggaggattctgtttcaggcataccagtcactgcaaacaatgaacctgtgccttctcccaccacaacaaaaatggacccagtttcaaacaaagttaatggatcaagtttgaaaatgaaagtcaccatggcatctccttgctccaaatcacatccagctgatatggataaagatgcctctcttccttctaaatcaccacgaaccaatagagctgctccagttcctcctaagctgccttcagctgataaagcaacgctagttccctcaaagctaccttcggttgataaagctactccagttcctcaaaaatctccgttggtaaacaaagtagctcaggcccgtcccaaatctccagcagttgacaaagcaactccacatcgtcccaaatctccagcagttgacaaagcaactccagttcgttctcaatctccagcagttgacaaagccactctagttcgccctcaatctccagcagttgacaaagcaactccagttcgtcctcaatccgcagcagttgacaaagcaactccagttcgcccaaaatctccagccattgataaagcaactccaattgctcccaaatctccaccagttgataaagcctctccagctctgccaaaatcattatcaggtgctaaagatgcgctttttccttctaggtcgctgcagattgataagtttactccagccgccccaaggttatcacaagatgataaggctgctctgccttcttcagaacagtcacatatatctccagctactagttctgaagctcaaggggcaactactaggaaggtcacaactaccacctcactttcagaggctgctgcagcatggaggccttcaagtgctcctgtgttacccacaccaagatcaaccgggccagctgcttcacatattcaaacttccacattgctttcccgctcgatgagtgaagcagctgggagaaggccagtaaatgatccttcattttctgccccatcttatactccacagacctaccggaatgcaataattggtaagtctggtctgtctatgacctccgcaagccttgcgtatcagccgtcttctctggatcaagacactgctccttcacggcctctatcagcatatgcatcaagtacagtcatgatgcctcctgcaggaagatctgatcagtcatcagctaggcatggattcaagtctgggcctggtaagttagaagcacatgacggctggcagcagtggaaaggtgacagtaatgttgatatgcatctctggagggaccacgctccttaccaacaaatgaccaacagtcaagcatatgagcagtctcggagggacgatacttatcagcaagcatgcagcagaggaacagaaaagttcagcaggcatgcaggactgcaagctaggcagcagttccaaaccgagacacccgccagtcatgtatggcatcaaccgcaggggccagtggcagaagaatttccacaccttgacatcataaacgacttgcttgaggaggaccagatcaacggcagtataccggagtcgtttcgtcaagactacaacgtgtttggcctgccgttttcaccgagaggaaacttgtcagacatggaaatggcttctgttagaagtcccgctcggttcaattcacccaagtacgatggtggattgtcgggggcttatgacatgaatgctgtcaatgggttgagggaacggcagtttccctcgttggatatctactctaatggcctgtctgacgtgagtgcttctaagccttggctgaatggctctgccagtccatcggtgagccttggggtcaacacaaatggataccacccccaggtgggtgagtacctgggaggtggggtgaacggggtctccttgtggcgccgccatgccaacggccgctggtaatgcgaggtgcctgtatacaatcatacagtcggaataatgttttgttgtaacagatggtttcgggcctgagctgatgcgccatgtaattaaaagtttttaagttttaaaagggaaagaaagagatacaccctgtaaagtctgcgcctttattaggataatttgagtgcttttctggttgaagttgaactctgacctaactttgttaaatttcaaagctaaatttggcggtggcctgtgggagagagaagaacggtatgaaggttagcctgtccgacgagtgctgacggagcaacctacctaatcgcctacactttgtgcttctgctaaacatgttagtaccctgtccaaaaaatatgtacttactagtttgcaaaagaatgacgttttggaagatctgagtcgactgagtgaaggatcgaaat

SEQ ID NO: 24630 - DNA, 4564 bp, Zea Mays
cccgtgtgcgtcttcctccacgcatcacacatgccacacgcgcgccagcaatcgcccccggtatctcgcccgcgccccaccaactctgcccttgaacccgcctgccaccaatctcgtcgccgggtatcccgcccgccaccaaaccgcgccccctgtcctcgccctcgacggcgctgccctttgtgatggtgcccttccttccccagctcccccaaatgctgccaagtcccccaccaacgccgcccttccttccccggcagcccgcccccactagctccgcgctccgcgtgccccaccagccacgctagctgccgccgggatactcaccacctccgcgcccccaccaaaccgaaaggcgagatccgccgccagttccacgctccgcgcgtcaagagcagccatcacagtgatgccgcgcgagggagaggaaggaaggccgcgtgagtcgccgcagggaaagctgccaggcatcaccgtaaggtgagatccggttgcgcgtgagggagaggaaggaaggccgcgtgagtcgccgccgagaaagccacagggaaagccgccagtgtgagtcgccgccgggaaagccgccagtgtatgatggttcggtcatccagatgtgggtggcgtacaacgttgtcactcatttcctcctgcactgtaccgactgcaaggcgcaagctcactggcgtgttcgacctcctgaagattatgctatacaaggtgtgcgcaaatggctcatcggcgcttcccgattgggagatggaggccagcatcatggagttctacgctgttgcatcttctaagtggcatcaccgagctggacgacaggaaacagagaaaattgtgcctgaaaaaatttaggagcagggatgagcatttatcagaagtggacacaaagagggagcttgagtgtgggctctgcatgcggtgctttgagtattggtaatagctcttttctcctagcttaaaatcatgcataaagtttgattttttgtaggctccacatttaaacaaatttggtcatgttagcttatggatggcataaaagtactatttctcatgggttctgaagcagaattatagtcaagtacttctcgtgttgaaactatggactgggaaacatgacaaatttgcttttagtaaaattacgaagtgttgtcttttttaaaaatattggtgtcatgtttttttaatgaagcagtttcaatgtatgtggtcggtttggagcatttttaggagacatgatatgtgggatagaaaagctgatggagataacctaaacatagacaaacagccacatacctccagcatggacattccagtagtaattgaagaagctgccaacaaatacaaagcaccatatctctgcaggacaaatcaagataatacactgctaaaataagttgtattagaccattaaagtatgagcatttagctaagagttgccctgtgttttttgttttacccatgataactgtcagtacaagtgtacaacaaattttatagtagtactttggaggacaaaactggtgctggtcattttagatattcgtgcctctcaaataccttaagatggcttgaattcttattgttcatatacattatcgtttttaggcacacaataatgaacctctacagattgtttgtggttatcatgctcttcctcaaccacctcatggtggtgaacttgtattccacacccttgaacatgtccaacctctgaaatactcctggcctggattacccttgttgggttttgtagaggcgatttgaacatttaaagtagatacttgacctatcatgactctagcctgcagtatcattcctccatttctctaatcttgaaacttagaatatagatcaatttacatttggcgactgcagaagaagctcaacactcaagaccttttcttatgatataatattgacaaccaagattttcttctatctttatttttttgctgtttgtgaaattccacagataagacctgtatgctctggcgtgagttatttttctcaatcaacaggaagaagtgaagtgagagatttcattagttcttgaaccaaccaaacatttttgaactgtaaatacagtagggcactgtaacaaaagtttattagaactaaagaaacaccaatattttagctactttaaggcaggtccattcaaaaagttttgtttctcaccctgctcaggctttgtacagtcttttttttgtttgctgacgccttcctaggaaaggggatcttctgcgacgatagcgatgaagacgaagacagtgaccaggagagggaggtgaacaaggagatggttgtctaccttatcgatgcctcgcccaaaatgttcacccctgccaccacctagggcaatgaaaagcaggagacacatttccataccattgttaactgcatcacagagtctctgaagacacaaattattggtagaacttatgatgaagtcgcaatatgtctctttaacactatgatgctccagttctgcaacttctttccgacaaaatgtccactcatatatttacaactctataagggtttagtgtgggcgtccacaccccttcaccatgcccccgcctcagcccccgtcaaccacgcaaggactccagcgtgaaagtcgggcccgtcgccggccttgcatcgtcgcgacacactccgtgcctcccttccatcatcgctcgatcgcggtttcgtcgcactccttccttcgatggcactcctttccatcctcgattcctcctgccccagcaccggccagcctcatcaggtcattcctcctcgctgtgccccctccaccgtattcaaccacctcttcctcggcaccaaacgtagacgcctcctccgcgatgccctcagaccgcccgtcctcgcccaacatctccttgccgcatatgcccgcagcggctgcctcgcatcccgcccgcacgccacctccttgcacccgcgcatggatgccactgcacgcctactatggaagggggacgcctactattgaagctcccatccacgatcccattccaaatccagcttcaaatttgccccaatctgcagtcaaccttccacccaacatcttccccttatatattgttgtctctgctataaaagacttgacagaggcgaggcctccaaaccactaccactctccaccgattcactggagtcgcgagacgttggaggccctgagacgttcaagcctcatctgcagtctcctccaaagaggtccacaaatgatttgagagctgtaggtctacaaatgataatgcaacaaattctgattcatgcatttctttactgtgtggaggccatttaattacgcctatttgatttgagagctcgagtagacaagatcatgtaggctctgaaatctatcttctggaggaccaaggccattaaagtacagggttctttcagcagcaatggcctcactatttcttctaaattaccaagattctcggacatgtacactctcacgatagcaagtgtagacccacagtttatcgtagcaaacaagccaatccatttcactaagagcgtgacaaagtgtcacagagcccttcttcttcgctctgccacccacaccgtggcacctcgccgagctccgcatcgaaactgcgttgttgccttctccgtgctctgcgttgaagacatgcagcgcaagcgtcgctgcctcatcccggcctcctctagacgcaagacgacaagaggatgctgctcgagctgtccccttggatcccacgccgaacgccctgtcacctccgtcgacaacatcaagctcctgtccctcccccacctcactgcaatagattcttcggttgtggaacttagggagagttttgagtcgtggtggtgtataaagcagtcgtcaagcacaagctcctccaaagtaccatcaggatcctacagtagaagagttagccaaaacactcgattgttggccatcaatgaattattatatcacgggttgtaaatatgttcttatgccatgaaaattcaacgaatgtcacgcccttttcgtaatagatcatgttaaaagcatgtgacttttatcgactttacaccgactcaagattggtgtaaacacatgccatacaagaggtttgcggaagctattatcatggcctcaaagaaatataagattgcttacaacaagaaacgttctggatgggcggaggatatctttaagtgggaacatacaattcagactggtgttccaattgacttaagagggtttaataccagctacctcgttctacaagttatgaccatgtgggggaatgacagacgaatgaaatttgttgggaatgcaaatattcttcgaaggaactttgtgattgatctgttaagttatgaggacaattcgtgccgatatgccatccctgcaaacatacaacagagacttatcgatatcgctaaaaaggattagctgattagtgtacggttgtcgacacatttgtctgtaattaaaaattctaaattatctttttagaaataatttgtgtgatattgataatgaaaaacacggattttgcatattatatagtgatgtttgtcgttc

SEQ ID NO: 24631 - DNA, 418 bp, Zea Mays
gtataatgagtcgtccttaaacaatgattctactataaattatgagcacccgcaaaaaaattgaattccacaaataataccaattacaatatattaaataaattctaaacatttacattctcatcaagcacaaaatttaaatcttaaattgatttgtcgggctcctccttattaagaggagtaccctccaaaaattaacgtatgctgtttaatgtggagagcacacagcattcttctattctcagtcctatagtaaggctatctccaacagcccttaggctatcggctatctccagcagcccttaggctatcataagcagtctctttgctgctataaataaaaggtgcattgtatatgcaccaaatgctggcctaagaatatagggcggaagaatagttagctgtgtgctcaccacgc

SEQ ID NO: 24632 - DNA, 4199 bp, Zea Mays
tgctggtggagttccagtcgagacagttttctgccgagagagcatatataattatttgtgtaagaggttcttcgcaattgccaatattgagttatcgaaaccaggaaatctgaggcatcatctgggaagaattttagcgatagatcgagaatctaatttcgttgctgtcagttcatatgaggataagtttgcccttatacatgtttctgtttcccagagtggttctggcagcggtattatttctgagaagaaaatgaagatgacgcaaggatcataacttcgtctaggaccagcatccgtggtacaatttggacaatgcgcttcatatctgtgccccaagatgaagaatactatccagttctggcaatgataattaacaggaaaggctctgatgtgaatgacttgtcgttatttggatatgactccagcagctgtgttatcaaccacctctctagttattcagaaattggacctttggtacttgacgtatcagaaattcctgaaacgtttggctttgcacttctgttgcgtgttggtgatgctttattgttggatcttagaaatccaacaaatgtctgctgtatccaaagagtcagcttgacgactaacctgattggagagccaatcactgttgaagatccctgtccaggattagatgttgatgatgatgtggctgcttgtgctttgctagaattgagagattctggtaataacataatgaaggatgatggttatatggacattgatggtgttgacagcagaagtaatgtgaaaccaaggatcgtttgctcgtggagctgggagccacctgaccctgtcaggcgaggatgtgcaaggcttctattttgtttggatgatggagaatttcatattttggaatttactttggatgttgaaggggcgaagctgtacacatttgaatatattgataggactttgccttgtagacctcttttttggatgaaaaacagaatgataatagggtttgtagagatgggggacggcatgatttttaaacttggtcaccgcaggttgcttcataaaagcactattcagaatgtagcaccaatattggatctagcaattgctgattaccatggtgagaaacaggaccagatgtttgcatgttgtggaatgtcccctgagggctctcttcgagttttaaggaatggtgtcaatgtggacagacttctgaaaactgaagctatttaccagggtgtcactggtttgtggactttgagaatgaaggcaactgatgcctaccattcttttcttgtgttgtcatttgtggaggaaaccagaatactgtcagtaggactaagttttaatgacatcagtgatgccgtgggattccagcctgatgtttgcactttagcatgtggtttggtggctgataatctgctagttcaaatttacagcaaaggtgttaaggtctgtttgcctacagtatacgctcaccctgaaggtgcccctttaacttctccaatttgcactgactggtatcctgctatcactatcagtgttggtgctgtaggacataatattgttgttgttgctacatctaatccttgttgcttatatgtccttggtgttagatcatcatcttcttaccagtacgagttgtatgcaacacatcatgtgcaattgcagtatgaagtatcatgcatatcaatcccacaagaggattgtatacatgataatgtatctttcagctgtggagagggtgatgacatttgtaagaacccccctcctaaagttaatgtttgcaagtttgctgttattggaactcatagaccttcagtggaaatcatctccttggaacctggagaagcattaagggtattaactattgggactgtatctgtgaataatgcacttggcgcacctatgagtggttgtatacctgaaaatgtcaggtttgttgcggctgagaggttttacattcttgcaggcttgagaaacggaatgctactcagatttgagtcagaaacacgtgattatctccctggttttctctacaaggactcttctattccttctgttaatacattccttcagttgatttcgatacggcgtattggaattactcctgtactgttagtgccaatacatgattcagctaatgctgacatcattgttctcagtgatagaccttggctattacatgcagcaagacatagcctggcatattcgtccatttcatttctttctgcttctcatgtcacacctgtttcatctgttgattgccccaatggtctactgtttgttgctgagagctgtttgcatttggttgaactggttcatgggaagcgattgaatgcacaaaagttttcaattggagggactccaaggaaagtgctataccataatgaaagcagaacactgttggtactgagaactgggctaaatggtgcatcgtcttcttcagatgttgtacaagtagatccacaaaatggggtattactttccagatataaatgtgaacctggcgaaacagcgaaatgcatgcaaattgcaaaaataggaaatgatcaagttttaattgttgggaccactaagtctgctggacggccgatgatgtcaaatggtgaagcagaaagcatcaagggacgcctgattgttttaagcttggaggccgttgaaagtcctcgtgagagcagttcgtttattccaacttttagttttaatccctcttcacattctggttctcctttccacgagattgttggatatacaactgaggaattttctagtaacagcatgtgcagcagtcctgatgagtttagctgcaaccagatccaagctgaacaaatgacagggcaattgagatcattgactcaatatatattgaatggcgcagttcttgctctgtgtccctatctagatcgttatgtgttggcagctgctggtaatatgatttatgtatttggtttcacaaatgaaaatccccacagaataaaaaagtgtgctgttggtaggacacgatttacaataacttgcctgaagacatttgcatcacgaattgctgttggtgattgtcgtgatggtgttctcttctattcttataatgagagtcataggaagttggaattggtctattctgatcctgctcatagattggtgggtgatattgctcttttaaattgtgaaactgctgtggtatcagatcgacgtgggagcatatctgtattatcatgcaccagattggaagtttcagaaagtccacagaagaacttagccgtgaattgttcattttatatgggtgaaacagccatgagcattcagaaggctgcattcaggtatcggcttccaattgatgatgatactgacccggtgcttgagacagtttacaactgtatcgtggcaagtaccatgttggggagtctctttgttatgattccactttcaagtgaggagcatcagcttttgcaagatgtccaagaaaaactctcagtacacccattaactgcaccggtcctgggaaatgatcatgcagagttccgtcagcgtggtaccccttcggtagtgcctcccattcttgacggtgatatgcttgtgcaattcttggagctcaccggtgaacaacagcaagccatccttactcatgctttgccagggaaggggcaacataggcccctctcggttttccaggttttgcaaacattagagcgcgtccattacgctcttaactgaggctttcttcaatcacagttactacaaggtttggatattagagctggttgaccttcattgtttgagatgccgtcagagctgaggttttagtgaccttcgcaatctagacggccgattccaagtctgccatgatatttatcagaacgtttgattgatgatgcaactggagcttgatactgggaagtctcatggtggcgagtatcccgtggaggcaccagattcgtcgaacctcctgtgtatatacagtcggccgcttttggtagactgttgtatggcgcattctgcatagaaacgaatattctttccgtttgtttcaatagataatgtaatgtttcttacgtcagctggtcggatgctcaacgagaaataagggaaacaatgaattgcattggccgtcctgctctatcacatgccattactgattagtgatgaatgcatgcaccagctgccgcagtgatgatcttgccgcggcagctcctggtcagggacggcgcccacggggacgc

SEQ ID NO: 24633 - DNA, 1149 bp, Zea Mays
aggattaataaaagtaaaaaaattccaaccgcacacggcacctcctctcgtccgttcgccgcctggctcgcaccgctgacagtgcgtcagtccaggtcgatactccctctttccaagatccggtcattctctctcggggtcggctaccgccgccgccgtacgccaggtgccgactgccgagaccttctccgatctgtttgccggcgaagagcgcccgccaaatctgcccctggtttcaaccgattgaaccccgatgtccgacgtcgagaaccctggcgtgggtgggaagccgccgccgtacaaggaccctgacaatgggagtcagcgattcctactcgagttggagttcgtgcagtgcctcgccaaccctacctacatccactatctagcgcagaatagatatttcgaggatgaggcatttatcgggtacctcaagtatctaaaatactggcagcgaccagagtatatcaaatacataatgtatccacactgccttttctttcttgagcttctccaaaatgccaatttccgaaatgcaatggcacatccaacaaacaaggagcttgctcataggcagcaatatttcttctggaaaaactacaggaataacagactgaagcacatcataccgcgccctcctcctgaacctgcaccttcacaggcacctgctacattgcccctacaagcgtccgtgccgacacctgtagctccacctgttcctgcaccaacatcgtctatgccacctgtggtagcaggatgggctaattgaagttcttgcgcaacttttcaacggacactgccggattcgagcacagttgctgcctcaggagccttattatttccttttgttttagtgctggttatttggccttgtagttgagggttcgtgagtttttagaatggaagcttctgacttagagtgaagttagaacaaatactccatgtcgcatgaacttgcacacgtgactttaggtgtcagcattctcctgaatgatcataccatttaccttaatgtttcagcatattgcttggcagcaggaaatatgtactgttcataaactatacatatgcccgttggccccaatacaaagttgacattttggcaatattctgttcatacaaaacaactgtacatgttttagtattttt

SEQ ID NO: 24634 - DNA, 993 bp, Zea Mays
cttcttatccccaatggcggacgcacgtcgacacatcactgctcactctgcactctcgcgggatggagcttggcctagcgctccggctcgtcgcgccgccaccgctgctgccgtgtctctcccgtagagctctttccctaccaccggattttgtttcctcgcgtgtgcttcgaggaagacgcatccatgcctcgagactgaagcatggagctggggttgtgtgcaatgcgattatgacctattcaggagtggaagaggaggagatggtggaagaagaaatggaagaggaggctgaaccggcggtgagcacaaggccgcgcctggagctcatcgagaagccggaccggagcctggcgctgctggatgagtacgagtcggaggaactgggcacctctctttgcgccaatcatcgtagcggttatgttgctgtattggggaagccaaatgttggcaagagcacacttattaaccaaatggttggtcagaaactttcaattgtaacagataaaccgcaaacgacaagacatcgcattcttggtatatgttctgaaccagagtaccagattatactttatgacactcctggtgttattaaaaaggagatgcataagctggacagtatgatgatgaagaatgttaggagcgctatcggcagtgcggactgtgtgcttgttgttgctgatgcttgcaaaactcctgaaaagattgatgaaatgcttgaagaaggtgttggaaacaaagatattggacttcctgtactgctggtattgaacaagaaagatctcataaaacccggagaaatcgcaaagaaacttgagtggtaccaaaaatttactaatgttgatgatgttataccaataagtgctaaatttggtcatggagtggatgatatcaaggagtggatattgtcaaagctccctctgggtcctgcttactaccccaaggctggtacaactgggttgtggagaaatattttctcaaaagccagagaat

SEQ ID NO: 24635 - DNA, 6580 bp, Zea Mays
aaatcgttaaaagttattcgatatacattttcacagttccatctaaaagtcactaaaaacaggtctagtggtgctttcaattttgcactgcgagaaagtcagttttttgaaaaaagctgctttcttgatccagtcctttgatttagcttttgacttttaggggataaaagtcaaaaccaaaagtcaaaccaaacacactcttaatctttgtgagtacgaatgatctatatctatatgatataggtacgctcaggagtgacagacgagagactattttttttggtgtgtgtatgatatgcgatatagccggtggcggtggggttgccatctctatctcggcgtgcagtcagtcagtcacagactccagcgagcgagggaccaaaaccctagctgaaccctcccggcccgcgcagcaactgcgtccatggaggtggacccctcgccgtcgtcgcgctcgcccaggccgccgcctccgccgctggcggcgatgccgagctacttcgacccggagtcgtccggccgtcgggaggagtaccgccgctacaggaagaggttgtcttcttcaaatgtctctcctctgctgggaagatcactctccaagacctctggaccaaggctgttatatgatggagaaagcatcccaagacagcctaatgccggtttactccttgaagacataaagcaggaagctgccgattattccaacgtagaaagcttggatggattgagactgttcggttcgccgaaaaggacatctctcgatggcggttctgcatcaggcgcagcttacagttcgggcaggcaagcagtgaggcagacgctgaagccagtcaaactggaggacgatatgtatgtgccacatgaaggagaaacgccttctacaatgtttgcaactctccttgattctgggatccaaggtttgatgcacttccctgatgtaattcaacaatttgagaggacatgtcgaaatgcttcggagtcaatcagatctgctgcaactggaaagcttcgtgtggtggaagagaaacttatgcagcaaaatgctcaacttttactggacgaagctgcttcctggtcacttctttggcacatatatggcaaagaacatgaggagctttctggagagctgttggtgccgccaattacatctcatcaggaggcttgccgctttgttgcagcagacattacagcacaactgtgtctgcggatcatactttggcttgaaggtcttgcttctgaagctcttgatttggagaagaaggtgagaggacctcatgttggttcgtacctaccaagttctggtgtttggcaccgtacacagaggtacctaaaaaggaacaatgctgattctactatagtgaagcatgtggattttgatgctccaactcgtgaaggggcccaacttcttcctgatgacaagaagcaagatgaattgcttctagaagatatatggactcttttaagagcaggaagattagaagaggcatctgacttgtgccgttctgctggccaggcatggagagttgccactctttgtccttttggcggcataaatatgttcccttccctgaatgcattgcacaaaaatggaaagtacagaacactacaagccatggaattagaaagtggtgttgggcggcagtggcgtctttggaaatgggcatcatattgtgcttcagagaaaatcgctgagcaagatggaggccgttatgagatggctgtatatgctttacaatgcagtaacttaaagcgtgtcttgccaatctgtactgactgggagtcagcttgttgggcaatggcaagatcctggctagatgttcaagtggatctagaattatctcagtaccaaacaagtagaccagaaaagcaacttgatgacgacatgaatggagcccaaagttcagttggtccagaaagttggccataccatgttcttgatcagcaacctcatgatttaactgctcttctgcagaaactccactcaagtgaccttgttcatgaaactgtctctcgagcatgccgagagcagcatcgacaaattcagatgaatctcatgagtggaaatatatctcatcttcttgaccttctatggtcatggttatcacctgctgaagagaaccataataatactgcaaggccccttgatgaccctgagatgatacggttcggggcgcatattgttcttgtgctgaggcaccttttcagtgatgggatggatgatgagttagatgaaaaactggttactgtcggtgatctcatcatcaacatgtacgtgaggtatttgttctcagaggatcaagaggagttggttggaatatatgcctcacagcttcaacatgacctttgcattactttgtttgtagaaatgatggaactaaggttaaatagcagtttgcatactatgtacaagctcttcctttctgctgtggagtatctgccattctcatctgataatgtatccaaggcttgttttgaagagatcatcgagagggtgctttcaagatctcggcaaacaaaacccactaagtatgatggggatttctctgatgttgcgcatcaacatcacctgcaatcacttcaaaaggctatggttattcagtggctttgcttcacaccaccatcctcgattccagactttcaaatgatcagttggaagcttctgatacgggcattgacacatagcaatacactgttcagggagttttctctgatatcaatgaggagagtccctgagctaccagcagggccacacaagttgcttgccattttagctgaaccgttaaagcaaaaagaaaatttaatttcacgggaagatccggaggtatctgataacttgccggagtttgaagattggcatgaatattactcccttgacgcgacttaccgcagttggcttaaaattgagatgatgaatgccgctgtttctcctgagatgctttcggcagaggaaaagggtcaagctgttgctgcagctaaagaaacactgaacttggcatgttcgttactacgcagggatggaagaccatggctgtatgctgtcgagagcagtccatttgaatcccccgatgttattttccttgagctgcatgcttctgcaatgctctgcctaccttctggagaatgtatgttaccagatgcaacatcatgcacagctttgacaagtgcactatattcaactgtcagtgaagatgatgtgctgcatcgcctgttgaaggtggatgtccaggtctcttctagagacccctgctgtattgaagtcgctcttcgctgcttagcagcagaaggtgatggatatgggcttcatgaagccaacgatggaggtcttcttgctgcagtcatggctgctggctttaaaggtgaactcagtcggttccaacctggagtttcgatggcaatttcacggcttgatgcttggtattctgaccggagtggttccgtggagagcaccgctgcttacataattcgagggctgtgtcggaggtgctgccttcctgaaacaattctaagatctatgcaggcatgtatcgcactctccgcggctggtgatgatctagattactctctagataaatgtgacgaacttgttgagttagttggttcagccgagtctggaatgatgcatttgttcagccagcagcagttgcaggagttcctgattttcgagagggaatatctcatatgtacaatggagtttgaggaggaccggttgccttgtgatggctaagctttttccccacttgctgactaatccatgagacatgaccggcatgtgcattttgtggcgccgtgacccaagaacctgctgtgatgtatcgctacaccatttcaaagcgaaaagatggaatttagtgcgtaacgtggttctgcccgtttgtgcacgagaattggcccgttttggagagtcaatataagattattcaagtcgaaatccaagatttttgttcatgataaaaacaatgttcggcaagcctttttgtcccgcccgtgctacgcgcactccgcctcggctgcttttgcatcgatccgatctgccgtccctggacacgctgcagctgacaagggtcaccggcagttccatcccaaaggctgcgaaggcgcacacaagccaagttctactcaacatcgttccctaatcatggtagtaagcacactctgcagccgcttgccacttctacccaacatcatcgtcctcctcttgttcacaaccatttccgactccacgaacagcaacagcgatctcaatgcactcttgtcattcaaatccctcataacaaaggacccaatgggtgcactgtcatcttgggatggggacgcttctaacaggagcgctcctcatttctgccggtggaacggcgtgacgtgcagcagcgaccagcacggcagccatgtcactgccttgcgcctgcgagccttcggtctggaaggcaacatctcccagtcgcttgggaatcttagccacctccaaaccctggatctgtcgaacaacaacctagagggcgagataccttccagtatcggtaacttgtttgctctccattttctcaacctaagtgttaaccacctgtccgggaacgttcctcagtccatcggccgtctttccgaactcgaaattctgaatttccgcgacaatgacatcgtaggaagcatcccttcttcagtgctgaaccttacaggactcacaatgcttagtgccaccgaaaactacatgacagggaggattccagattggttggggaacttgacagatctgacagatttgaacttggcatggaataacttcagtggacagatcccacaagctttagcggacccatttcccaacagatcaggctcttgatcagtcttggtacaatggatctctcaagcaataatttatctggtgagattccacatacccttggtagctgtgttacactgcagttcctgtatttgcaaggaaacctcctacaaggtcaaataccagtggaactgaatgcactaagaggcttagaagttttggatatctcaagcaacaacctgtcaggacccattcctgattttcttggtgacttccaagttctcaagaagctgaacctatcattcaataacctatctggtccggtgcttgatcgaggtatcttccacaataatgccacctctgtttcactttctggtaatgccatgctttgtggagggcctggtttctttcaacttccaccatgctcaactcaagcaacctatggccgttccaatcatcaacgaatgcatgtcttggccttttcctttactggagctttagtagtctttgtgtgcatcactgtatgctacttcatgaaaagggcatctgacaaagcaagtgatgctgagcatgggttagttacgcttcctagaaacaaatacaagaggatatcatatgctgagttatatgaagctacagattcattttccgattcaaatctggttggtcgtggaagatttggtactgtatataaaggaattctacatgatgacagtaatacagaaactgtagcagtaaaggtactcgatcttaagcaacaaggagctagtaggaccttctttactgagtgtgatgccctcaaaagaattaaacatcgtaaactggtcaaggttataactgtgtgcgacagcttggataacaacggtgatgaattcaaggcgcttgtgctggaattcattcccaatggaaccttggatgaatggttgcacccaagtgcacttgtcaccaacagagcaactgggagtctaagcatcattcagaggttaaacatcgctcttgatgtggcagaagcattggcatatcttcatcaccacagcaatccatcaattgtccactgcgatattaaaccaagcaacattctacttgatgaaaatatgactgcacatgttggtgactttggtttagcaagaattctaaacatggatgcatgtgaacataattctggtggaagtagctcggctggaattcgaggcacaattgggtaccttgcaccagagcatgccatgggactcagagttggtgtagaggccgaggtatacagctatggagtgctgctgatggagatacttactaaactaagaccaacagatcatatgtcttttgatggggccacaagccttgtaaagcatgtcgagatggcatacccttacaggctgctggaaatactggatgatataatgctacaaggaagcacaagtcacagcacacaagagacgatggatatggtcatcattcctgtcgtgagaataggactagcttgttgcaggactgctgcaagccagcgaattaggatggacgaggtggtgaaagaactcaatgacattaagaagacatgggaagaccatttcgcagaaatcaccggggcaaccggcagagcggcggatggacgagcaatccattgatggaaggtggcacaagcgcaatggcaaagcacacgcccagcctgtgcacttgccagcttgctccgaatagagagagacagcctacacacggctgctggttctactcagtattttgcctagaaaattgagatccagttatatgtatatgttatatgggtacttgttgaatattgcaaccaaa

SEQ ID NO: 24636 - DNA, 1890 bp, Zea Mays
ccacgatagggttacggcagcagccacctccagtttccttttgttgacgatcgccgaccgcccgtcgtaacatcaacgggcgtgatgccctcacatcccttcctcggaccgtgccatccccatcctctacgtccccacgcgcgcggcgctctgtcacattcccgactcgataaacccttctctcgtccgcctccgcgcctcactccctctcctcctctgcttcgtcttccccacccgcggcgcgcagcacacccaaaaccgtaaccctagattgcaagaggacatgaccagcaagtttgggctcgccggcggcatcccggagcggcgggtgagaccgatctgggacgcagtcgactcacgccagtacaagcccgcgctcaagctctgcaccgcgctcctcgccaagcaccctacatccccctacgcgctcgccctcaaggctcttattctggagaggatgggaaagcctgatgaagcattgagcggggccctgaatgctaaggagctattgtattcagacaacatttttcattttgatgatcttacacttagcactctacagatagtatttcaaaggcttgaccgattggatcttgctacttcatgctatgagtatgcctgtacaaagtatccaagtaacttggaattaatgatggggctttttaattgctatgttcgagagtactcatacgtgaaacaacagcagacagctctcaaaatgtacaaaactgtaggagaagaaaggtttttgctttgggctgtttgcagcattcagctgcaggtgcattttagcagtggtggtgtgaaattattggcactagccgaagcattgctgaagaagcacataaattctcatagtttacatgagccagaagcactttctctctatgtttcaattttggagcaagagaaaaagtatgacactgctttggaagttctttctggagacttgggatctcttcttggaagggaggaggacaagcttcgtttgcagggatgtcttcttgctcaagcgagtagctatctgtctgcttctgaaatataccagaaggttctggagtcttgtcctgatgactgggagtcctttctccattatataggatgtttgctggagcatgatgtgaatctccctaaaccatccactggcgaacacacttgtccttcttgctctgttgattcagcattatccaacaagacttctcttgacaaggagctggttgaatctcgccttacaagtgcgttgtcatttgtgcaaagtctacaagaaaataactcaagcgattgtgtcagaggacctcatctggcaaaaattgaaattgaacggcagcggtgcctcaatggaaacccagataatatcaagcttatggaagctttggtgcagtacctccacagatttggtcatttgtcttgctcagcatctgatgttgaaatttaccttcacatgctatccaacaatgagatatctgagctgctagatgaaattactagatcttttgatgcatcatcaatttcagttaacacactgggttcaacaattactcttttcaaggtccaggaacttttgggaacttcattcacaaaaccaacttcagaacttgagggcattgcaaaaagaatggttgataccttttacaaaaacctgcctctatcaaattacttggatcctcaggaaagcatgtacggtgaagagcttctgtcaatggccagcagtatccttgtgcagctatactggcgcaccagggatttaggatacctacttgaagcaattttgatactggagtttggattgactgttcgcaagtatgtctggcaatacaaggttactctggtccatctgtactcttacctgggggcacttcctttagcacataaatggtaatttctcctttg

SEQ ID NO: 24637 - DNA, 211 bp, Zea Mays
ccgtcaacgagtcgggttgtttgggaatgcagcccaaatcgggcggtaaactccgtccaaggctaaatacaggcgagagaccgatagcgaacaagtaccgtgagggaaagatgaaaaggactttgaaaagagagtcaaagagtgcttgaaattgccaggagggaagaggatgggggctggcgacgcgcaccggccgtatgcggaatggctc

SEQ ID NO: 24638 - DNA, 995 bp, Zea Mays
gaaaaattcctcttctcccaccagcagccgccgcatagggatcctggcctccaccatccgccaagcacctcccatccattgtcttcaacctctagctcgtgagcccctctcttctctgatccatggtgcagccctctgctccttttccttgtgggtgctggcttcctcctccagcgaccagcactagggagcaccaccccttcccttccccaggaacgacgagctcctctctactcccagcaacttccatggccgtcggcccctacgagctccctgctccacgcgccctcagccatggcgcacgacccctgctcctccatggccgccaatcatcagccgttcggcactccggaccatccatggcatgcgacccctccacgccggtgtcgagctccaccatccgctcctctaccacccatctcccacacggtatgctagacatggaacacatggacatgaacgacgtggtgttggagacaaacccgaagatgatggaccgatcaaggggacgttcatcaagcagatgtcatctaaccaaaaacactaacctagtgtttgattccaagcaagccctgacatctaattaccatggtttgcaataattgttttattcgcctaccatcctatgattgttgcattaggttgcaggagttgtttggaaacaattgctgcatttatctttgattacctttggttatcgctatccttgtcacctgggtaaattacttaaatgcttaggcctgcttagacgataaaagtcgggtgatttcttgtcacctgcaaggtacttgtgcttaccttatgcttgatttgggtaaagtcatcgtgaaatatcaatgaataatatgaaggttaatatgagactagacgagatgcagataaggaaacacaaggcatgtaggtcttggttaatatgagactagttgtggtccctcgagtcatattgaacgcatgcctaatcacttagttggccggataactcgtttcgaccgcga

SEQ ID NO: 24639 - DNA, 1373 bp, Zea Mays
cgagaacttggctttaatgcaaatgcgaataaatttagtgccttctaggatgcaggtgttcatgctttatcaaatgtttgtcatgttgatgttgagcggataagtaaaaggaagcctggcgaagttttaacacctcatgagcctggagttgtaaaacgtgctgtgaaccactttctactgaagagtgaaggtgacataatggtgactgatgtctgctgtgttgcaccagattttcatgctagatacaaatctctagagcgcacatatcactatcgcttgcttgctggacctgaatcaacatctgtttttgagaaaaactctgtttggcatatatctgaagatttggatattcagtcaatgaagaaagcatgcagcatacttgttgggcatcatgatttcagttcatttcgagcggctggatgtcaggcaaactctccagtgcgaactctggatgaacttagtgttacagaagtattccctttcatgttttttccttcaagtgtagaaagatcagagttggaattatcaaatgtctctcttgtttattcaaggaaaccagacatggaatcttctgggaaaggatctgatggttcctgtaccagtagtgtgaaatcagattttgagaatggaaaagattttggaaagcggtcaaggcaccgttgctttgttgttactgcaagggcacggtcttttctttaccaccaggtaaggttgatggtcggtcttctaaaatctgttgggactggagatctaacaactgcagatgttgagagaattctggatgcaaagacggttactgctgcacccagtatggcaccttcttgtggtctgtaccttgctaacgttaaatatgatctgaatacctgaagacaagttttatctagtggcttctgttggtgggcctccagattttgtcagctgttggctatcaaaggaattatatgctgccacttgccaaagctttcagttgcctgttttgtccactgaatcttgcatggtgattgaaaacctagaattaagtttatctgtcagcacaagagccggcttcattctcttcttgtacacagagctcttctgcatgttcagaaacaaaataggtagcttcattttagttaagttcaactatccactctttaaatttcagctggatccacccgattttgttgggtgtacgtagatttgacctggtaggggcaaaattttatttcttggttttctcatgactgtacttggttcttgatatataattaattagccaaatgcgttgtgtgcatattgaaaatattcttttctgttccttgataaattacatcgagcaagactgcaagagaactttcttcaagaaaatattcttttctgttccttgataaatt

SEQ ID NO: 24640 - DNA, 976 bp, Zea Mays
ctagtcttatgactgttttgttgaaggcgtgatatgtggcatggacccggtgtgctgtgaatccaagtcctggatggagacagcaaacgtggagaagctgtctaagggtccaaatcaacctttttatcaggtcctggttgatgtatatgttgatccagaactgctggttgcatatgtcgcagaagaaaatctttctgcagctgaagaatcagaaaaaggaaggtttgatcacccctacattgagtttctcttttacggtgaggacacagctggggatttcattcctatcaagcagctccgtgagaagtatgaccagccacgctatgaagcttctggagatgaaagtgacaacgatggcaacacaaatagctaaaggtcaaggtaatcacttaaaatggtatttgtgcatcatcaaactgacctgcaaacttagtttcaatccctgtctgtgcagtgccttcgtgttgctagagttgttttggaaccattttgattcacctccaccaactcagatgtgaagtgctgaactatctggtacagatgcagatgtaagacaaggcaaccattggcgaactgggcatcctcagtaacctgcagtaattctctgcatatgccgtccaaccttgcagatcgaaaattactcttttagagttttaccgtcaccaatcgattaagccatgcttgagataagctacgtgtgccttgcttttacattataataccatcgataaatataaacgaaggaaagaaaggaagaaagaaagaaagaaaaaaatatatatccctatggatgttctgtgtatagttctctgagatctatctagttctgtactgtaccctctggtggacaattgtgcatatgtaacactggcaacttgtgtggagtctcgaataaattacgcgaagacttcacatgcagttgtttggactctgcattcatggaatcaatcatgtggaaataacattttttgttgac

SEQ ID NO: 24641 - DNA, 1891 bp, Zea Mays
tatatatctaaagtttggatcttttaatggtatagatccaattgttcctttttcataagctgcaggagccttgcctaatcctccgtgccatgccgatgggcagggcagggcaagaggaggtcacgaaaacgaagggtgccacccaccgcaaatcccggcgggattgaactgagctcctttcctccgtgcccttgaatgcaaccacctcccgaatcccatcttcttcatctcgctgcggcctccctcctcctccactggagccgacacttgatccattccccatccccatcccacgcggccaccaccaccttctcctcctccccctctccatatctctctctctccgggcaaggaggaagaggagcagtagatcagtcgtagcaataaatccgtcacgcccagctcgcctgctccgcctcgccattgccttgctccaaccaagcaggagtagatgaaggggctgagcggggcgaagctgctggtcgtgcacccgtcgtccaacaagtcgcccggcggcgcggggtcgcccggggcggttctgggcgcgcggcgccgggtgtgcgccgccgtgttcctggcctgcttcgcgtgcgtctccctggccaccacgctgctgtcggccgcgcgggaccccgctggcgcgggggcgaggtcggcggcgttcgcggtgccggtcgccgcggcagcgagggagggccagggcctgccggggcacgtgttcgacgcgctggtgcagtacgcgtcggcgggcgggaactcgacggcgagcatgccgggcgccgacgtgcgcgccatcgccgccgtgctcaggcgccgcgcgccgtgcagcctgctcgtgttcgggctcggcgcggagacgccgctgtggcgcgctctcaaccacggcggccgcaccgtgttcctcgacgagaaccagtactacgtgtcccacctggagggccgccacccggggctggaggcctacgacgtcgcctacaccaccaccgtccgcgagttcccggacctgcttgactccgcccgcgccgcgcggggcgccgagtgccggcccgtccagaacctcctcttctccgactgccgcctcgccatcaacgacctccccaaccagctctacgacgtctcctgggacgtcatcctcgtcgacggcccgcgcgggatgtcggcgatattcacggcgggggtgctggcgcggacgcgggccggggagggcgtgaagacggacgtcctggtgcacgactacgagcgggaggtggagcgggcgtgctccagggagttcctgtgcgaggagaaccgcgtcgtcgagaccagcacgcggtcgctcgcccactttgtcgtgcgcggcggtagttctgcccgccgggacgccttctgctccggcacggcggcggcccactagcttcactcttccccgtcactcacctcacctcacctcacctgttcttctacttttttttttcttaaaaaaaacctctctcgatctcgatcacggttaatgatgatgatgcttgtcatgtgaatgcggaaaaaagatgaaaaagtgagcggtgaagcctgtaaaaattgggtgtgacgaaaagaaagaagcagaggaatgtgtctctgtccttgacgactccacgccacggtgcccggtctcattctctgcccgacacggattcattttcatctcctcgcgttagctcaacgcaaccacaaaccagaaccataaatattcctcgcaaagaagcacaaaagccacgggcaatgaaacgtggcattcccaagtcgagctcaacattgcaattgatcgggataagatgaacttgggggcggctttgaacaatgccactactctagaaatgatcgctctcacatcaggtacgcacagtacaccagcggcggcagaccagaccag

SEQ ID NO: 24642 - DNA, 1548 bp, Zea Mays
atctcgggcgctactgatggaatatggatgggcaggcgaaagagcaggaggagcagaagaagcgcggtttgctgacgtctccatcccatcatgtattatcctcagcctaccgtctccttggcggcggcggttgccctcctccgcccctcactccgccgccactctcaaagggcgtcatcccttctccgctcctccacgccgcctccatgggttagtgcgaggaggaggacggccgtctccgacgacttcttcaccgtcgagttggacgctactggagtggaaccggaaccggattccatcgacgacgggctcccctctccatgggagggagctgtcgtctaccgccgcgacgctgccgtccagcacctcgagtacgccagcacgctggagcgcctcggcctaggggacctctcctcccccgactcccgcgcgcgcgccgctgacctgggcctggctggagggaccctggacagcactggcgcgcagcctcggacccccgtgctcgtctccgtcgacgtgaccaggcgccgcggccgcctgcgcctggacggcatcgtgcgcaccgtcatcaccctcggctgcttcagaagacccagtagaggaggaaccagacctcggcacgatttttcaagaggacgacgacaaaggtggtgcttcgctagcctgcgccatggatggagatcaagatatcgactgggatgaccggctgcatttcccagcagctgacaaggaaatcgatatatccaagcacatccgggacatgattcatctggagatcaccttggatgcagtgtgcaaccccaactgcaagggtctatgccttacctgcggcgcaaacctcaacaccaccagcagctgcacatgcaagcccaggaacgtccaaggactttctcctctcaaaggggttttcaagtgatgatgcggataccaaagtttgtacaaccagcccaacttcatgtcatgctgtgagcctgtgacttctagattcatataatcgcaaatatgcattgaaacttcacatttatagattcacatccgcagatgacaaaataccaaatcgacttcatatatcttatgttcttcattgtaacaaaccaccaaagatgaaaaatcttaacaaccattttataaatattatcactcatcaatgttagattattctgtgtttctgatgtaatggccttgtgaaagggcctctagccgagttggttaggtggtctgagtagcactccttgggtcctcaggctgtggttaaaaaaaaaatccccttttctatgccacgccaaaacacaggtctaagtctcagccctcatcacggtcgttctcacatgggcttcgatgccgatgtgtatgtgtgggacatgggtttggaggttttctcgacctgtgtgagaatatcttcttaatacaaaactcgagggttgtcttaccctctgtaggtcaattttttttatgtaatgaccttcggcctagtctgtatactattcccatgcatgcctaccctaatcaaggttaagtcctctaacatggtatcaagtcaggttttct

SEQ ID NO: 24643 - DNA, 3128 bp, Zea Mays
ccggttccgacctcccaggctcccacttcctctgcaagtcgcagcgcaaagcggaagcaggatttcaaaaaccctacctccctaccctactccgcacacaccccgatctccctcccccacccagatcgccggcccgcggcggcgcgaaatggaggtgccgccggagatgctcgacgccctcgcgggctggttcgggcagtcgctctcacccgacgccgccgtgcgccgcgccgccgagcagagcatctcttccgctacctcttccccaggcttcgcgctcgcgctcctcggcctcgccgcctccccgcgccacgatctccaggcccgcctcgccgcctccgtccactttaagaacctgctccgccgccggtggcccaagcccgacgccgacgccgacgctgacgccgactacctccccgcctccgactgcgccatcatcaaggcacaccttctccagctcctcctcaccgccccgcccctcatccaggcgcagctctccgaggccctcgccgccgcggcggcctccgatttccccgccaggtgggagtcgctcctcccgtctattgtgtcctccctaggcagtgccgtcaacgcgggggacatcgccgccaccaactccctcctcaccgccgtggtgtcgctcttctcccgcttccgcaacgcattcgacaacaatgccctccgcctcgacctcaagtactgccttgacatctttgccgccccactcctcgaggtcttcctcttcgcctcccgccgccttcaggccaccgccaccacggccaacccgctcgagctccgccccgtgtttgagtgcctccgcctctgctgcgagatcttctactcgcttaactccatcgacctgcctgaattcttcgaggataacatgcgccagtggatgacagagttccgaactttcgttaccacatcctactcaccgcctgttgaggcagatggtgcccctgatgcgctccgtgctgctgtctgtgataacctgcagctttatatggagaagtacgaggaggagtttaggggatacctgaaggagtttgttgaggccgtgtgggggctcctcatggcgcagaccacctctccatcccgtgcacagcttgctgttactgcgataaggttcttgactacagttgctgagagtgtgcaccatgccttatttgggagtcctgaagcaatgaagcagatatgtgatagtgttgttgtgcctaacttgcgcctgcgggatgaggatgaggagttgtttgagtgcaattgggtggaatatgttaggcgtgactctgagggtagcgatgcagatacgctcagacgggcagcgtgccggttgctgcgaggccttgcagcgaactaccgggagcaggtggctgcactcgtgtcagcacaggtccagcagatgttggcagcatatgccgcgaatcgggcaaacaactggaaggagaaggatgctgcaatataccttgttattgctcttatgcagaagcctggtgccacaggtggcggcacagcggtggttgacatggagagcttctttacatctgtgattgtgcctgagctccaggctcctgattggcagtctgagccaatgttgaaggcaactgtgctcaggttcttgaaggagttcagggatcagatccccaaagccactgcattggcactcctgccaagtgtagtgaggtttctgacacatgagtctaatgttgttcattcatatgctgcaacttttatcgagaacctgctgatcatcaaggatgctatcccagtaccaggggtgaccacagtaaccaggtctccacgttttgttgctgctgatatcaatccatttgccccacagatcattcagaacctgtccacagcactaggtttccctgattcatatgagaacccctacctgatgaagtgcctgatgcgggtgcttgggattgctaatatagctggtcaaattgttcatgagatcactgctcgacttgtgggtattctcatggaagtgtgcaataaccccaagaaccctgacttcaaccactacttgtttgaggctctggcagcagttattggccggactggtgagcaggacccagcgctactccctgcttttgaggccagcctcttcccagtgctccagaggatattggtcgaggacatctcagagttctggccatatgcttttcagatatttgcacaactcgtcaatttgagccgaccacctctctcgcagaactatatgcagctatttggtgttctcctcagtaatgccacctgggaccggccaccatgtgttcctgccttggttcgcttgctgcgagcattccttaggaaaattccaaatgagctaaaccaagagggcaggcttccaaatatcttggcaatatcccgtagtctcctctcacgcagcagcactgaagattctgctttctacatgctgaacacaatagtggaaaacgttggttttgacatactgaacccatatataactgagatatggagtgctttgtttactcggttacagactagacaggcagtgaaatatgtgaactctcttgtggttttcatgtcgctagtgctggtcaaatatggatcaagtgttcttgtcagttccgttgattcaattcagccaaatcttttcacccaaatccttcagcgattttggattcccaacctcaaattgatcaaaggtgctcttgaagttaagttgacagcagttgcttcgacaaagctgctttgtgagtctgcggtgctgttggatgctgctgcagctcagttatggggtaaattacttgatagtattgtcacactgttgtccagaacgaatcaagatggaacacaagagcaaaatgatggtactgatgcagtggatattcagaagacatcaagttattctgtctcatttgtacggcttcaatatgctggaaagagtgaagatgaccttttgaaagaagtaaatgatccaaaacagtttgtggtcacatccttggccacactttctgcccagtttcctgggaggtttggacttgtcattgagcagcatgtggacccagcgaacaaaagtgtgcttcttcaactttgtgcagcctacagtgccaacattgtctagccagaaacttcaatggttgcacatcttgtctctc

SEQ ID NO: 24644 - DNA, 2568 bp, Zea Mays
cccgcactcaccaacagaaagggaaaagaccatcctacccacgccagctccggagttccgacgcaacttcccattccgatccacatcagccccgtcgctgtctctccaggatctggagaccctacccgcctgagccctcagccggccgcgcggtgcggcaccgcaccaccgccaccgagccacgaacccgccggagtaccgacccgcctgcgccctccgctggccgtgcggcgtggcagcgcaccacctacggcgggctgcggcaccgccccggccctcgcaccagttccgcggcgacgtggtccagcagcaccgccaggccgcctacggccatttcactcgcggcttctgagcatctacctgcacttcttcaattacctgcagctttcatcgtatttcctttgcattgcataccgtgcagccacctctgcacatgatgtttcggatgttatcttattattaaaaaactagatttactcatgtttttcttcctctgtcattattgctgatttggtaactaatctttctgtggggtttatgcactgttaatttttccctgtcattttaggtctaatttgtattcgacactctcatcgtagtaactgcctcataggttttgtgccctctgtatacatctctatcggctccatgtccaaggcactgcaccacccttttgttatcaggttttaaaccggcttttggaattgtacacatggatcaatttgtgggagtggaaattagagcagatttctgtgcttttttttttccagcacatctgccagactagtatcatcagcaattgtccatcgcagcataggttccgagacagcctgatggtcaagagagagatagtttacgtacctgcaagtgtgctcaggcaggctggccccggccggtctaattctgcagcctcgcatcgccaaacagagcatcaaatctttatctgagagcgactccgtgtctgaaggattggtgctcacgtcgcgacatccaaagccagccacaagataggcacacagcgctgctccgcaccaagaatgacgccaagtgtcacgccctggattcctctggcacccaccctcctattagtactctgcactggacttgcagcgctgtggatccatcactgcaacttcatggattataattttgacaccagcgtcctcgacgaggacgtcgccgggagaggaggcagggaagggagctgcccgccagcatgggccagggcgtgcgacgggtgccgcgcagcccccagcgtggtgtactgccatgcggacaccgcgtacctgtgcgcgtcatgcaactcgcgggtgcatgccgccaatcgcgtggcctcgcgccatgagcgcgtgcgcgtctgcgaggcctgcgagtgcgcccccgcggtgctcgcgtgccgcgccgacgcggcggcgctctgcgctgcctgcgacgcgcaggtccactccgccaacccgcttgcggggaggcaccagcgcgtgcccgtcctgccgctcccggccgccgccgtcccggctgcctctgtgctcgccgaggcagctgccaccgccgcggccgttgctggtgacaaggacgaggaggtcgactcctggctgctgctcaccaaggacccagacgacgacgacaagaaccacaactgcagtagcaacaacaacaacatcagcagcaacaccagcacgttctacgcagacgttgacgagtacttcgatctggtcgggtacagttcctactgtgacaaccacatcaatagcaacacgaaacagtacgggatgcaagagcagcagctcctgctgcacaaggagtttggagacaaggagggaagcgagtacgtggtgccttcacaggtcgggcagcagcagagtggctatcacagagttattgggacggagcaggctgcctccatgactcccggggtcagtgcttacacagattccatcagcaacagcatctctttctcatcgtcaatggaggtgggtatagtaccagacaacatggcaacgacagacatgccaagctccggcatcctgctgacgcctgctggggccatcagcctgttctcgtcgggtcctccgctccagatgccgcttcacttggcctccatggacagggaggccagggtgctgaggtacagggagaagaagaagagcaggaagtttgagaagaccatacggtatgcaacgaggaagacgtacgcagaagcacggccgaggatcaagggacgcttcgcgaaaagatcgtctgatatggatgtcgaagtggatcagatgttctcagctgcggctctgtcgtctgatggtagctatggtaccgttccatggttctgaaggaactttagtgagacattatatgtatcatacagtataataattgtaacatgcgttgaccatatatagtggtaaggtcaagtacaagtagttctaggaaaccgatggtaatgagtgatattgtgtttgttttgaaagataaatgaacaaatatcttagcatttgagttttggtttgtaattgcatgcacatatcaggtctatacagaattttcagtcacttaaacatttttcactgaacagat

SEQ ID NO: 24645 - DNA, 3731 bp, Zea Mays
accaacaacggcccaactcctactctcaggcccggcccactcggttttcttccacgccagtacgccaccgtccccatcagtttcgccgctttcgattccattgcaacttcagcttgaactcggaagcagtcagcgactcacctcgtcgtcgcccggtcgccgtgcacgtagatgttcgccaagcggctcttccacagggcactcggagtaggaagaggaggaggaggaggagcctcagcaccagcggcatcaccagcggatgccatccaaatggacgcgcagatctcgactcactgcggggtgccatacacagcttcactactcgccttcgatcccgtccagcgcctcctcgctgtcgcaactctggatggtaggataaaaatatttggcggtgataacattgaaggcctccttatatcaccgaagagtgtgccgtacaagtttttgcagtttattacaaaccagggacttctggttgcaatttccaatgaaaatgaaatccaggtatggaatcttgagttcaggcaactattttattcgtcacagtgggatgtcaacattactgcttttgcagtcatagagaggacctttatgatgtatcttggagatgagaatggccttctttctgtattgaagtatgatgtagatgatgggaagcttcaaataatgccatacaatgttcatatccattctctaatcgaaagatctggtgtttcgttacaggatcctcaacctattgttggaatactgatccagcctgacacttttgggacaaggttgctaattgcatatgagagagggttgttggttctttgggatgtatctgaggaccgtgcagtttctgtcagaggctatggggatttacgcatgaagggtcaaatcaatggtgctcagggggattctggtgaagatcaactaaatactactattgatgacagtgaagaagaaagagaaatttgctctctttgttgggcttcaagagagggctcaactgttgcggtgggctatataacaggtgacatacttctatgggatatgactacaaaatcctccagacaagagaagcaaagtgatgtttcatctaatgttgttaagctacagctggcctcagggagtcgtaggcttcctgttattgtcttgcattggtctgctgggtcagcagtacattctaataaaggagggcatctttttgtttatggcggcgatgatatgggatctgaagaagttctcacggttcttagcctggaatcaactgctggattagaatcagtgagatgcatgtcacgaactgatctcaaacttgatggatcatttgctgatatgattcttattcctgatactggggttcctgataaaagcagaacttctgcactttttattttgacaaatcctggacagctgaatttttatgatggtggctctctattttctgtgcaaaactcaaaagagggaactcctcttcctgaagcacagaaatttccagtcgcaattcctacccttgatcccaacataacggtcactggtctttattcgctaaccgaaagtgaatttccaaatatttcactgaagaaattttgtgctaggaaaaatgctgggcatttcatatcagagaacatgaaatggcctttgactggtggggttccaaatgagatgtcactggacgaagatcatgctgttgaaagaatatacattgcaggctaccaagatggttctgtgagaatatgggatgcaacatttcctgttctaatgccaatgtttgtcttggatggaaatgttgctgatgttaatttggatggagctaatgcttctgtatcatctctagccttttgttcattaagcatgactttggctgttgggacaacaagtggtctggtgcgcatctataaactccgagaacacactgggggttcaagcttccattttgtgagtgaatttaagcaagaagttcatgttgttcatcatgggaaaggatttcattgttatgttgcctttttgtcagcaaattcctcagtgctatctctattatttatggcttcaggtggcctccttgctgcaggctatcagaatggtcaggtggcaatgcttgatccaagtcagttatcaattctattcactgtagatggtgcatcaggaacaaattctcctgttgtttccttgggcatctacagtgttgctgcatctgctgcaaaagcagatcaatcaaagaaagataatcctcaaaatgcaacgttatccagagatgttcttctttccttgacaaaggatgctcgtgttactgtacttgactgtacaacgggtgtgatgataaattcacatatcatacatcagaagcaatcatctgctatttccatgtatgtcatagatgcagagtcagacgagacacaaacccaattatcagaggacaaaattccaagtcaaggtcagacagggaaagatggcaatgatcttgacaaaatacaaacccaaggaattgaaaagcacctgaaaaatgcttcccagctttcgcaaaatggtggttcagattcactccttgtggtgtgctgcgaggatgttttgcttttgttatccctggcgtcattgattcagggaagcagcaagcatctacagaagacgaaacttgcaaaaccttgttgctggtcagcagttttcaaaaacatggatgacaaagtttgtgggctgatattagcttatcagactggcactatagaaatgaggtttgggccagatctggctattgttgctgagacctctttgatgtcattattgcgatggagttacaagacaggcatggaaaaatccacaagctcctcaaatggacaagttactttggtaaatggatctgaatttgcgattatctctcttatggcctcagagaatgacttgaggattccagaatctctgccatgccttcatgacaaagtacttgcagcagctgcggaagcagctatgagtttctcaactgatcagagaagaaagcagaatccagcagcagggattattggtggcttcattaaaggaatgaaaggcaaggctgaagaaaatgcaaaaatgagagaaagtttgacattgcgagctccaagcgaacagttggagtcaattttctcgaaagaaccatttgctgaaccttcaatacccgaccttgatgatccgatggaagaactgtcaatcgatgacatagagattgacgatgaagtagcagtagccctggcacaagcagcatcgtccacatcccaagggaataagagaacagcagtggaggaggagagagcgaagctgtttgaagggtcaaacagtgcggataaaccgagaatgagaacgcagcaggagattctaaccaaatataggtttggcggggacgccgccgccgcagctgctcatgcgaaggataagctgatgcagaggcaggagaaactggagagaattagccaacaaaccgcggagcttcagaatggagcggagaactttgcttccctggcgcaggagctcgcgaaaacaatggagaacaagaagtggtggaagctataaactgggtttgtttgtacgtatgtgtgttgttggatgccacccgtcgttgcgaattgggacacataccagcattaccatttttttgtgtccgtattaatcactttggatattctttttgtgttttggtgatgtacgtgtaaagataaaaaagagagaatgaaaggaaccctcttctcctggctatatgagcgagtctcttattcgtc

SEQ ID NO: 24646 - DNA, 196 bp, Zea Mays
atgccctcggccccggccgcccccgccccctgccccggccgcagatgcccctgccgcgcccggccacaactgcggacgcccccaccacggacgcccccgccctcggccccggtcgcccctaccgcatccggccgcccccgccgcggacacccccgccaacaagtacgccagctttgcactgggatatatgagaaat

SEQ ID NO: 24647 - DNA, 681 bp, Zea Mays
tattatgaacaaaagggctcatgctgctttacactgacacaattctccaaatgaaattgcagatcaatctcccccaaaacggccacgttatgataaggaagatgaggaactccttgagaaggtaaattctcaggaggtaacggagatgacatttagagactgcttgactcagcatgttgaacaggtcgactatgaaatggcgctggactacgccatgcagagtggagtaagcgaggagccccgagaagcaatatatttgaactcacttgaaggatcttataagtttgttgacttacagagtccagtcttcgtgttcagatttgttcattgagaagtgaaacttacagttgtacacgtccatcgataccaagttcccatagtacctgggatggaaactgtccatgaattatattgatgttgtacctgaattttatgcttaggctgttgtgactgagctgttcatgtagcataggcattagtacattacaagttgctaagtagcttgagccaaggattcctctgtatgttgcttttagggagaaaataatatttattacatgtaattcaaactgcattgggtccaaaagttcagtactcatgagtcagaacttgagacattagctatataattctgaaggagaaaatataaaagttgatgcggctgcttgccacatgctgtcg

SEQ ID NO: 24648 - DNA, 798 bp, Zea Mays
tagccgtcgctgtcgtacccgtcggcggcggcgccgttggcggtggaggccgccgagccttgcggcggcgtggcggcggcggcaccgccgccgttgctgatgctgacggaggcgccgttcggcgcctggtgctgcgcgggccccgccccgccggccgccatcttcacgcgctgtacttctcctccgcctccgcctcctcctcctcaggagcgagctaccgagctagtagtagtaaagcctccccgaagccacaatcaacctcagggccatcgagtcctcgcgtccagcggcagcaggtcaccgccgagcagcaggtccgcaatcgccatcaccgccgcaagcgtcgaagccaatcccgcgacacggcctcagatcgaaaacgccacggggaggcggcgcctggaaggtccgagctctgagctccggataccgggaccgccctcgagtcggcgcggcgagcgggtggacaaacggagcaagcccccggcaatgcgagcggtataagtaagtcggctgtgagtcccgacaggcgcacggtcggcgaggagagggaggctcggaccaggtcgcgggcgcctcgtccggccgcggccggcaggacgagatccggagccgaggagggggacgacgggacgaggtgtggagagggagggaggagagagggcaggcgggctcacgagggggcggtactgctatggcgaggcggaggcggaggcggaaggctgccgtaccagcggattaaacaaaaacaggcgccgtgggccccccttccgttccgctgttgttttgccccctccc

SEQ ID NO: 24649 - DNA, 2415 bp, Zea Mays
taagggtctacaggatcttatgaccttatttaccatcgctctgagttcgcaaggcataaatattatggttcttgtgaactcatcctcctacatgtaacatgtcgagtgaagcccaagcctggcccaacaaggagtcatgttctttgcagaacaacaatagatagatgccatttaaactaagttgatggttgtttcaatataacacttgaaagaacagacccaaggatgtaaactcaagtgttactacccctcatgcaaaactcaaactaacaagaagatggtctccccaaaggcagttgctcacagaaaatttttgggcaactcaatctggtataccatcacatgtcaccaaggtgctatttcaaatcaaaacaagttaaaaatgtacatctaacaaagataccattgtcagatctttatacaacacaacacaccaatgttgctattcaaaaactgttgctacctgcctagagcccagttctccaacctttccatgtccggggctgggtgcctgggtctgcgttaatgctggacagcagcttgtgattgtttagtgtctgaaaactctagcaaaagtctggtggcaaacaaggttctcaatttagacatatcactgtgtggtagcgtttgctccttaattctatttctaaaacatctgcttattggtgtccatgtgctggttcatatgcaatgatgttctttgtttgtgatggaatcttatgattttgctaaaatgtgcattgttttagtggtacttccaaacagtggccactaaccatcatggtgaggatgcatcatcagtagcagtcagaagtaagaaaggcttaaagacgattagacataccactatgtttatttactatactattattttgatgtactaaatgatttcatttgagttattttggtgttttgatggcatatggaggcctccaagattatccatcttgcagtttttgactgaaaagaaagatttaacaattacattgatcaggaaccggattctcccattatattctttggatccttgcagcccatatttgatttcaatggctaattgggttattggtcagcttgcgatatgcctaccagaggacatgagttctagtatttatcagtccttaatgaaggcgttgaccatggagtatgtggaggacataacttgttatccggtttgtgcctctgcttctggtgctattgcagaactcatcgagaatagttatgttccacctgactggctcattcttctgcaagtggttctgaaaagaataagtactggagatgaaaatgagtctgctcttctgttcaagcttctgggcacaatagttgagggtggacaggaaaaagttgtttcatattcctgaaattgtatccaacattgcgagtactataatggagctcctgccccctgtcccagatccttggcctcaggttgttgaacagggtttcacagccctcgtagcaatggtgcaagcttgggagagctctgcaccagatgaaaacaagacacctaaaaagaggttctggcagtcaggccagtctgctattgcccaaacaatttcattactgttacaaaaagcttggttgtttcaagctgacaatatggagggctctgcattaccacctctgtcatgcgtaaacgatgcttctgtgttacttgagtttgtcatgagttctgtcacttgcatggaagaaactgaaagtctgaaggtctttgagctggtagctacatgggctaacgctgttgccaactgggactcctgggagatggaggatcagggtgttttcaacacaattaaagaagctgtcaatttccaccagagatttgacctcgacggtctcttcctgaaaacgcactttgtgagatgtcattccactaggtattcattctgtcatggttctgttttaatacacgcaggtcactcaagcagatctaaagttattcttagtccatatatggtgaggttggtcgttctttactccaaacacaatctcccttctgtatagctaaaagtttgcagaaatggcaccatcaagatcggtctggagaccaacaagatcatggacttcatcaagtttgatgtcggcaacgtggtcatgatgaccggtgggaggaacaccaggcgtgtaggagtgatcaagaacagggagaagcacaagggcaacttcgagaccatccacgtgctgcttagagctttttgctatgtctagttttctcctatttgttgtataggaaaacatagaatggaattcaaatttggtggccgcaaaatatggagacttgaattcatataaagttaggcttaacattagtgcaaacaattgtattttagtttagatttagagtacacttatgtatgtgttgtttgacaatgcttatttatgatatattgaatggtacttatttatattata

SEQ ID NO: 24650 - DNA, 3709 bp, Zea Mays
ccaggctcccacttcctctgcaagtcgcagcgcaaagcggaagcaggatttcaaaaaccctacctccctaccctactccgcacacaccccgatctccctcccccacccagatcgccggcccgcggcggcgcgaaatggaggtgccgccggagatgctcgacgccctcgcgggctggttcgggcagtcgctctcacccgacgccgccgtgcgccgcgccgccgagcagagcatctcttccgctacctcttccccaggcttcgcgctcgcgctcctcggcctcgccgcctccccgcgccacgatctccaggcccgcctcgccgcctccgtccactttaagaacctgctccgccgccggtggcccaagcccgacgccgacgccgacgctgacgccgactacctccccgcctccgactgcgccatcatcaaggcacaccttctccagctcctcctcaccgccccgcccctcatccaggcgcagctctccgaggccctcgccgccgcggcggcctccgatttccccgccaggtgggagtcgctcctcccgtctattgtgtcctccctaggcagtgccgtcaacgcgggggacatcgccgccaccaactccctcctcaccgccgtggtgtcgctcttctcccgcttccgcaacgcattcgacaacaatgccctccgcctcgacctcaagtactgccttgacatctttgccgccccactcctcgaggtcttcctcttcgcctcccgccgccttcaggccaccgccaccacggccaacccgctcgagctccgccccgtgtttgagtgcctccgcctctgctgcgagatcttctactcgcttaactccatcgacctgcctgaattcttcgaggataacatgcgccagtggatgacagagttccgaactttcgttaccacatcctactcaccgcctgttgaggcagatggtgcccctgatgcgctccgtgctgctgtctgtgataacctgcagctttatatggagaagtacgaggaggagtttaggggatacctgaaggagtttgttgaggccgtgtgggggctcctcatggcgcagaccacctctccatcccgtgcacagcttgctgttactgcgataaggttcttgactacagttgctgagagtgtgcaccatgccttatttgggagtcctgaagcaatgaagcagatatgtgatagtgttgttgtgcctaacttgcgcctgcgggatgaggatgaggagttgtttgagtgcaattgggtggaatatgttaggcgtgactctgagggtagcgatgcagatacgctcagacgggcagcgtgccggttgctgcgaggccttgcagcgaactaccgggagcaggtggctgcactcgtgtcagcacaggtccagcagatgttggcagcatatgccgcgaatcgggcaaacaactggaaggagaaggatgctgcaatataccttgttattgctcttatgcagaagcctggtgccacaggtggcggcacagcggtggttgacatggagagcttctttacatctgtgattgtgcctgagctccaggctcctgattggcagtctgagccaatgttgaaggcaactgtgctcaggttcttgaaggagttcagggatcagatccccaaagccactgcattggcactcctgccaagtgtagtgaggtttctgacacatgagtctaatgttgttcattcatatgctgcaacttttatcgagaacctgctgatcatcaaggatgctatcccagtaccaggggtgaccacagtaaccaggtctccacgttttgttgctgctgatatcaatccatttgccccacagatcattcagaacctgtccacagcactaggtttccctgattcatatgagaacccctacctgatgaagtgcctgatgcgggtgcttgggattgctaatatagctggtcaaattgttcatgagatcactgctcgacttgtgggtattctcatggaagtgtgcaataaccccaagaaccctgacttcaaccactacttgtttgaggctctggcagcagttattggccggactggtgagcaggacccagcgctactccctgcttttgaggccagcctcttcccagtgctccagaggatattggtcgaggacatctcagagttctggccatatgcttttcagatatttgcacaactcgtcaatttgagccgaccacctctctcgcagaactatatgcagctatttggtgttctcctcagtaatgccacctgggaccggccaccatgtgttcctgccttggttcgcttgctgcgagcattccttaggaaaattccaaatgagctaaaccaagagggcaggcttccaaatatcttggcaatatcccgtagtctcctctcacgcagcagcactgaagattctgctttctacatgctgaacacaatagtggaaaacgttggttttgacatactgaacccatatataactgagatatggagtgctttgtttactcggttacagactagacaggcagtgaaatatgtgaactctcttgtggttttcatgtcgctagtgctggtcaaatatggatcaagtgttcttgtcagttccgttgattcaattcagccaaatcttttcacccaaatccttcagcgattttggattcccaacctcaaattgatcaaaggtgctcttgaagttaagttgacagcagttgcttcgacaaagctgctttgtgagtctgcggtgctgttggatgctgctgcagctcagttatggggtaaattacttgatagtattgtcacactgttgtccagaacgaatcaagatggaacacaagagcaaaatgatggtactgatgcagtggatattcagaagacatcaagttattctgtctcatttgtacggcttcaatatgctggaaagagtgaagatgaccttttgaaagaagtaaatgatccaaaacagtttgtggtcacatccttggccacactttctgcccagtttcctgggaggtttggacttgtcattgagcagcatgtggacccagcgaacaaaagtgtgcttcttcaactttgtgcagcctacagtgccaacattgtctaggcagtcacatgcccttcttctccctaaatttcaggagccaattgcattgggaaggcatttgcttgttgtcaaatgggtctggtcgaaagatgagtctcttggagttgtctgtctgtcaagattttctggtgtaatccttatttatttagtggcaggatgttggttgtgccgtggttgtgccgtgggacccttggatgccaaaacatgtagggttgatttggtgatcagagatcacgaggaatccatgggagatgaatccattgctattcaaattgaatagcaaggggattcctccccatggattcccttgtgattcctggtcaccaaaccagcccataaggaaaacaacattagctttgtggaggattcgtctgtttggtttggctgaggattttgtttcgaggctgaagtttctttttttggggcagtctaatggtgtactgtcctgattatgtatctgaaggtcctgaatcaatggttcggaaaacaacattagcttcaatggttgttggaacacgctgtaattttgcctgcctgcctttcatggttcggggaatgctattctgcagatgcatagccaaaattgacaattgacgaaggaaccgtatatgttcaacgtatcttcattc

SEQ ID NO: 24651 - DNA, 917 bp, Zea Mays
tctgattccatgtttcggatttggagatgcatcaacacatgatcaagacgtctttgtttctctcctgacgagaaaccttgcaatggatttgaagaagcttttggacaatgatcaacaccctttgcaccgatgtgaagcaaagtggtggacaataccacgtcctgttgataattgcagatgggaaggacgccatggcagccttgccctgctcccccaacagcgcccacctgcccctttccttgcgcgacgcgagatggatcggcgaatccatggcagcttggtaagtctgcctctcgtcctccctggttctccgttgcacgatacccgcccccagcccctgctccgatgtggtgaggtgccccctccccgccccgatgcaccgaagatgtggagcaaatccacctcaatgatgcacgccgacagcgggctcgttggcacgtctaggtggagcacgacgttctttttgaaaatggtttggtcatacacaaacttgtggggtgaaatttcggctttggcctccttccgcgaggtggatttggatagcgcggcgcagaaaaaatggcggcttcagctctccacctctgccgcctccccaagccacggcgggtgtgaagcttcagcagaggcagttgcgcccgatgagccatgtgggaccttttactgtgcccttcttcttctactcccttctcgttgcattcctgttcgtttcgcttgtgcgaatggcagagctacgtctactggggtgctgccctgtgtgccccacccaggacacagtatgctgctcaccatggcgctgcgctgtgattcagcagagtggcaagatgcaaggcttgccgagctgcctagccattataatgcttgatccttgaattgaagtcaattgatttccgatttaataaggcacagtttgtttgagc

SEQ ID NO: 24652 - DNA, 877 bp, Zea Mays
gagtcagaaaagccgctcttcttccgttccgcccgcccgcccgcttctctctcccgccccaacccgcgagaccgccggcagctcagggcaggaggaggagcggcttcaattcgtccccgcgccgcgcgctcaggacccgcccccgctgcctctcccgagctccattttggcgccaacagtggttcacataggtttgcgcttgagaatcgagctgtcaatgaagctactttccgttgccctgatgagctaggatggaaaccacagaggacgcctatcatatcatccgatggaaacatcttacacgcaagacagaccacactgccactgaaggaaataagcaagtctctccagcaaatgggatatgatgtgatgccttcagatgacgctggtcgatttgtgtgcaactatgtctattaccactcgcttaagtttgcagagaagcatggcatcacgtctctcttcgttcatttccccctcttcctggcaattgatgaggaagttcagatgcaatttgttgcctcccttcttgaagtcctcgcttccttgaacttctagtagtaacctgatggtagatctatctcttccagcggtgtattgttcccaatttatttggaagggttcccaatttacatgtggagtgaataagaatgaggaatcattcatggagttatgtgtgcttcaaaatgtgtaaaaaaacagctcttctcaaagaacatgtccaggcagtacagatgtacaaatatccaaagtggtttatatgacaggtgctattgttctcagagatgtgtttcactctgttctttgacatttacagaaacatttttctgatcatcagatcatatgtaataaagtaacttacaaacatggtgcaacgatc

SEQ ID NO: 24653 - DNA, 1577 bp, Zea Mays
tttcacaccgtcaagtgtctctaccagaacaagcccacacttgttctcctttttcaaaaaggaggcgaaatcacaattgcacttccatccagtgacacaaacacaatagcctctttttatttttatattcagagagtgtttctaggattgtacccattttatttgtttttcatgaattttggatgcacattgtttgctctatattaagataaccatgctggtattcctttgtgcaaggtggagcctttcttggatgtcaccaacatttattactatctcaagggccatgataggcagaagaagcttccaaaggagaccaagagtttggcaactatttgtgaggagctgcttggtatccttttgtccaaggaactccagtgtagtgattggtcatgccgccccttaagtgaagggcaaatacaatatgctgcgtcggatgcctactacttgctagacatatttgatttgttccaaaaaaggatcacaatggaagacaggcattgctcatcagtggtgatagaatgctcttcttctggatatggcatttgctcgggtagttgtttgatgtccatagtaaccaagtacagtgagaagataatattgacagaatctgatgcaaaaccgcgtacctccagacgaaaagaaaaactgaagattcctgccaatgccaaacgcaaagataatgtggattgcagtagtgaatggcagggtccccctccatgggatccttccattggtggggatgggtacccaaagttcttgtgtgatgtgatgattgagggcctagctaagcacttgcgatgtgttggaatagatgctgcaattccatcttcaaagaaacctgaaccaagggatctattaaatcaaacatacaaggaaggaagaatattattaacacgggatgccaagctcttgaaatatcaatatttagctggtaaccaggtatacagagtgaaaagcctgctcaaacatgatcaactagctgaggtcattaatatcttccaattaaagatttctgaggaccaacttatgtcgaggtgcacaaaatgcaatggtagctttattcagaaaccacttaccctagaggaagctgttgaagcctcaaaaggtttccagattattcccacgtgcttgttcaaccgaaatctggagttctggaagtgcaccgattgcaaccaactctactgggaggggactcagtaccacaatgcagtccaaaggttcttgtcagtgtgcaacattagtgactaagcagcacgtacggccttggtactcatttgtaaaattgtaaggtactgagataccatcacctccgaaagatcgaaaataatctgatctttggcatccactcgtgcacgatgaggcatgccatccatttttagtggtttgctgttcgtcactgagatgctgttgtaaggaaaatagaccttgacttatttgattaatggactttgctccatgcacatccaagaggaaaggttctagatacgtagagttataggccaagtgctatgactgttgccctgcccccgaaaaggattcatgctatctattattaaactaaaccttacgttcct

SEQ ID NO: 24654 - DNA, 1972 bp, Zea Mays
caaagtgtggtacatttaagccacaaaccaaacatgtctgaaagtcccagtaattcttataaaaaatatgggtggagccatcacccacgcccccaagatcctgtccacccggacccgagcgggaacgccaatgcgaagacgaaactgccgcagctggtgacggcgccggctccgtcgtcggggcgtccggcgtccgtgcttccgtacaagacggcgaacgtgcgggaccactaccgcatcggcaagaaactggggcaggggcagttcggcaccacgtaccagtgcgtgggcaaggcggacggcgctgagtacgcatgcaagtccatccccaagcgcaagctgctgtgccgggaggactacgaggacgtctaccgcgagatccagatcatgcaccacctctccgagcaccccaacgtcgtccgcatccgcggcgcctacgaggacgcgctcttcgtgcacatcgtcatggagctctgcgccggcggcgagctcttcgaccgcatcgtcgccaagggccactacagtgagcgcgcggctgcgaagctcatcaagaccattgtcggggtcgtggagggatgtcactcgctcggcgtcatgcaccgggacctcaagccggagaattttctctttgccagcaccgccgaggaagccccactcaaggccactgactttgggctttccatgttctacaagcccggtgataaattctctgatgtcgttggaagtccatactatgttgcaccagaggtgcttcagaaatgctatggtccagaagctgatgtgtggagcgcaggagtaattctgtacattttgctttgtggtgtgcccccgttttgggcagaaactgaggctggaatcttcaggcagattctgcgaggcaaacttgattttgaatctgaaccctggcctagtatttctgatagtgctaaggatctggtctgcaatatgcttacacgggatcctaaaaagagatttagtgctcatgaggttctctgtcacgcatggattgttgacgatgccgtggcacctgataagcctattgattctgctgttctctcaaggctgaagcatttttcggcaatgaacaagctcaagaagatggcattaagggttattgctgaaagcctgtctgaggaagagattggaggcctcaaggagttgttcaagatgattgatactgacagtagtgggactataacatttgatgagctgaaagatggcttgaaaagggtaggctctgaattaacagagaacgaaatccaggctctaatggaagcagctgatattgataacagcggaaccatcgactacggcgaattcattgcagctacgttgcacatgaacaaactggagagggaggaaaacttggtttcagcattctcgttttttgacaaagatggaagtggctttataaccatcgatgagctgtcacaagcatgtcgcgaatttggtctcgatgacctccacctcgaggatatgattaaagatgttgaccagaacaatgatggccaaatcgactacagcgagttcacggcgatgatgaggaagggcaatgctggtgcaacaggaaggagaaccatgaggaacagcttgcacttgaatctcggcgaactcttgaatcccagcaaaacctagcgcgttactggaaggccttgtcaggtacattcccatggcatctgaagtttttggatgcgttgtcgatctgctggcctattctgagatgttgagtggttatcctgtggtattactaagatgctggacaattttcgtagtgctggtggtatcctctagagaagagggatggctggcacaatgtggctactatcgccaactgcttttgtatgtgtaactatcgatgtagattgactatggtctaaacatcagtttagttgatatttcgttctctaagttccgttctacttggctcctcaaccaaacattacctatatatatatattctttctaacttaac

SEQ ID NO: 24655 - DNA, 1743 bp, Zea Mays
cggagcgcggcccggcacggcgtgcgctgcggacgggtcggatctgagacgagacgagacgatcccccctcccctcaaccggaacttgttttaccccatctcatcccactgactccacccacccacccgcccgctgcctccgccggatctcgtcggactcggatccgcccgaccacgaccaccccgcgtcgccgccgcgcagcagcagcagatcagagaagatggccggactcgacaccttcctcttcacctcggagtccgtgaacgagggacaccctgacaagctctgcgaccaggtctcagatgctgttctggacgcttgccttgctgaggaccctgacagcaaggttgcttgcgagacctgcaccaagaccaacatggtcatggtctttggtgagatcaccaccaaggccaatgtcgactacgagaagattgtcagggagacatgccgcaacattggtttcgtgtcgaacgatgtcgggcttgacgctgaccactgcaaggtgcttgtgaacattgagcagcagtcccctgatattgctcagggtgtgcacggccacttcaccaagcgccccgaggagattggagctggtgaccaggggcacatgtttgggtatgcgactgacgagacccctgagctgatgcccctcagccatgtccttgccaccaagcttggtgctcgtctcacggaggttcgcaagaatggaacctgcccctggctcaggcccgatgggaagacccaggtgacagtggagtaccgcaacgagggtggcgccatggttcccatccgtgtgcacacagtcctcatctctacccagcacgacgagacagtcaccaacgacgagattgctgctgacctgaaggagcacgtcatcaagccagtcatccccgagcagtacctcgacgagaagacaatcttccacctcaacccgtctggccgcttcgtcatcggcggacctcacggcgacgctggcctcactggccggaagatcatcatcgacacctacggtggctggggagcccacggcgggggcgccttctccggcaaggacccgaccaaggtggaccgcagcggggcctacgtcgcgaggcaggctgccaagagcatcgtcgccgccggcctcgcccgccgcgccattgtccaggtctcctacgccatcggcgtgcccgagcccctttcggtgttcgtggacacgtacggcaccggcgcgatccccgacaaggagatcctgaagatcgtgaaggagaacttcgacttcaggcccggcatgatcatcatcaacctcgacctcaagaaaggcggcaacgggcgctacctcaagacggcggcctacgggcactttgggagggacgaccccgacttcacctgggaggtggtgaagcccctcaaggcggagaagccgtcttctgcatgaggcgcctcctctgttttggaagaagcttttggtctggtctggtctggtctggtgtgcctgcgctctatcatgcttttttatggctcctacttgtgattcttgatctgccccttgcttatcatttgtactgtactgtcactgtcctaataagtggtacgtgtgcggggtcgtattgtgtctgcttattcacctactagaggattatttctggttttgctgcttatgtaatgcttttaaaaccatgaaagaagctacaggctcctacagctgctttgagaagtaacggaacctcgtgcattttggagatatgttgcagtgctgtgctgtc

SEQ ID NO: 24656 - DNA, 1958 bp, Zea Mays
caaagcgctagctatattaaaatcagcgcagcgagccttcccttcccttcccttcccttccttccatcgcacgcggcacgcgtcttggtcttcgtcttcgtcctcgtcttctcccccaccccacggtccacgcctacctccttagtgcttggttggtatacataccaccatcagcacctcgctcttctgctcagctctccccctctagcctcacctgccctatacacagccactactgtcgatcgattgaatttgaacccaccaggatcaggattaggattacagcatgtcggcgtccccggagttgtacaggcccgcggaagcgccggccttctcgccgtcctgcgccacgcagccgctcgtgttcgccggcgacgactactgctgcaggacgccgacgggcagcgggatctgctacctgagggagcccaccacgtgcccgcccgcgccccggaagccgccgccgccgccgcccatgtgcaggaagcgcctcttccaagcggcggatcagcagcttgctgaggcgggccccgtccctgttatcagcatccgcctcgacgagctggagcgcctcttccgcccctgtccgccgccgaccaccaccaccaccgacaagcggcgccgctccggctccggccccagccccagatccgccacgaaacatgcgaagacactcgacatcgaagctgaaggagagcaagtgggagaggcgccgtggggcaaggaggatgtagccatcgccgatggtataccggagttcctgaagaggtccatcctgctacagacatttggtgtacagggccatcacacatgtcaggaggtggagcatgtcgtgatcccacctcatgtgccgccggaggtggagcatgaactaccagagccagagaaggctcaaagagacatatttgccttctttcgaggcaaaatggaggtgcaccccaagaatattagtggccgcttctacagcaagaaggtgaggactgagcttctacaacattatggtcgcaaccgcaagttctaccttaagagaaagcggttcgacaactaccgatcagagatggctcggtcattgttctgtctatgtccgctgggatgggcgccttggagtcctcggctcgtggagtcagtcctcctaggctgcattcctgttataattgctgataacatacgtatgccgttcccttcagtcctccagtggccggagatctcattgcaggtggctgagaaggacgtagccaaccttgaggtggtgcttgaccatgttgtggcaaccaatttgagtgtgatacagaagaatctgtgggatccagtgaagcgaaaggctctggttttcaaccgtcccatggaagtgggagatgctacatggcaagtgttgagggagcttgaggttttgctggaccagtctcaaaggaggagatacggtggatcctggagggcgtgagaaaccagaaaagatcagttttgtataatctgttgcagctgtgcagttgacattgagtctgaggcttgagcctgagatccaccggaaactcaggttattgttctcatgccagagatcccaatctcagttagtcaatgggaatatgggatgctagctcaacctttattggcttgttgcccggttagtgcctaactagagatcccgctcttgtacgtatagagaaattttatttgttctttggagaactggtgggatgagtttgattttctagccatagaaagaaatgtattacaggctgcagcatattagtgtatatttctttttcctggttgcacacttgtatagttatttatatgtccgaaccttggacttaaataggaggaatgcttagaaaagagttatttatatgtccgaactttgactttagacttttattggattttaactctagcatatccaactcttttgggcatgcatatggtaggtcatgcctggagagttggctttgtcggagccg

SEQ ID NO: 24657 - DNA, 2076 bp, Zea Mays
acgaaacgctaaagccactttcttctcctgccaacacaagccgttttttcctccccaagtgatctagccagccacggagccaccactcgccaggtgcttcaaatagtcgccccggacaggcaggcgcacgcaacgcaactagtctccttcaccgtccgtccattcctccgatccgcaggaggattaggaacttaggatcggggaccggcggagcccgacgaccttctcggtccacccgcccggcgatcgaaccatggcgctcggcgagggcggggatcacggcgccgccctgcccctcatcgcggaccaggcgaaacatgccgccgccggtggcatcgtccgaagcgggagcatgtggacggcagcggcacacgtgatcacggcggtgatcgggtccggcgtgctgtcgctggcgtggagcatcgcgcagctggggtgggtggccgggccggccgccatgctcgtcttcgcggccgtgacggcgctccagtccacgctcttcgccgactgctaccggtcgccggaccccgagcacggccctcaccgcaaccgcacctacgccaaagccgtggaccgcaacctaggtagcaacagctcgtgggtgtgcatgcttctgcagcacacggccctgttcggctatggcatcgcctacaccatcacggcctccatcagctgcaggcaagaagcatacctgggcttgcggctcgctgcagtacgtgagcctgtacggctgcggcgtcgcctaccatcaccaccgccactagcataagggcgatcctgaaggcgaactgctaccacgagcatgggcatgacgcgcactgcgactacgatggcaactactacatgctcatcttcggcggcgtccagctcctcctctccttcatacctgacttccacgacatggcgtggctctccgtcgtcgccgcggccatgtcgttctcgtacgccttcatcggcctcggcctcggcctcgcaagaaccattgctaacgggacgatcaaaggaagcataacaggtgttcggatgaggacgcctatgcagaaggtttggcgcgtctcgcaggccatcggcgacattgccttcgcgtacccctactccttgatcctcctggaaatacaggacaccctgaagtcaccgccggccgagaacaagacgatgaagagggcgtcgatgatctcgatcctcgtcacgacattcttctacctctgctgcggctgcttgggctacgccgccttcggcagcgacgcgccgggcaacctccttaccggcttcggcttgtacggtccgtactggctcatcgacttcgccaacgcgtgcatcatcctccacctgctgggcgggtaccaggtgtacagccagccgatattccagttcgcggagcggctcttggcggagcggttcccggacagcgggttcgtgaacggcggctcctacaccgtccggttcgcgtgcctgcgggcgtgccgggtgaacccgctgcgcgtgtgcctccggacgctgtacgtggcctccacgacggcggtggccgtggcgttaccctacttcaacgaggtgctggcgctgctgggcgcgctcagcttctggccgctggccatctacttccccgtggagatgtacttcatccagcggaacgtgcgccggtggtccgcccgctgggtcgtcctgcagaccttcagcgtcgtctgcctgctcgtcagcgccttcgcgctcgtcggctccatcgaggggctaatcagcaagaagctaggctaggctaggctagtccgatccagtggaacaccctatctgcaggtctgtcagagagtggcagcgggctcggttattttcacagtgttgccttcctcctgcatcgggttgtaagttgtaacatatatgtcgtattgatactggcgagttcagatgttcagaagaagtagaacgcgtgtgacgattctgtgttgctgaatgccgcctatgtagtttcagttccagaatttgagggtttccatatctgcagcagtttcctcaaaatatttctcctatattttactatacaggcacattatttagattctactcctattttttcccttccca

SEQ ID NO: 24658 - DNA, 2809 bp, Zea Mays
ctcgactctcgagtcccgagggatccttccgctccaccattctcttggtcaaaccgcccctcctcctccgcccctcaccctgctctctctctctctcgttctcagcctctgttccagtgttccttcctcctccactctttattatattttactcttctctctccagcgtaaaaaacaaatcgtgctgtgcgaacgatgagagagaaaagagagacggaggcaagtaatggcaggaggaaccttcttttcctgactccctgtggctgcagagtgcccatcatttgtccctgatccttgtgcttcgttcctgttgcgctttccttgggccatcggtagactgagccgtcgcgaagccttcccgttcccacaaggggtgtggcgtggagcgagcctcgccaccactgggctcctccggcgacctcctccctccagtcacaggttgagcaatccaagctgagatggaaggccatgtagcaatggggtggaaggatcctaatccaggccaagaatcttccatggtcttccaatccagagctgttcggccagacaccgtagaggggcacagcaacgaggacgttgaagccggatttgagaagcatggcttgtcagccgccttaaactcgcctcagcacgaaggccgatcactgccactgaccccacagtttggccagaactccagtcctggaagcagcctcgccgagaggatgcaggcaagagccggattcaaggtgccgaagctgaacatgcctttcagcacggtagctggagatgatagttcagtgccaggagctccatcgccctacctcacgatcccgcctggcttgagcccagcaacgctgctggagtcacctgtcttcatttcgaatgccctgggacaagcctcaccaaccacggggaagctattcttgtttggtagcacaaatgacaacgatcctattcgacctggaggccctccagttggagatggcactgatgctttttctttcaagcccttagatctgaaatcctcacactacactgctgaagtaatgaaggaacaaaatacgcagtcttctgtgaagactgaagctaagactcaggcagtccaagaggctaatttgctgggccaactgaaccagcagaatcacgatgggcagacaaacatgaatagtgacggtgctcgtgactccaagctcagccgtcttgcgtctggcaccggtgcaggcaatgaacacgcatcacccccggattacggccagagagccgaggaagctgatgcgagggaagactacccggcggcaatggccgttacagcgccagcggaggacgggtacagctggaggaagtacgggcagaagcaggtgaagcacagcgagtacccgcgcagctacttcaagtgcacgcatcccaactgcctggtgaagaagaaggttgagcgctcgcacgaggggcacgtcacggagatcatctacaagggaacgcacaaccacccgaagcccacgcagagccgccggccaggcgcaggcgcgcacccgttgggcggcggtgcgcaggcggacgcagccgacaacctgcaggggtcacaggcaaacgcggcggaagccaaccaggcgtggcgtgcgggtgtccaggatggcgtggacgcgacgtcgcccccgtcggttcccggtgagctctgtgactcggcggcgtcgatgcaggtcgactgcgcggcccggtttgggtcccccgagggcgcggacgtgacgtctgccgtgtctgacgaggtggacggggacgacagggtgactctgactcatggcggtgccaacgcggcggagggcgacgaactggaatctaaacgaaggaagctggagtcatacgccattgacatgagcactgcgtcgagagctgttcgcgagcctcgagtggtgatccaaacgacgagcgaggtggacatcctcgatgacggctaccgctggcgcaagtacgggcagaaggtcgtcaagggcaacccgaatccaaggagctactacaagtgcacgcaaccgggctgcacggtgcggaagcacgtggagcgcgcgtcgcacgacctcaaggccgtgatcaccacgtacgagggcaagcacaaccacgaggttcccgccgcgaggaacagcggccacccgagcgccgcggcggcgccaggcgcgggtggcccgcgcaggcaggagcacccgtccgtgcacgacggcctgatgagacagcacctgggcggctgcggcgtgccgttcggcctgccgccgccgccgccgccgccaagggacccgctggcgccgatgcgcaactacccgacgtacggcttcactgcccttggcgccggctccacgtcactgccgagcctgccgatgctcccggtgttggcgccgtcctccctgcaccagcacccgctgctgaggcaccggcaggcggtgcaggctgccggtctcgcgtggcgcccaaggccgacgtgaaggtagagggcagcgttgccggcggcgggatcccgtcggtgtaccagcagatgatccgctgcgggctgcgtctgccccaccagatgtagatacttaaaagtggagaggattagagtgattctcaagttcgtttcttaccattcctgttagtatgagttcgtgataagtattatagcgtggaaactgacgcccgctgcattcgttttttttcacccttctgttccacttcattttttcccgtatttatttatttactacccttcctcaatgatattcggttcttcttgttcagcaagacagcaactggcatcagttaatgttcatttgagaaatgaccaacagtttctgggctggcaact

SEQ ID NO: 24659 - DNA, 2624 bp, Zea Mays
agccaaccaggcaaccagccgtgagcccgtgattcgcctcggctcgccgccggccgccggccaccggcccccacaccacgacagatcgcaagcttgtgaggagctccgcgcgactaaagcgatctaatcacctagccgccggccgccaggccgcggcgctgaaccacgggcgcgaagcgtacgcgaggctgccgcgcctgggtctgggtggagctcgcgtcgtccctgcagctaccgcgggcgcaatgcctgccccccgcgcctgaccatgcatcccaggcggctcaagaggctggcgaagaggatcacgtgacgacgcctcgccgtcgtctaggtcgtcgctcgcgcgcctgcggaacggaaaaaaggacgcgcaggatggatggctccatttcatcggcgctggcgcttctcgtgctggcgcttcacctcgccgtggacggctgctcggcggtcaacttcgaagggtcggtactgctcaagttccagtcaagggtggaggaggatctgtatggcgccatggtgagctggagcccgggcgacggcgacccctgcagttggaacggcgtgcgctgcgccgatggcagagtcgtgatgctaaacctgaaggatctctcgttaaaaggcaccctaggtcctgagctaggaactctaagccatctaagggctctagaactctccaataactttttcagtggagcaatacctaaggaattgagtgctcttgcaatgttggagatactggatttaagcaacaacaacttgagtggggaagttccacaagagattgcagaaatgccatcacttaggcagttatcgctttccaataactgctttcagtggcctctgatccaacattcctatgggaactttgatcaggaaaatggtttcaatatttatgataatctcgggagaggtaatatgaatcaaagagctgagaatgggttggaatcaggttcttcttcacatgagaacaaaaaggacactagcaacctttctgctcgacttcattcacaatacgaagcaataaatccagcagcacatcttagccagcgcagattacttcaagatagcaatcttgctgcaccttcttctgcaaatgatcttgttccagctgctgttcctgttccttccactggaactggttcgttttcagcatttagtcccaacaatgcacctgcaccagctgtaaatcccccaagtaggccaccaacggtccccagtactaccgctggagaagttcaggaaaggaggtcaatgaaatggctttatttcattgtgctgccactggtcgtgcttcttattggcatcgcatgcatgcttttgctatgccgcaccaagtcagggacaacaataggtccatggaagacagggctcagtggtcagctccaaaaggcatttgtaacagttgcaacgctctgagctggaaggtgcgtgtgaagacttcagtaacattgtgtcaagctatccacagtacactgtctacaaggggaccttatcaagtggtgttgagatagctgttgtatcaaccatggttatctctagcaaagattggtcaaaacattcagaagggcgattcaggaagaagatagactcactctcgcgaatcaatcataagaactacatcaacctgcttggatactgtgaggaggaagaacctttcactaggatgatggtgatggaatatgctcccaatggaacactatatgaacacctccatgtcgagggatttgatcctattgattggaatggtaggatgaggataattatgggggtagcatactgcaccctacacatgcatgagcttagccctcctgtaacacacccagacataaagtcaagtgctatattgctatctgaggatggagctgcaaagatagtagacatgagcgtttggcatgaagtatatttcagaggaaacatgcccaaggatggcgacctagttgatcaccaggaacgagtagctgcagatccagctgggaatgtctacagttttggtctactcatgctggagatcatctcagggaagcctccgtactccgaagaaaagggttccctttcagacttggctttggagtgcattagggataaccggagcatgtcttgtttgcttgatcctagcttgaaggatcacaaggaaaaggacctagaaaccatatgtgatctggtccaggactgcatccaaagcgatccaaagaagagaccagccatgagggaggtcaccactagactgcgagaagtactgtcaatttcgcctgaggctgcgacgccccggttatctccactctggtgggcagagcttgagatcctttcagttgaagcaagctagcgaaaatgtgctttgtttgcagcaacaccgaggtacttgtgcatactgtaatgcaaccctgtacatccctgttgtatttttccatcctgtgttgtaactttggtggtgtctgcgtgctacatttccccctccccggtgaattcagctgcctggtttgtttttctcatctgtatactaaacatacatggtgtgagagcagaatgctttataccatcctaggactgattgtaatcaggaaatgtgtagtgttccatggttttacagaaatatacattctttgattgttgatgtgaaa

SEQ ID NO: 24660 - DNA, 2187 bp, Zea Mays
ataatttggctaaggcttgtgctgcctatcgtgactttgtatcacaaaatgctataagagttaaaacttcttgttttttcttaaaaagttttggactagggtagtggggttttaaattttgctgagatacttctacctgcctccactaccttgacgagctggcatctgctggttacattctgctcccttcatgtagcattatggatgaagttctttgagcataagccttttgattcaagaactgtcatgggatttggagtacttaacggaatctccattgggctcctcaacttgagtcttggcttcaactctgttgggttttaccagatgactaagctggcaatcatcccgtgcactgtcattttagagacacttttcttcaggaagaagttcagtcggagtatccagatgtccctttctgtgcttcttcttggtgttggtgttgcaactgtcactgatctgcaactcaatgctgtgggatccatactgtccttgctggcaattatcacgacttgcattgctcaaattatgacaaacactatccagaagaagttcaaggtctcatcaacccaactgctttaccagtcttgcccttaccaatcactgaccctgtttctcattggccccttccttgatggctttttgactaaccaaaatgtctttgcttttaattatacatctcaagttgtgtttttcatcgtcctgtcatgcttgatatctgtttcagtgaacttcagcactttccttgtgatcggaaagacatctcctgttacttaccaagtcctgggccatcttaaaacatgccttgttcttgcttttggttatgttttgcttcacgatccgtttagctggagaaacatacttggaatcctaattgctgtagttggaatggtcttgtattcatacttctgcacagtggagacccagcaaaaaaatgttgaagtctccccacaacaggtaactttctcatgcactacagcactagagaagttccagtgcgcaccattaaattctgttgccctttcagaattctgtcattggtagtgacccagtgtgtaagtatgatatactagtagccaatcctgaatgttgtgttatttgagcagcgaacattgagttttctgtgttcttttatttcatttttacaactttactacttggtcggtcctagtcatcctatttatatcaggactaatataccaaattgggttgcatttagggttgcaaattgggctgagaacatgagcccaagtggcctaagccatctaaaagcagctcatgtcttcagcttcccagtaattccattctgtttctggtcgttcactccctagttgtccaacttatcgtcattggtcgatgtctaatcggacatgattggtcaatgactaattggacaaccataaaactaatcgagtcggagcacctagttaagtccaggatactaactagggcaactaatcttgattaatcagatgacttggtaacactgtacttgtatatggaacaaactaggctctacgtttgtggtgtagtaagtggaattgaccttttttagcatattcagtttgtattaactagcattatagatttgtctcttcctgtctcttgtttgtaattcccggctgcgcttcttacattgcaggtgaaagaaagcgaggcaggccctttgatcgcagactctatgagcaaagttgaaaacgggggtggtggtgttgatgacgagcctttgaaggtacccatgtggagctcaaagtactcgcgggagtgaaaaggtcacgatggcatggcaccatacaggattcaatttagtaggcagatagtagggttggaagccaacccagagtgtaatgaacatttcagttacatttttgggcttctttagtgtcgcagtctactagcagttaaaggatctgtttcttggaaggatcctaccttcagggctctcagacctaccttgaaactagacagcaggtattgtatgattgtatctcgatatgctccacatcctcttactgtaacttccaactggtacatggcgtgcctatatccaaagatagacctcattctttttgtatcaagaagatccggataagaagacttgtgcaagatttgtagcgtttagtgaaatttgtgactgtcagtcatgttcgctttaaaaaagtttagtaatttaaaagtcaattaaga

SEQ ID NO: 24661 - DNA, 1806 bp, Zea Mays
taaaacaatttattacgacgctgaggcattttctcgtgaaagaaaacgcactcccgactcccgagtgatcccgagtcccgacggccgacgcgcgcttaagggcttacggctaatccggcggctacgaaaggaaacatctaccccgttcaaccgttccatttcttctcccgttccgttcaccccccccgcgagctctatctttcgtggcgcagctcggcagctgggcggccgccccccgccggcgccacgccctaagctacgccaggttcccagttcttcgtccgtccttttgctaggtcttcgttggacacttaaacggcgacgagcaccgccagacgcgctggtgcctggatccggcgggagtgcttcaggttttgacggttcgtctctctcgttgtttccggcggggttatgaaggcggtgggatacagcccctacgacagcagcggaaaaggagagcttgattactgaactcaggaaagaactgagggtttctgatgaggagcatagggagctattaaataaagtcaatgaagatgggaccatccgtcgaatgagggagttaagacaggcaggtggatccccaagtggtttgcatcatggcaacatggttttatatggtgcagaacctgggtccactaccaagaggcaaagggcatctcattcgattcctttgcaatcagcaggcctccagtcccctatgatgccctcccactcagtttcatctgcaaaatggggtcctttgcaagcaagaggcacgaaagcgaggacgcccattcctttggcgttaccatctgtggatccaagttcactaataaaccataaagtttatacaaggtggccagaagacaacaacttctatgaggccaccataacacgatataaccctgtgacgggtgagcatggacttgtctatgacatgggcacacaagccgagagttgggaatcagttagactttgtgatatggcacctgaagatataagatggggatttgatggacacctttcaaatcgtgatgtctggagcccttctggccctatgttgatgaggcacatgaccaacaatggtgctatggcaggttcaatcaagggaagagggaggttatcaataaatgagactataaaggactatgctccacctgaaaatggcaccaataggaattttgatcatgtcgacataccaaataccggaagtgttgttatggaggtgaagagggtattgttcaacccaaatatgcctgaaatcgagaaggcaaggaaacttttgaaagatcaggagcagtcattacttgatgcaattgccagacttgatgaagcatctgatagcgataatgaagatatggccatggaaggccgaatgggttctgctggggaaaggaatggcatcactacgtagttgcttctggcatgttggaattttggtagattaacatgcatttgtgtagcacctacctcgaccgcagaacaaggaaaccacattatggcaaaactgcatgccagaaaatggtgtcctggaaacggttgacgcctgaaatgggattttttggctacacaaaattgagcgcacgagcggcagagatgcaaatgttaaagaactgtttaagcgccattgcatggtgtttcctatgtagcaaactagaggcaactaaatgttctagttgatcattagcatggagcacttagcattcctgattcagtacaggtagatgtctaacactccagcataatatccaacttggctgttcttgtactctaatgtgaaaaaggattgttgtgcacgcttttcatgtaagcctcgagtgagta

SEQ ID NO: 24662 - DNA, 1107 bp, Zea Mays
cgacgcgaaaacagttagttatctgttcatctcgttgcctttaattgcttgacaagctagctagctgtacagcagaatgcggtgcgagccccgtagctatgacaaggcaggtgatggagcagttcgcatcggagatccggaagctgtcggagaggctgctggacctgctgtgcgagaacctgggcctggagcccgggtacctgaaggcggccttcgcggggtcggacggcccgacgttcggcaccaaggtgagcgcgtacccgccgtgcccgcgcccggacctcgtcgacggcctccgcgcgcacaccgacgccggcggcatcgtgctgctgttccaggacgaccaggtgagcggcctgcagctgctcaggggcggggagtgggtggacgtgccgcccatgcgccacgccatcgtcgccaacgtcggcgaccagctggaggtcatcaccaacgggcggtacaagagcgtcatgcaccgcgtgctcacgcgccccgacggcaaccgcatgtccgtcgcgtccttctacaacccgggcgccgacgccgtcatcttcccggcgcccgcgctcgtcggcgccgccgaggaggaccgcgccgaggccgcgtacccgagcttcgtgttcgaggactacatgaacctgtacgtgcgccacaagttcgaggccaaggagcccaggttcgaggccatgaagtcggccatcgccaccgcgtgagaaagactgccttccgctgccggcttccttcgtggcgtcaagccttgaggcttgaacgaacaacgtacgtccatgtgcttatagtggcacagttgtgtgtgtaactaccgatcgtggaacggcctaatgtatttcggttgcctcagatcgatctatatgtgcgtatacattatgtactcaaaagtgtgtagcgtctggttaatgtacgagcagtgtgtatgtgaccaggacccggtgtgtagttgctattactaccatatccggtgaatgatcaaaccttttggtgtattaaaactagatgttcatccccctcacggactcaccccaggtattgacaaccaaatcggaatatggcatatataataaaaacatgatgtcccggccaagaaagggg

SEQ ID NO: 24663 - DNA, 1192 bp, Zea Mays
cgatcatccatacccctatccctatacctctcagctttggcttcccccgccgcctgctgggtcgcagatgagctcctccagtccgctcccctgcgctgcagagacaagccttgctgggttggaggcggctcctcatccactcccccgcactgcggtcggtcggaagcgctcccatccactccgtatctgacttccacccatcgctccgtcggaggcgcctctcgagggtgacgtgaggcgtgtgagctctcccgtttgcttcccgccctggctcaatcggaggacggtggtgcgctcgaggtcataggagatcgaacagatggtgatttgacgaaggacacgaagatatccaaattggagccagtccattgtttgttttttctctggattcactacacaagtaagcattcgacacaatctatcaagaaagatcgcagagatcaacttaaggcttgaagacatcattaacaataaggagaaatacaagattgaagctgcacccaatgattttccattggtgacatggaaaccttctacggacatctctactgtggcaaaaagtttaaagtcaagtcaagtataaaataccgcacgatcaatccggaatggaacgaggaactcaccctgtccatcacaaacatgatgaacccggtcaagattgaactcttcgaccatgacacgttcaccaaggacgacagcatgggcaacgccgagttctccatcctcaacttcgtggagatcgccaagcaggacctgagcgacgtccccgacggcacggtgatgaagacgatccacacggagaagggcagctgcctcgccaccgacagccacatcacgtgcaaggacggcaaggtctcccaggacatcctgctcaggctcagggacaccgagaccggcgacctcgtcctgcgcctgacctgggtcaacatccccggcgtcgcgcggtgaatcatcccctcgatcggcggggacggggccagggcatgaggcggcggcgacccgaccgacgcctgcccagctgattatacatccgtttacctggtattggcataaggagacccttggatgcgtgtaatgtttgtttgcagttctgataaggtgtgcaagaaggctcatgctactgggagcaatgcttctgcgggttttttatccacaaattacatttgttctcgttgatcacatttccataaaa

SEQ ID NO: 24664 - DNA, 747 bp, Zea Mays
gaagcaacatgaatccgccgcacccagagccgggccttccccgccgccaccaccacatggtccacctccacctcgacccgcgccaccaccaccacgtccacatccacctccgctgctgccatcatcaccaccacggcacccacctgctcgctcctgcgccgccggcccgcctcaacgacaaccagcagcggcacccggctcccgtactcttccccaacacctacccgaacccaagcgcggcgcctgggcagccagagccgccccgcgccgccgtaagggaggacgtggaggatttggatcccgagccggggctgctgcacgcggaggaggaggaggaggaagacgaggagccggtgttcgtacttacggacgagtgggcggagttcttcgccaaatccgaggccaagagaagactgggtaatcgatcaccacttgctgctaaacagcagaagaagaagagccggaagtgatctgatgtgtctgggccatcatcagacagtctggccagagtctggagctcgggaagagaacggacgaatagcttgtcaacatatacgcatcgctttgccaggagttcattatgttttttttttactttatacagagagttacgagttcacatgatctaaacactgtaaccttttgagttcacatcatctgaaatctgtgctgtatctattcggacttggagaaggaaaacgaaaacagtactatgacagtcgacaaggttataaagttatgatcttc

SEQ ID NO: 24665 - DNA, 1017 bp, Zea Mays
ctgggtaaagaaaaagcgaaccccatccgtcgcttccatggtgtgctgaaaaatgttcccaccggacatcgtcgtcaatctcacgaattcagatcgggtttaggtacatgaattaaccacatgatgcaaagaaccagaattgagtcgaccacaagatggtgctgatgaacggaactgaagatggacagacgaaacaagtatcagaacaaaagatggtcgtcaggtggacgtcgcctaacaaacactaacctagtgttactccaggcaagccccggtgcatttgccaactccttgatgttttaaaatcttttatcaccttgtttcatgcattaggtgataggagttgtgtgctaaacaattgatgcattttcttccttgaaaaattgattacccctccttgataccctattatgaaaatgatttttatgatgcttagccttgctttagaaaaacaaaaatgttttgttttaaaacaaaaagtgatgcttcagattggatgggaagttttcaaaaataaaacttgatagtggatccatcacggccgtgatgggttcaacatcggaaaagatgtacctctgccaggtaccaaactttgggttgaaatgaataaagctgagaccgggcggttgacttgcacgagaagggagtctcggtgtagtgtctccgtctacgttaattaaggaccgtgtcgatgtaggcttgatgattgatgaccttttaactggtcacatgcctcatcatgggtaagctttgccttgggtagactaataccagaataagataacacgcaatgggagtggagagatggcgagagtagcatgtaccctccgtggcaagaggctggacgatggtgtatctgtgctctcggttggcatgaacctgatctggtcttgtaggaaataggtgatgcctaagaggggggtgaattaggacttctaaaactttcgctaaactgggccacaattaaatccctagagcaaaacatatgcaaatagtcaaactagaatgtgcaaacta

SEQ ID NO: 24666 - DNA, 191 bp, Zea Mays
tgcgcggtgcacacaaagcgaactattctttcgccttttactaaagaataccgtgtgtgcgccgcaaatagcagcatacgctaatttttggagggatcctctattttagggggccccacagttcaaatcaaagtttgttatataaaaaattgaattattttgcatttcttttttaaaagcctatacagttt

SEQ ID NO: 24667 - DNA, 2696 bp, Zea Mays
aaaaggtactcggtctcggagtagcttggcgagtgctccacatcgtctgcttggctgctttccaccgccggagacggagtgtcggatgccatgggcagcggcgcgtcgcggctgctcaccgcgtgcgcgtgctcgcggccgccgccggcgccagcggacgacgggccgtgcctggacgacgcgctcggccactccttctgctacgccgccagctccgccgccgccgccgccgcgggccattcgtcatccttccgccacgccatctccggcgccgcgctctccgccaactcctcagtgcccgtgccgatctaccaatcctccgtcgccggcggcatgccgccgcagtaccactccgcgttccacacttcctcgtcgttctcctccgcgccgctgcagctatccaacctctcctcggggccgctcttcctctccgggcccatcgaccgcggcgcccagctctccggcccgctcgaccaggccgtgcccttctcgggcccgctccccgcgaagcccaccaagcccgctcgcccctcgtcgtcgcgagggttctcgaggaggttcaggaaaccctcgttcggcagcctgcggcggagcatctcggagaagaaccgaccatgcgtcgtgccgctccgccgggaggacggcgttcagtgggcgcacggccgcgccggggaggacagggtccacgtggttgtctccgaggatcagcgctggcttttcgtcggcatctatgacggcttcaacggccccgaggccccggacttcctggtcgctaatctctaccgcttcctgctgcgcgagctccgtgggatcttctacaaagaggccgatccggaatccaagcgactgtggcagttcctggcggatggcgaggacgaggatagcgaactcgacttctcgggctccggccggttcgcgctatcgcttgccaggctcaaggagcagaggcatcccttgtgggcccatgcggccgccgctggcgatggtcaaagcggcagggagtggggagttaagaggttgacggccgcaccggcggtgagggatcacagggcggtactgagcgcactggcccgggcgctagctacgacggagtcggcgtacctggacatgaccagtcagtcaatgggatcccacccagagctggcagtgaccggagcttgcctgctcgtggtcctgttgagggatgacgacgtgtatgtaatgaaccttggggatagccgtgccattgtggcgcagcgacgggacgacgaagattgcttgattgggagcattccggtggaggacattggtgtgggcttggagatcgagacaaggatccctgggtattcggcaattgggctcgaggcattgcagctgtcgactgatcatagcacgagcgttgaagaggaagtgcagaggatcagacgcgaacatccagatgatgatcagtgtgttgttaatgatagagtgaaaggtcgtctaacagttacccgtgcatttggtgctgggtatctcaaacaggcaaggttcaatgatgggttgctagagatgtttcgcaatgagtatataggtgataccccatatatatcatgcacacctactctttgccatcataagctctccatcagggatcagtttcttgttctttcgtctgatggcttatatcagtacctaagcaatgaggaggtagtgctgcatgttgagaattttatggagcggtttcctgagggtgatcctgcacagagtttaattgaggagctactctcccgtgctgcaaagaaagctggcatggacttctatgaactattagatatacctcaaggggaccgcagaaaataccatgatgacgtcaccattatggttatttctcttgaggggagaatatggaaatcctctggaacatatgtgtgatgttcagctgatatactgtccgtgtcagtatttattccgatgcaatattcagctgaaatgaacttcagccggtcagcactcccaggcgattgcacatatgctcaccaagaggggaaaagtctggcatgacatacagctatgtagtccatacacttgtcgaagtggagttctccagctggggatcatcgctgatccttcacatcagctttgtcacagctcatgctcataggttaactcgggcagattaaagttgcagaaaaatgacagcctggtagggaggaattcctggaaaagcagagccaattttgttctgtttgccactacagctttgtttggttacatactcaccactgacaattttttccacctcacactgagttgtcatagagttgggtgcttattttatccttggaaatagaaaacttttaggtatatgcagctttttctcattcatgtgaggattgagcctgtattatattggaaactagaactgatcatgtcagaaaaatggatgattggcacctcattttgtcctgactcctgaaggtggttctccttcgagtctttgagccgttagtggcatccgtgaaagaaaattttacatttcgcctccactggaaaaacaaagctagtgcctcctagcccttggcaagttatttggttggtcctcagaaaagctaagagctgaaagatattttggaggcaatccatcagtcgttggcgatatttttcatgtgcatggtatatctgtttgtcgatcctgacgatatttaactctcaacatgatgaagaaatttcggttaggc

SEQ ID NO: 24668 - DNA, 1403 bp, Zea Mays
cacgaacacactcgtgtgactcgtgtcctcatagctgagagccatttccaccgcccagcacgctggacccacctgccggcgtcccgaagagcggaacacctgaagccaacgccggccgtgctgcttccgctgcctcatcgcaccaagccaccagtccgcagcacgaaagcttccccccctctcttctcctgctggttggctcatcaggcctgcccgaataatcctcctgcggattcccctcacggcaggccaaaacccgcacctttcccccgtcgacagattctcaaacccggcgaactccgggcagggctcacgtcgccgatcccgctcccggattctctttgccgccgcgaggagacggcgtccagtccaggccttcagcagctccgtctccgtgtgtatctgatcgggggattctttgcttgagaaactgctagcatgggcgcggtgcttggacggcatgacacgcacaagcggagttcccatggttcgaagctggaggtaaagatggtcgacgctatgcagcagagagcatcgcatggaacctcactgaaatcgttcgatagcattatcatgaagttccccaaaatagacgagagtttcagaaaatgcaagactatcttcgaacagtttgattcaaatggcgaaatagataaagaggaactgaaacattgttttcaaaagctggaaatctcattcacagaggaggagatatgtgatctctttgaagcttgcgatataaatgaagatatgggcatgaagttcaacgagttcattgtctttctgtgccttgtctatcttctcaatgaagcagctgtcttggaagcaaagataaagatgggactaggaaatcttgaggcaaccttcgagaccttggttgatgcgtttgtcttcttggataagaataaagatgggtatgtgagcaaggatgagatgatccaagcaataaacgagaccacgacaggagagcgctcttctgggcctatagccatgaaaagatttgaggaaatggactgggacaagaacggaatggtgacattcaaggagttcctgtttgccttcactcgctgggtaggaattgatgaaaatgaggatgaagatgacgatgaataaggactgtgaaggctggttattcttcaagggttagggccagatcagccttggagaagctggaaatggatggcggataaaagcagttgacgtttattggttgcttgttgatcgtaatattcatgccattgctaatagaatgtctcgacattatactcctagtagggtgacttgcatgtctgaacactggtatcaatgttacagttgctgtctactttcttccatgccattcagccattgttctactctgcgctagcccgcgccgatccatttcaatcgtgtgcagcttcttg

SEQ ID NO: 24669 - DNA, 446 bp, Zea Mays
cggccgctctgttggatgtttggatggacctgtgggttatggcatgccccctcctcacggtaacccttcctgttcaaggagactcggcagaatcagacgccgccggagtcttctaggcttcctcgccccttccacatcgccggcggcatcatccttgcgccgcccggccagatcacagccggtccgccgcttgcctgggaagagagggtggaggaagtgggggaggatgagcgaggagaggccggtgccgcggcgggagagcccgtggggtctgcctgagggcgacacgcggcagcccaaggctcaccgctgtaacgaccgcgccgaggacgtcgtccaggcttgctttgaagggaacccattcaagacagttccaggcccatttaagctcttctggcaatgcatgcgctcaaaacctggggatgaataagaggcaaatgatctca

SEQ ID NO: 24670 - DNA, 560 bp, Zea Mays
ccacactatcggcgatgcaagaagcatatgggcaagcattaggcatggtttcagagatgcagtcgaattggaagatgtgaaaaacagaatgttcattctgttctacttcaggaaaaaggaaaaaagtaaggtggcgaagagcatcgattggccacagctgaaaccgtgcttgtacaaacggcgatgagccgcttgtctcgtatccaccagtaatactgtagttgttgtagtagagctcttcaaaagtttcgtcaaaactgaaagtctagatttaggtccctccgtacctgtatggctgcatctgtgtgccacgctattccattattttccacattagctgcgtctttcatttgttggacctcacaagaaaagatcacatagggaacgatgcattgtttggaagcagatcatatataattcaagtctacttttcacatgctgcaaattttgtgtatggtccagcgaacgaacatctggaccgttttcatttttcaatctggaatctggatcagcttgaaggaagtgctatgaccttgaatacttgatgaacggaagcattc

SEQ ID NO: 24671 - DNA, 202 bp, Zea Mays
agaaagaatgcatgttgacgcaaattgcatttacactttattgcctcgttaaaaatcttatatgaaaaggttcaggaaaactcactaaggggaaaagagcacaataaatgtcaccacgacataatttgatcttctagatcttgattccattgaatcttgtacaagggcttaaatttagaaatgtgccccttgattcctgcaa

SEQ ID NO: 24672 - DNA, 1002 bp, Zea Mays
ccacggcccacgcggacacgcccaccgctcgaagcagcgtagcgactagcgagcattcgcacagcggctctctttcctcgcgcagtcgcgctagacaagcggctgcctccttgcaagttgctactgctaccctcaccctactaccgacgagacgtcgacggcgacttggtctaagccccgcccacccgccaattgccaccaaaaactaaccgcctgctctttcaggggagcggacccggacgacgagccacgccgacgctagggtttggtttcgccggcctgcccggccatggacctgcccccgggcgccggccgtcgcaccacctactccctcctcccacagttccccgacgacgccgccgcacctgctcccgcccccgccaacatcctgcagcgccagtccagcggcagcagctacggcgccggcagctctatctccacctccagcgactacccattccacttacaaccccccgcctcggccgcgggggtcgcgccgcccggatcggcagcggcgcctcccggggcggctggctcgccctgcaagagctgggcgcagcaggccgaggagacctaccagctgcagctcgcgctcgcgctccgcctctgcgccgatgctgcgtgcgctgccgacccgggcttcctcgacccaggcgattcaggaagcgggaggggcagcggtaacgggagagccttcccgctcgcgcagcccgcgccctctgcggagtcgctctcgcatcgcttctgggtaaatggttcgctatcatacaacagcacaataccagatggattttacttgattcatgggatggacccctttgtatggtcactatgcactgatgtacaggaagagaaccacataccctccatggaatcactcaagtctgtccgtcctgatgatccttccattcaagccattcttatcgatcgaagaactgattttgaattaggggtacaacttccaatgaagagaacttgctaacgaataaaagcatttattca

SEQ ID NO: 24673 - DNA, 1213 bp, Zea Mays
cgctgcttcgccctgcccaccacagcatccgcagttccccgaccacaccgttcctccgagcccaggagcagccccgcgccaggaggaagtttgttcttttaacaatatgtcgagggaggagaatgtttacatggccaagttggctgagcaggctgaaagaatgtgattggggctcgccgcgcttcatggcgcattgtttcttccattgaacaaaaggaggagtcccgtaagaacgaagagcatgtgaaccttatcaaggaatatcgtggcaagatcgaggctgaactgagcaatatctgtgatggaatcttgaagctgcttgactcccacctagtgccttcttctactgctgctgaactccccagacaaagcttgcaacctggcaaagcaggcgtttgatgaagctatctctgagttagacagccttggtgaggagtcatacaaggatagcactctgatcatgcaactcctgagggataacttgaccctttggacatccgacctcacggaggatggtgctgatgagggcaaagatgccccgaaaggtgatgcaggcgagggacagtaatcttcggagggggtgcaaagttgttcgagccccaatgttttagatgctctatgctgtcgaagctgtgctgtgccattattgtagctgatttcgtctccattcacttcttttttcttgttagtaggctggtagtggtcgaattaatttgctttgtgttgccgctagtccatgtggactggtattgttcccctggatttatttggcaagcgtgtccgtgctcgctctagcgttttattgagcttttaaagtcatcgcattcttttttgattgcaatcagttattggctggatatgcggtggctgtttggatcagaagtacagccggagtttcctcaccggagcgtgtaacatgtggaaattggaaaccacgcaaacgtctctcttatttgtacccctgagtacatagggctttttttaacagcttttctgaaaagctgcgcttgtttggtttgacttttttctgaacagcttttctgaaaagctggctgtggggagaagctggtgattagaatctgggtgttggttcgcctgctgtggagagaagctggtggttaaaatctaggtgtttggatacacagattctgagattgtaagattgtagattctgattaaaaaaggaaacagataaaaacaccgaaccaacaag

SEQ ID NO: 24674 - DNA, 681 bp, Zea Mays
cccccccccggttgtctctacctcctcacgacgcgaggaaccgatcaggtcactgccggacccgccggagatccgctcagcccgcgctattccgatccgaaacacctcgtcggatctccagggatctgacagaggaccagcgcgtcggctgctgacccggcggggcacgcgcgcacgccagccatggcgcgtggtggcggaggcgggtgctgcccgccgatggatctgatgcggtcggaggcgatgcagctggtgcaggtcatcatacccgctgagtctgcgcacctcacagtctcctatctcggcgacctcggcctcctccagttcaaaagaccttaatgcagagaagagcccgtttcaacgtacatatgctgcccagatcaaaaggtgtagtgaaatggctcgtaaattgaggttttttaaggagcagatgtcaaaagctgacataggtcctacacaactaaatgaaactcatctggattttgatgacttggagataaagcttggagaactggaagctgagctaactgaagtcaatgcaaacaatgaaaagttactgaggacctacaatgagctattagagtaccatactgttctccaaaagctcaaagaactgctgcatcacaacaaagggaattggaggcaaatcaatctggtcaaacttcactggagagccctctg

SEQ ID NO: 24675 - DNA, 1821 bp, Zea Mays
tgcacacatgtgtccgtttgagaggtctgtgctatgcccgatttcccatgaccgcaaatgatcaagcgacgtgggagttagggttgaggtggagaagcaggtcctggattccagagagaaattggagtattaccgcacaaagatgcaagatcttgtcctgtataaaagtcggtgcgagaataggctgaatgagattacagaaagggcgtcctctgataaacgcgaggtggaatcattggctaagaaatatgaagagaagtacaagcaagtagctgagttagcttccaaactagcagttgaagaagctgcatatcgtgatgttcaggagagaaaagttgagctgcatgatgcactgattaaaatggtacaaggtggaagtgttgatggtttacttcaggttcgagctgatcgaatccaatatcaattagaagagatggaaaaagctcttagtgaacggtgcaaacactttgaacttaaattcaaaccatctgcatcagttgagcttccttccggttgggaacctgggccacaagagggactcattgagtgggatgaagactgggataaatttgaagatgaagggtttagtattgttaaggataatggtacaatacaggaaaacccagtttctgctgaaaatggaaaagtgccatctctttgggatgatggtgatatgtctcctgttgcatcctctaatggtcatatcaaggaagaaaggcgttacagtggaggtgatcaagtggctgagagtgaaatagcatatgattttggtgatgaatctgtgaggagtcctggcagtgctggaagaagtgcctcagggagtccatttaaatcttccggctttggcatgcatgactcatctcccagcaaaagagaaagttacagtgaccatggtggttctgaatccgtttttggtgacaagtttgctgatgaaacttcctggaactttgatgatcaagatactgactctgtttggggttctactgtactgaacactgaggccgaccaacgcggtggcacgcataactctttctttgggtcggaggcaggctcaccaagtggcgctagtgtatttggaaagaagaggaattcattcttcgacgattctgttccaagttctcctgcatacacatctgggttctctccaaaatttggcgaaagccgtgacgatagctcctcttataacttcgggaggtttgattccttcagatcccaagacactggatccttccctcaggaaagccgtttctccaggttcgactccattagcagctccaagggcgagaatgtatcaggatttgacacagggaatagctcacgaaattttggccggtttgactcttttgatgacgccgacccattcggttcaagtggaccttttaaagcatcgggaagccggtctccacccaagttctgatatgctctctgctctgattagggttttgtgtcttgcgtcttgatttgtcaatacaaggtttagattctttgagcgaactctggcgtaacatggatttttttacctgacatttcttccattttccttatgtgcaattttcgagtccatctcacgcacaaagtggacaggtttgggtttatatctttgtttttgtaaacattttttctgtatcttgtaaattacgccaagtctgtctttgtttatatagtttacatgtatgaaacaacttctcgccatataacctattatttccttcactatattaacgttgatatggtatagcagcaggaaatgctgtacttacgttgctatggtcaaagatattagggcagttgccccagcaaaactccacaagctagcctcct

SEQ ID NO: 24676 - DNA, 2248 bp, Zea Mays
gttggttgtgcattactgcattgcatccagtaaaaaaactacagctcaaccaaatttagccgagcggagacgcacaagccggcgtgggctgcattacacgagacgatcaacaagggcagcggcccagcagcaacgaaccaccgcacaagcgccaggccgccagctcgcactctggtccagccacgcggcgccgctgccaccttcctctcaccgtgtacgtcttcggcgtacacgtctctctctctctctctcctcccctaaaccctacgctgcccttctttccctccccgtctctccctcccgtgcgggcggcggagctgatgagatcccggccatggcgggccccacctcgcggctcctcatcctcgcccgccgcgccgaccgacgcagatgcctcccttttctcgttccccgcgccttgcaggccgcccccccgaccttttctccggcgttgccgctacctccctgcctccccgcctcaacgccggtgatgagctattcaagtgcatttacaagtgtacatggagagaggccttcatcagaatatgcaaagatcaggaaggagtcactggaaacccagtttggaagaatattgggttcaagttcacgcaggcattttgctgaccgtggctttggtccattccttgctctatacagggctgctactatctcctttcatgttgtaaaactcactatttggcatttgttgctcaatgatatgcataaaagagcagaaaaggtagttttcctgactttgttggtggaggaactgagcatcatgtctctgattatcatttccttatttcagtttcgagagaccttgatacgcttgggtcctttttatatcaaggtatgccgattgaaatagatctgtagaatgtagcaccgatcttttctattaaattttgatgcttaacttttcagtatgtctccttgttaaggtggaagcaacatcaatgtaacatgtcttatgaccatcaaaatcactgcagctatcactatggttttgtgacatgattgttatcatccttaagcatctgtacaaaatcaatcacattggtggttgtgttgactgcatatttagtgtgccattgttgtgtccatatcctgtttttgaactacaatacttcgttagctaccaggtcgtgggttcgaagcagcctctcagcatttgcggggaatggctttcctcctcggtttatctcttccccagaccccattcatgtgggagcctctggcactgggtctgtctgtcctgcaataatttgttagctaatattgtcttaggtgtaatattgtcttattacaactggggatgatatgctgttttatcaattttctttcaccgcacagcttggccaagcattgagcacacgccctgatatacttcctagtgcgtactgtcaggagcttgcaaagctacaggatcaaataccaccgtttccaactcgcattgcactcaggaccatagagtctcagttgggttctcgaatttctgatttgtttgctgatatcagcccagagccgattgcagcagcatcactggggcaggtttacaaagtaatgcagctcatctacgatctggagagcttgttgcagtcaaagttcaaaggcctggaatggcgcccttgctgactctagatgcacttttgttccacatgattggaggacaaatgaaacgatttgctaaggctcgcaaagacctattggtggccgttaatgagattgtcagacacatgtttgacgagattgattatattttagaaggaaaaaatgctgaaaggtttgctactctttattcacatggttcaagtggggtcaattctgaagctagtacaagtatcaaggtcccaaaagtttactggaactatacatgtaaaaccatattgacactggaatggattgatggaattaagctaactgatgctgagcgcatcagcaaagccaatttgaacaggaaaagaatgatagatgagggtctctattgctcattgcgacaactgcttgaagaagggtttttccatgcagacccccatcctggtaatctagttgcaactgaaggtggatctctagcatattttgactttggtatgatgggagatattccgaggcactatcgtgtggggcttatacaaatgatttacttgcagttgcagatgcgttgcggttttcctttggtgatgtcaggaggcaatcaaatgatttccaggccttaggagaggcggtgtccgccaaacttgacatggag

SEQ ID NO: 24677 - DNA, 188 bp, Zea Mays
cggacaaaaacaaaggatgacagactggtaaatcaacatatttttttcaaagtccacacatttgttaggtccacaatagatttttaagttcatatttttaggtccatgtgtggtcattgcactcgatggatccattgacggcaatagtaatatagtaataagggatcagcatgcaaattgcgaacatt

SEQ ID NO: 24678 - DNA, 190 bp, Zea Mays
tcaaaatagtaaatgtgttagaggatgagataccttgagtgatgtctttctctagagctctcatcgtggctttctccaagattggaattccatccctaggaatcctcgagctggctctggtagctcccatagggcctttcgttgtcgttttcttcctacctcttttgttgacaaccacatcccacttact

SEQ ID NO: 24679 - DNA, 195 bp, Zea Mays
gaaaatttgacaacactaagactgtccggtagtgtaaaacatgagacgtaaaaatgtagaagatgctgtttgcagaacgaagtttgaaataaagggtgagatagatagcctaagcacgcacaattctgtctctctactgtgctaaagctaccactcctgcgatactgtgggcaagaaaaattgacgggcaatctt

SEQ ID NO: 24680 - DNA, 8506 bp, Zea Mays
acttgtgaaaagtcctgaggatacaaggtagtaagcggcatctcgtctcgtctccccagtccccaccccgagatcgctcgtcgccgccgccgtctctttactgaacagggattccctcgcggaccgcggcccgaccgcctccccgaagctagggttcgagggaggttatgccggcgctgtcgcaggcacggatccgggcggcgtgacgcggatccgccggacgctggcagggtcggccatggcgtcctccccagtcaagttcttctcggtgttcctggccgtctccgtcgtcggatggatcgtcttcacgtttgcttcaagattgttagcttggttcttgagccgtgtattctctgcttctgtcggatttcgagttgctggtttcaactgtttgagggatgtaacaataaagttctgtaagggttcagttgaatctgtttcgattggtgaaataaaactaagtttccgcaagtctctagtcaaactaagttttggtgttatctcaaaagacccgaagttgcaattgcttataaatgatctcgaaattgtaactagatcatcttctgaaaataaaaagatacgaaagtcagcaaagcctcgctctacaggaaaagggaaatggctggttacatcaagcatggcaagacttttatcagtttccgtgacagatctgataatcaaggtaccgaaaggcgctcttgacatcaaagaactaacggtggatacatttaaaattgctgggcctaatcatactcttggtgtcaagttgcatcttttacctttgaatatactccttggagatttgggattgactactgatccaatgggcagttgtagtctgtttgatgctttccagtctgatcaagcttctgtatctaactcagagaaaagcttggccccatttgtttgtgaagatttgttggttacttgtaaccttggccatgaaaaggagaaaggtattaaaatcattaacctggaattgaaatgtgggtatgctattgccaacattgatgaaaggatgtttcacaagaagcgcacgattccagaatataacactgtctctttgaacaccggagattctatcacagatacttcagcgctcaaacaaacatcgaaaagcaaatctattctaccgctgttaaagaaacacatgctcacatttccagataaggttagcttcagtgtgccgaagcttgatgtgaagttcagacacctgcatgaaggacttagtgttgacaacaacattacagggatccagtttacttgtgcaaaatccctaccacaagatgattttgaagaagcgacaccacacttcgatgttcaaattgatcttagcgaaattcatttaattagagaaggttctagttctctgttggaagttctgaaagtttttacaatagcttctttggatgtccctgttgacccatttcttccaatcagagctgagattgatgccaagcttggtggtacccaatgcaatattatgttaagcagactgatgccatggatgcggcttcattctttgagaaccaaaggaatgaaactttctaaaagaaactccaatcaagaaatttctcaaaaaaaggagatgaagccaattttgtggacttgcacggtcgctgccccagaaatgactgtcttgctttacagtctaaatggattggtcttgtaccatgcttgttcccagtcatcacatttgtttgcaaataatattgcaagcaaggggattcagatacacacagaacttggtgaattgctggtgcacatggaggaggaatatagagagttattaaaggaaaacatatttggtgtggatacttactctggttccctaatgcatattgctcggatgagccttgattggggatatagggaaagtgatgtccaagatatggttgaaactagcaggaatgcacttgttttttcgattgatataagtgatatggaagtgaaatttggcttcaagcatttggaatcaattgtgcttaatttgatgtcgtttaggactctatttaagagtctccagctatctggcggaagtgctaaagaaaagaatttggagcgtaaaggggagaagaaaatgaaaggtgtgaagaaactgaaattaagcctacaaaaattctctattacatactgtggtgatgcaaacataataagtatgccaattgctgatccaaagcgtgtgaactacggctctcaaggtggtcaagtaattgttagtgtttctgctgatggcacaccacgtagggcaagtataacatcagttttaccagactgccacttgcggttctccgcatctttggtaatatctcatctctctatgtgtatagacaaggagagaaagacaacagaagcggaattggaacgggtgaaggcaatctatgaggaattacctgaggatcgctctggtgtcagagtaactttactagatatgcagaatgctaaaattgttcgccgatccagtggtcatgcggaagttgctgtttgttccctctttagtgctactgatatttatttgagatgggaacctgatgctcatttagcactatatgagacattcatccgctttaagcatttcctacatcataatgtgtcccaaaattctgaaaagatgattaatactgaagttgcaagtaccaaatcaaatgaacatggcaacataactgccggtttcattaattctcagaaatccaacagaaaagggtcaatttttgccattgatgtggacatgttaagggtatctgctgaacttgctgatggtgttgaagcaaacatgcatgtacagtcaatctttactgaaaatgccaagataggtgtactgtctgaaggtctttctcttacttttaatggcgctagagttctaaagagcacccgtatacaaatatcctgtatacctttcagcactgggagtttacttgatgcaaagattgaaccatcatccaaaagagactgggttgttcaaggtctagatgtccatatttgcatgccttacaggttgccattgcgtgccatagaagatgctgttgaagatatgtttcgtgcccttaagcttgtctcatctgccaaaagaagtataatctgtcctgatgaaaaggaaaaatctagaaaggttaattctgggggatccaaatttggatctgtgaaatttgtattgcgtaaattgacagcagatatagaggaagagcccatccaaggttggctcgatgaacattaccatttgatgaggaacaaaatctgtgagctaggtgttaggttgaattatcttgaggaagctatatcaggaagtgtagatccgagcaatcacagctctgagagaaaagttctctacaatggtgttgaagttgacattcatgacaccacagctcttcaaaagttgcaggaagaaatccataagcaagcatttcgatcatattatgtgtcttgtcagaacatggtacttgcagaagggtcaggagcgtgctcagaaggttttcaagctggattcagacaaagctcgcgaagagcttctcttctttcactttctgcttccgatctggatgttactttgaccaggatagatggtggagagctaagagactatacttctcctctgttctcttcactcagtgggaaatgtcaaggccgtattgtgcttgctcagcaggcaacatgttttcaaccccaaatacaccaagagttgtatattggaagatggcaaaaggtcacgatgctacgttctgccagtggtactacgccagcaatgaaaatgtactctaatttacctatttatttccagaagggagagatatcttttggagttggttatgagccatctttcgctgatataagctatgcatttcaagtagccctgcggaaagttaaccttagcactagagcaagctgttctggtctagcagtccaactgcctaaaaaggagcgcagcttaccatggtgggatgacatgagatactacttgcatggaaagataattttatatttcaatgagaccaaatggaagttcctggcaacaactaatccttatgagcatgtggataaactccaaattgtctctgaatacatggagatccagcaaactgatggtcgtgtggatgtttctgcgaaagaattcaagatatacataagcagcgtagagagtattacaaagaaccgccgcataaaagttccatctcgtgtgcccagaccttttatatatgctcctctattctccctaaatgtggttattgattggcagtgcgaatctaggaatccattgaatcattatttgcatgcactccctgttgagggggaacctcggaagaaagtttatgatccatttcgatctacttatctctctcttaggtggaacttctccctcagaccattgcaatcccagtatggtaatggcccaccacctcccttttatggaaataattcaatgctccgtgggatcatgtctggtagtccttgcaaaatgactgatgatgacttccctaccatgaacctgggagctcatgaccttgcttgggttttcaaatggtggagcttgaattacagcccccctcacaaacttcgttccttctctagatggcgtcgttttggaattcctcgggctactagatctggtaacctctcgctggacaaagttttggttgaattctttttccgtgttgatgctactccctgttgcataaggcatgcacctttaagtgaggatgatgaccctgcttttggtttgacgtttaagatgtcaaatttgaagtacgagttatgttacagtcgaggtaaacaacagtacacatttgattgtaaacgtgaatcactggaccttgtttatcgtggtctggatcttcacaggccggaggtttatttgatgcgagataacaatttgtcttcagttgaaaatgtatccaaagtaaggactatggtccaacagtcacatggaaaatttgttcatgacagatgcaacatgggtaatttccaagaaaagcatgaggatggcttcctcttgtcttcagattatatcacgataagaaggcaaacacgtaaagcagatcctgaaagacttatgggatggcaggatactgggaggagtcatgagataacatatgttaggtctgagtttgaggatgacagtgaaagtgaccacactctatctgagcctagcgacgacgacgatgattttaatgtggtgcttgctgacaattgccaaagagtatttgtttatggccttaggattttatggactattgagaatcgagacgcggtttggtcgtgggttggaggaatttccaaagcatttgagcctccaaaaccctctccttcacgacaatatgcacaaagaaagatgattgaagaaaggaatgctgagggctccaaggtgccgcaagattccagctcttccatacatgtgggttctccatcagtgcaacatctggatgcttcgggttcatcttcctcgttgcatagtaaagccaatcgctcctctgatgtggctgtaaatcatgacatttttgatgattcggataaaggagggacagcccaatatatggttaatgttattacaccccaattcaacctacactctgaagaagcaaatggaaggtttctacttgctgcagccagtggtcgtgtactggctcgttcatttcattcagttgttcatcttgggaaagaaatactagaacaagcacttggaacaagcagtgcacagattcttgagttacaacctgaaatgacctggaacaagtcggaactctcggtgatgcttaaagatgttcaagctcatgtagcccccactgatgtggatcctggtgctggtctacagtggctccctaaggttctgggtagctctgagaaattgaagcgcacaggtgccttgttagagagagtgtttatgccttgtcaaatgtatttccgttacactagacacaagggtggaactgcagacttgagggttaaaccactgaaggagctacgctttaactctccagacattactgcaacgatgacctctcgccagtttcaagttatgtttgacgtgcttagaaatcttctattcgcaagacttcccaagcctaggaaaaacagtcttcagtatccatcagatgatgaagatattgaagaagaggctgacgaggtagtacctgatggagttgaagaagtggagcttgcgaaaattacactcgaacagagggaaagggaaattaagttactgcttgatgatataaggtctctcactggaaatggtgataatgggaccgatcactgtcattctgcagaaaaaggtgattgtttatggatgatcaacagcgggaaagcttcattggtggaaggactgaaaagggatttcgcaaacctacaaaagtctagaatatttgcatcatcagcattgaggaaagcactttcaaatgcttcacaatcacatttggagaaagaaaagaacaaaaccacttcttgtgccatgcggatttctatgaaaattagcaaggttgtatggagcatgctcgcagatggaaacacttttgcagaagctgagatcaatgatatggtgtatgattttgatcgggattacaaagatataggcattgccctgtttacaactaaatactttgttgtgcggaattgcatggttaatgcgaaatgtgacaccttattgtctgcctggaacacacctcctggaaaaattaacatgcttcgtgtggatgccaagcaaggtgctcctaaggatggaagttctccacttgagctcttccaggtggagatctacccactgagaatatatctatctgaagcaatgtatagaatgatgtgggattacttcttccctgaagaagacgattcacaacgaagacaggaagtttggagagtttcaacatcaaccgggcctagaagaacaagaaggctctcttctggtgtcgatgctgttacttctagcagctattctgtcagagatcatgaacttcctgggaaatcaagtacaactgtatctacatcaacaaatgtttcaagttggcaaggtatactcagcgataactcacaggtgtcaaagtttcagagtataaaagcaaatatggtatgtggttcgcatcaagagttgcaccggtcgtcttcatttgaaaggaattgggaagaaagcgctgcagaaagtgttgcaagtaatgatgtggtatcactcctgaattcttcaattgtttcttcaaaagtagatgctagcaattctgtcttagagaaccctgttgtgggaagtgagatgtggagaagtaaaacgaaagattctaagcctgccaagtctggacgtctatctcacgaagaaaagaagcttgggaagtctaatgatgaaaagaagacaaaacctcggaagtcaatggaatttcataacatcaagattggcaaggttgaacttcttgttacatacgagggatcaaggcttgctattaatgacctaaggttgcttatggatactttccacaaggcagaatttactggtacatggaggcgactattctctagagtcaaaaaacatatcatctggggagttttgaagtcggtaaccggaatgcaggggaagaagtttagcaaccatagggaaacacttgagggttctattcctgaaaatgatcttaacttgagtgacagtgatgttggtcaacctggaagacatgatcaattaacagcttcatggttgaagaggccaggcgatggtgcaggtgatggatttgtcacgtcaattagggggcttttcaatacacagcgccgtaaagcgaaggcctttgtgattcggacaatgcgcggtgaagggcataatgacgaatatcaagacgaatggagcgagagcgatggtgaatacccttttgcgaggcagcttacaattacaaaggccaagaagctcatacgaaggaagttccgtccaagggtgcaaaagaacccaggtctgtcgatgcaagattcactcccatctagtccgcgggaaacaactccatatcaaagtgactcctccaggtcatcttacgaggacttccatgagcagtaaaacaatctggtgatgctgctttcagcttctacatttggtcgataagatgcagccatttatattggttatagtagggtgtatgtatatagtaggatgtaccatcaaaatccaatgtatcatgtatagtggttaggcaatactccgtaattatgtgcttgtaagttaataagaggccagctcgtactcctagaaaacaaaacccgtgatctatggcatggggcattctcattcccttgtacttcaggactagtatggattgtaaattcaacggtgaaggtgttgcaacatttattcagtaaagtatccttgttgaagaatttgtaaaaactatggcagaaacaatagggaaggagcaagtgactaggtgcctaggtgtattatgattcttttgctgactagttggaagttagaaatgcattgctccacgtcaaaaagaaatgcgtggcagacaaggttgttgcttaacagatcggtgagctatgaaatgctatctgttca

SEQ ID NO: 24681 - DNA, 1141 bp, Zea Mays
aaactctcaagtaactttatcatatttatgtgctgccttgtatgcttctcattgagcagagccaaaaggtcttgagttcgacgcaacctctctggacagacagatgaagcggctccgttatccttttactttgttctggagaggagctatttggacagtcacgatgtccgtcctccagggcactgtttctgctttgatgcttatgaggcatgctctcttacttcccaagatctcttgcacggaaacacatccaaagatagcacagcttctagaacatcacaaacctaatgtgtcacttcttatgctaaagtgtgcagagtgcgatagcttctctgctacagaaaactttgaaaaagatggcgtttcatctcttaaggaggcagccactgtatccgtgttagagttgaatgtgccctcctgtcagaagcgtttatgtattataggaggtactgctctaaggtgaaagagcaatgctcagcagatatgatacatgctgaggatgcattcaaaagctcttggatttatcatgctgaggtgatgatggctgagttttgtactgtctgcattgaaaagaatttaattgataaaatgattgatctgccctgggattccgaggaagacaaacatcttcacaagttcctcttcaactctgctcgagaagtgcgcatgaaaccaaatgatagtctgcttgttgtctactaccttgggatacaggtctctggatatgctgagaaacctttcatcttaaatggaactggtgtagcccaaaatggccctgctaaaaggtctgtctctggatatgctggctaccagccaaggataacatcttgattctgcacgctggtttgtggcgatatgtttcgtcgtggtcctggttttaatttgggagttcaaaatgtaatatcagtggaatgaaattcgtgcgttttgagtagctcggggtatagaatttgaatctgactacgtttcaaatactagagttagatgactgcagtggctggcttccagcttctttattatttttgtctattattctcctatctgtcaatgtggccggtttacagtcaattagcgctaacagaggctacatcattcagtgacaaaaaaaaatagtgaatggtgaaggtatacaaactgagct

SEQ ID NO: 24682 - DNA, 753 bp, Zea Mays
gcgatgcaggcgcttattgatcttcacgtggaggacaatgcaaccgcgacgatacacaagtatattattcttcagtaccttggttttgcatgttgatgtcagttttgattaaaaaaagtctatactcgcacaggataaccacatggtccaaacatcaaaaattactttttccaggttcaaagttcaacagatcatgtaacatttaggttttacatttttcctattgtatgttaaaaaataatgaaaatttgaattaaattcttactagccggttaatttactccgttaatccctcattaatgtatgtactgttttcatgctaattaaactttgggagaatttttttccaactgatgtggaaaaatgaccattcaggcatttgagaagggctacccatctgttttatggaatgtcaattgcaatttattcagatgctaattttgcctttgtatgatctttacataatagggtataagaagttcaatcaacattttccctccatgagtgaatgcagatcgatcaaattgagaagatgactacttcaattgaagatgatcggaagataagtgtttgtgatatttttttattgccactttttgttcctaaatcaatcatttgctgtggttccagaaagtaactgaggagtgataaaacgacaattttgagcttcaacgctttgctaggttggcaaaaaacttaaagcaacagagggcggatttggtggcggcgactgtgaggcgggcgagcgaggtg

SEQ ID NO: 24683 - DNA, 1846 bp, Zea Mays
agcagcagcagcagcttgacaaggagaaacaaaaggagaagaagcataagaaggacaagaaggacaaagttagaaaagaaggtaaagaaaagaaggacaaggacaggagtaaggataagcacaaagataagaaagaccgaaaagaaaaacacagagacaagaaaaaagacaagagcaaagataaaagcagggattcaggtgaaggaattgaaagaaatgacgaggctcaccatggtcagaaggttggagagagcagcaggagatccgaagaaattaaggatcttaaattcagggaggacttggtcagagacgtacaggatgagaaaggggcggcgagtcgacctagtgaaaattatggtgtttcaaatgatcgaaatcgcaaaggcttcagtgcttcacccgcgatggagactgaaaggtttgcgcttaataaagtgcatattcagtctagtaatgctccaaggaaaaatgagggactggtacaacagagcatcagtgccaatcgacaaaagaatgggacatcaatacggcattctgaaagcctcaccacttttgctcaaagaactgtgggtggctttccaccagcaccttcaacggaggaaaaattcaaagctgcaaggcctttatccaatactgaagctgcacccagaaaagaggggattggacagcgaatcagtaacattagcatattggttccaaagagaactgaaaacacaaacagagatgttgcgaagaaagaagttgggacctcctctccattgcctccaaatcctgctaatgctatgcataagggaaatgacaaggttggtaggccaatggagaacacacaagtacccatgcagagatttggcagcccatcgatgtcaactgcagcagtggggatggacagaggaacacctaggtcatccatcccaagcccgagcattacaatccggagaccgaatggaattgtacggccgcctaaaaacatttctgtctcttctaagaaacctgatgcaggagacgtttcacctgctattggtaaggaaaaggaacaaggtggaaggttgctgcaagcaaatatttcaactgatcagaaactggttatgtcaaaaccaccagctgtggagaaagctgcacacggaagtgctgaaaggacggagaaggtcagcagagatggggtgcctgatgttgccaagaaagaggacaaaaagagtgaccggcatgagaaaaagaaaaggaaagagaaagataaacacaaagagaggaaaaaggagaaagaggcaaagaaggagaaagagaagcataattacaaggagcatgataagacaagagagaacaatataagttatccggtagatagtcttaacttgaagccctcggcccctcctgtagccccaccagttgatggtggaaaatctgttgtgcccgatgagaacctgaagaagcgaaagaatcatgaaacgaatggttacctacaaattgccgatgcaatggacaaaaaagagagggagaagagtaggcgtcaagcccacaagcgcgctgctgcttcctcgttctaagggcagtttgcagaaggacttgaccccgaagaacagcaggaagaggaagaggctatctagatttaaagggtaaaatgcgccgccttttcttgtggcgtctctgtaattagagtattagacgactactttttttgtttttgtttattttttgcctgctgtattccatttcctcaattacctcggggctgactgagaacttgctcagcgacttccacttcccttatgtctcctagttttaggaacaaatacaatagctgtgcaggctgtaatgcgaagcgactggatgggtggatgttttgatagtt

SEQ ID NO: 24684 - DNA, 3058 bp, Zea Mays
gcgctctcttcgggttcggacccgaccgcacgcggttcaacgagttgtgccgaggcaaaaccctagctcacctccatggatagccacggccacgtctctggcggcaagcgcaagggcaagcgcgcccgcaagccggagccgccggtactcgcctctcccgacaacagccacgaccacaagcaccacgacaccgcaccatcctcctcgcccctctccaccgccgccgtcgcggcgtcagactccccggaccccgagccggcgtcatcctccccagctccccgccgccggggccgcaagtcccgccgcatccgcaacgggacccactccgaggtcgatgccgccccctcaccctcgcctccgccgcgtcggggcgggcctaagggggcgccgaacggtgcggtggacgttgcggagccgtctcggcgggagctggcggttaagatggtggaggttcccgcggcggtggagcccctgcgttgggaccaggtggtgaaggtggtgccgtcgatggacgccgtggtgaaggtgttctgcgtccacacggagcccaacttctccctgccgtggcagcggaagaggcagtacagctcgagcagcagcgggttcatcattgggggccgtagggtgctcactaacgcccactcggttgagcattacacccaggtcaagctcaagaagcgtggctcggacaccaagtaccttgcgactgtccttgccataggcaccgagtgtgacattgcaatgttgaccgttgaggatgatgaattctggaaaggcgtttcacctgtagagtttgggtcgctgccagcacttcaggatgccgtcactgttgttggttacccaattggaggcgatactatctcggtgactagtggtgtagtttctaggatagaaatactttcatatgttcatggttctacagagcttcttgggttacagatagatgcagctataaattcaggaaattcaggggggcctgctttcaatgataagggaaaatgtgttggtatagctttccaatctcttaaacatgaagatgcagagaacataggctatgttatacccaccccagttattaaccacttcattgaagattacaaaaaatctggagaatacacaggtttccctatacttggaatagaatggcaaaaaatggaaaatcctgatctccgcaaggcaatgggaatgaaagctaaccaaaagggtgttcggatacgaagggttgagccaactgctcctgaatctggatgtctcgaaccttctgatatcatccttagctttgatggtattgatattgccaatgatggtacaggttagcccttgcttcacatgactggatatgctaattgtcacctttttatatctaatttgtctgcattgtcataagtgttatatcatattacaagtctgtagctggtacaagtgttatatgcaatctcctaaaggtaagacaccaatttctgtttttaatccaaacatctgaacaattttactcattattttttcatgaaaaagggagaatttattcttcaggctttcagggacacctttctacataatttgtcgagctaaaactcagtgtctatcattccccacaaccatagacctcccacccagataaacatgttttatcttgattaaatcaatccacagggggattgggattttatgttttagctgagtagtgtgcccacctcccatgcagttttctttacaatttgttgactttgacactgagggtcaccgtagtcataactatttgaatccaatcacaacatttcttgttaaggcattcaaacaaaaaaaaatctcaattatcttgtcataggccttcttgaagtttacctttaggactagaccatctctcttcttaattctagtatcatggagtatttcgtgcaaagccattaccctatgatttgtttcaattattttaaaagcttctaagtacgtttttaggtgcttttcacatttctctcgaggtggtttgcattgaatattttcctgggacaagggaacttcacttaacaatgttggaatttgtaaatttgatactttctcatccagttgaaacttaccttttcatgctactcagttatatccagtgaggaaaattgatttgatctcttgctctctcactgcttggtcatccagttccttttaggcatggtgaacgcattggatttacctaccttgtttctcaaaagtacactgctcatatcaagggaaggccgccgtcatattacattgttgctggctttgtttttatggctgtgtctgttccatatcttcgatctgagtatggaaaagaatatgaatacgatgcccccgtgaagttgttggacaagcatttgcatgcaatggcacaatcatctgatgagcagcttgtggtggtgtcacaggtgcttgtggctgatataaacattggttacgaagatatagtcaacattcaggttcttgccttcaatggcacaccggttaaaaatttgaagcacctagcgaccatggtggaagagtgcaatgaagcattcttgaagtttgatctggacttcgatcaggtggttgtcctggagacgaaaactgcaaaggctgcaactcaagatattctgacaacacattgtataccttcggctgcctcagaagagctgaagagctgaggaaagctaggtgttgtctgtcggctggtgagattctgcatgtcgaagagtggaagctggaatgtaacctagttgtaccaaagagtgcctagcaagtatcacatacacacaaaatgcatactgatgactgaatgtcgcattgagccacccgggtcagttgtaggataggtaaaaaaacaaaacaaagttttgcccatattccattaatctagttgacatcaacgaaatcatcatgagtaactttgcgtatccctatttgccatgattggtctgatgacacttctgctttagacatctgtggtccggttgccaagagcatgccactactttgttgtggagtactctagttcatcgaagaaaacaatcgtatctggatggcttttgcatcagttttctgtgtc

SEQ ID NO: 24685 - DNA, 155 bp, Zea Mays
cggaagtcttacaaaataaatggtaataataaagcgaactaattattatttccctggcgccacaaagctgactgggagacgccacctagatcaactcgtaagcttcattgtagggtggctcctcttcaaacacctgctcttcacctgtgggggag

SEQ ID NO: 24686 - DNA, 2868 bp, Zea Mays
cgtcgatcgcgtcggccacaccgggacggtggtaatcatgccgagtgataaagcaaaagctccaaagaagaagggcgaagaggatcctggaatcccgccagctccctgtgaaggagaaattagccatgagccacatagacaacggtcactcaatgggtggcaaaaggttctaaaccctgaattggtcaaagggccatggtccaaagaagaagacgaaatcatagttcagatggtaaacaaatacgggccaaagaaatggtcggccatcgctcaagctttgcctggacgcataggaaagcaatgccgggagcggtggcacaatcatcttaacccagccataaacaaggaggcatggacgcaagaagaggagattactcttattcatgctcataggatgtatggaaataaatgggccgaacttacgaaatttttacctggaaggacggacaatgcaattaaaaatcactggaacagttcagtgaagaaaaaggtcgattcgtacatatcttctggtttactttcacaagtcccatgcctctctctgattgaatgtcctgcacaatgtgactctttatcggctatggaccaacaaaacaacggaggtactgattgcaatgaccagaacactagcgtggtcttaagctctgatttacaagtaaatgtggatgccaacaagaaagaagcacatgactctcactcgtccttgtgtcaaggggtatgctatccttccacagagactgtaggatctgttttgcctgatgacctggagatggatatggatgaaggatcaggaaactctatttttgcagacgatcaaactctttgtagcacatcaaatcaagaacaatctatggtgccatttgttgttgcacaggaaatgcctgtctctgtgctatcaagtgtttctagcgctgagcagaaacggcacttaatctctgatgccaaaagcttgaaatccgaactttggaaagatgtttgtttgcaaactcttattacaggagatacagatgaccctgatgcttcttcaagattaaataacccagattcttctaaaatggacaccaattttttgaaagaggcctacccattacacacaccaaatccatccagtgtgattgaaactgtatatgaaccgatggcgttggtgacaatctctcccccttttatatgttcagatggtttgtctttcgcacccgaaaatagatctaagccaggagaaatgtcagactgtgaagcagagatggtcacatgctcaaacaatttttttggtaatgccgagcaatctgctaaacttgccagcagtgatgacaggccagaggctttcacaatgactgagagcactacaaactgtgggggtgaacaattgacagatgccaaagaacctgtggccagtacagcaaaagaacggttatcgaaagacatcgagactatgccagataaaaagaagggtgagggggctctattctatgaacctcctcgattccctggtttggatgtcccgtttatcagttgcgatcttgtaacttctgctgatctgcaagaatttagtccccttggaattaggcagtggatgcggtcgaccatgaatgtcccaactcctttaagattatggggctctccaacacatgatgaaagcccagatgcactaaaaactgctgctgaaagcttcccatgcacaagttcaataatgaaaaaaagacagagaagtctattgtcccctactccagatgaaagaattgagaagaaatctgggattgcaaagggggtgacggacatctcctatatgataacggccacatgttccatgaatgcaaccaatgatgaagacattgttactgaatcagctgtgtgtgctaagcaaccttctttgaaacatctagacaagaagcttgagttctctgacattaacaaggaaaactctgatggagcatctgaacaggccaaagatgcacaaaacacacaactcgtggatgagcaacattcctcaccaaatgttgtgaatcctaacactgatctacaagacaatatacaacctgtacagattcttgtagagcaaagcagcaataaccttatttcctctgatcatggtgcaaagccatcctgtaaggaagtgattagttcaaaatcaaagcctacaaaactacttgttgaaaaatcatcaccatgtatcaacgtggattacgaatatgtgaatttattggctgataccccaggtatcaaaagaggactcgaatctccatctgcatggaagtctccttggtatatcgatatgcacatgcactttcagggttttgtcagcccagcagacagaacttatgacgcgttaggattagtgaatcgtttaagcaagcacagtgctgctgctgcagtggaggcctgtgagatgctagcaagtggcaacacgacttctgataaggaaaacaaggataatacggatggcaaggaactagtgacaagaaaatcacagattaagatcatggccgaggcgcgagtcctggatttcgacgaatctcccgcacctgcaagaacagcagataagaaacttggcagctgtcaccggagatctgttagctcacccattcttccttcccccaaccttagaagtttccgataggtacaccatatatggcatcatcgtacattacccacctgcatgtattggtgaactctattgttattatgtctccttagagcgcgttgttgaaactattggagcgtttcctttctttcgttactctattgttattactattattatgtctctcagcccggaaacaggcatcagtaccagtgaactgttgaaactaccctaatcattcaaattaaattattatattgcccgatgcatgtagcttcttgtgacaacaa

SEQ ID NO: 24687 - DNA, 190 bp, Zea Mays
tttggagaaactgattcttgtctgtaggaagaaaaacgtgcccttgctacttctcgtgacaaccttgacaagctataccgcgatgccagcaactcgctgaccatcttggagaggagtcatcacttcaccagggaggagttagataatcatcgttataagctgcaagaatccttggacgatgtgattcacc

SEQ ID NO: 24688 - DNA, 161 bp, Zea Mays
tgcctggaataaacactaggttagtgtttgttaggtggcgaccacttgacgatcagcctttgtttcgatacttgcttcgtccatctagcttcgggttaatccatcaacattatcttgcggagaagctcacgctttccagcatcttgtggtcgactcagttc

SEQ ID NO: 24689 - DNA, 1717 bp, Zea Mays
agcttagttctggataattgatgacagattagaattttgaatgtcacatttaccagagactaaaaatcacttgtgttcgtcttcaccgcgataataattccatcatgataacaccaacagcgacgtattaacccaaaatcctccctgcagataaacaccccctctccttctctatctcctacagccaaatccccaactcttccaaccgctcctccgcttagcgtgcagatctaacgatcgctccgatcccaagcacaacaacttctccaattccaatcaccagccgatcagatttatgcagtcttactgccgcgagcgccagtcatgccgcgcggcagcagcttggaccagagcttgagcgacgacgagggctcggcaggtgttggggcggtttgggttcggcgtcgctggcaatgtccgggatgtccgactccgctgggggtgtgcgcgcgggcgcggagctgatggtgcagcagttccacctcaaggtgctccacgccgtcctcgccgtgcgcacgccgcgcccgcacgccttcgcggcgccagcggcggcgtcgttcaggcggagggacaggtggttccatctcccgctccacgacccgccgccgccgcccgaggcggctgaccgcctggacgagctggtccccggggagccgctggtggtggacgtcctcctgagccccgccggtagtgtgggagcccgaggggaggtggtggagaggtggactgtggcgtgcgagccctggccggacgccgcgggcggcgaggaggttgccgtgaaccgggcgtacaagcactgcttcacgctgctcagggcaaggacactaaagatggatctggcagattctctgcactctcctcatgcgattcaccacggcaagatgatctggatgatgtggattaccatttcgacgttgatgatgttgatactccagtctcccaacctcggagaattgatgggaaggaaacaggtgatcaggttggttcatcatcccataaatctcaagacgcacaagtaggttctctagtcaacctgctgagaaatgccagcccgctgcgaaatcctagcaattcatcacagatatcaagggccgagtccagcgaagtagcctcagcaagctcggtcacgtcccgcaggacatctgacgcccttgaggagctccagtccttcaaggagataagggagcgactgctgttccggagcagcgcaaaacatcaagagccaccaggaaaaccataaggccattctttgttttgtttctcttaacgtgatcgctgatagactcccaaccgggaaaccatatgcacagcgaactatagttgctgtgttcatgtatatacgagtgctaaagttgatgcttttgattgaagagaaggcaccggcttccatttatttcagcggaacaatcactcgtcgttctcaagagtgatggagtgatgccgctgttgatactcttttgtatatgggaagcgaaaccgatacacgtaggtgggagcgagggagcctgtgaattgtgatggatgaaagcaggtctcattgtgtgcgtgtgtttgtaaattatgtaactgctggaaatcaaatgttcattagacgtcaacctttgaagagttgctcgcacttcgcaagactagttttatttgctcttgctatttgatctggtaatttgtggattggcgacctgcaggctgcagttgtaaaaataactgtcagttttaa

SEQ ID NO: 24690 - DNA, 3800 bp, Zea Mays
aaccctcttcgtcgatcggtgtccctagcctccccctgcccggctgtcctcctcgatttcgcaagctcctggttacggcggcatctatcgttccgccgcaagggccgcatcgtctctctcgcgacgctgccccagaccgccgagataatggctggccaccgaaacagtcatggaaagcgccagtctgattttactgaaaatggaggcagtaagagaagaaatcctggcgatgatacatatgcacctggtcctgatgacactgtgtatcgctacctctgtgcctctagaaaaattgggagtatcattggcaggggtggagaaattgcaaagcagttgaggactgagacccaagctaagatcaggattggcgagagtgtccctggatgtgatgagcgagttgttaccatatttagcacaagcaggaaaactaataccatcgatggtgctgaagatgaggtttgccctgctcaggatgccctctttagagttcatgagaggcttgccagtgatgagggtcttgggaacgaagacagcgaagaaatttcacctcaagttactgttcgcttgcttgtgccatcagaccagattggatgcattattggaaaaggtgggcagatcatccaaggaatccgcagtgagactggtgcacaaatacgtgtccttagtaatgatcatatccccgcatgtgccattagtggagacgaacttctccagatatctggggacacggtagttgtcagaaaggctcttcatcaagtgtcatctcgcctccataacaacccatccaagtcacagcatcttcttgcatccagcttgacccaaccttatccagggagcacccaccttggtggttcctctactgcacctgttgtagggatcactccagtaattcctccttatggtggctacaaaggtgatgtagcaggagattggccctctttataccaaccacgaagggatgagagctctgcaaaggagtttagcttgcgtttactttgtgctgctgcaaatgtggggggtgtaattgggaagggtggtggaattatcaaacagattaggcaggagtctggggctttaatcaaagtggctagctccaattcagaccctgatgatgactgcataattacagtttctgcgaaagagttctttgaagatcctgtatctccaacaattgatgctgcagttcgtttgcagcctagatgcagcgagaaaagtgatttagaatcagctgagcagtcatacacaacacgcttgctggtgtcaacatcacgtattgggtgcctaattggcaaaggtggttcaatcattactgagatacggagaacatccagagcaaatatcactggaggccttgatgttgcaagaaatgctcttgtgcaaatagctacaaggctgaaagccaatttctttgaaagagagggctctttatctgcatttccacctgttatcccttaccatcctttgcctgctggtgtttcggatgaaccaaaatatctaggcagagacaccaagcctgttgggcactatctatattcaagtggttttcgtacatcggatgacacgattccttctgacagctatgcaagttatggcggctcccaggcacctggaagaggatatggggcttacagcgggtacagtgctcgctcctctaatagtgggttatctggtcatagttctcttcactatggaaagcgtcatggttattaggatttagattgcttgataaagcaggtattgttcttcaaccttttcttgatatgttagaatgattatgtgattgtgcatttgcctaccttaatgttcttttttttgccttttgaacacattgaacccagctcagctatctgatggacctgttattttcacctttgccacccctgctcccctcacgtactataaaaacagccaagacattgaagtttggagcctgcttattggagtcccttcccaaaccagatgaccaagagagcccaacctggaagctttgcttaagaggacccgtgtggatgccatagaccaccttatattcctcactacattactttgtcttcctgtgggcctatgtttttagccctgccgcaaatgttctgaacctatgtattgaaaggtcgcatttgagactgcatgtatttgcttgtttgaaacctgattcagtttagtgattttgttgaaacacttgtttcctatatgccacccaaaaagccaggaatatgttactaaaaaaccctagggagctgttacttgcctttccatggaagatgtgggttactttcttctcagtgatgtgtgactgacatcctaaattaaagtaacaccagaaatggcctttttgcatccgacactagatataccaaacttcgctcctccctgccaacatttcactgaattgcacattttgctttattcatctacccctgccatcgaacacactcagtttcacctgcctgcctcaatcttcagggcctgtttggttttagttcagacagctttgcatggctctccttgcaatccaaggctttagattttctgttcctggggtggcaggctttgaaccaaacaggccccaagagcattgttgaactgacgttagctagctgaacacacatctgtacttgttcgattgcaatgctgttgcaacttgctacacatgggcaagtttatgtttaaacattgaagtcatttttttgaacgagaacattaagccaatttgaagtacgttggtgttttaagtataagctttctaacttaatcggttataaatatatactttggtgtgagtagctaatatccgaaactttgggtagctggaactttttttagtcgtattgatttatcacaatgacccaaaaaatgggttagtcatgatcttactgaactctttaacctgatgcatatgttataatgctttattgactaaatgagtattggtgattgaagtcccgataacgtacttgccaacatgctatgatggggaaactatatgccaacggttgaaccatgtgcatgaggctgcagtacgcaaagttttttttgcaggttcactgttcatttcatgtagatttagcaggttgtaagttccactgggcttgattcaagattgattcttcttcatgcccgtgagtcttgttaactaggaatgtgcaggaacatgcaaagggtaaaccatatgcaggtattgtttatggatgagaatggattagcctacggagttgcacaacattgttaaccttcgaaatgttgttagcggaatggttactattcgttcattgaatcttctgccaatctgttttatgtaaatgctgtatcggattttgatgagcaaattctattgcagtgcctggaacgattgtggttttggcatagtaagtttcataagatttgattctgagatgtcctgaacactattctattgcagtgcctggaacagtgctctctctttctgacctaggacaggtagtgttgctgatccgggtagtgtaccgtagcactgcactgtccgtcatccatctatctatcgagtcaaactgcagctgaacctgacctgaacttgtgcagggttcagggtgctccgatgaaagtatcctgaatctttacaggtttcagggcgctctgatgaaaaatatatgcattatcattaacacatgtgctctcggcatggcatgctgttgcggcgtgctgtttctttcaggattcttttggatcagtttcaagattgtgtctatccttgccatgtggttttggtgttgccggtgtacggtggcggatggctcacctgtattgaatttgcaggatatgtc

SEQ ID NO: 24691 - DNA, 3073 bp, Zea Mays
ggccacccctcctaagccaactgtttgaatgtaattcgtagagacaaaaacacaagcacgcaccaatcaccaccagcagcgctgcagcgaccacccgcggctgggtgcgcgcgttcgttgtcccttccacatccaccggaaagctacgcctcctcctcctcctccaccacctcgtctcctctccactctcaatcgctctctctctctccgtgggcgatgcgctcagcctgctcaggtcagcgttgatctatcggagggaggactgcctgcgctcgccggccacccatggctatggcggcagcggcggcggcggctaccaagaggtgcatgaacccggcatgcggcgcgccggcgtcggtgctgggggcgggaggggactggaggaagggctggccgctgcggtccggatgcttcgccctactctgcgacaagtgcgggcttctggtcaagtggttccaaagctttttccatctccaatcaatctacgttttttcggtatagaggctggacaaagcagtaacatcttgagacaaaaagagatagagaatggttcaaggcagattaaatgggaacaaccaacccttagttttggggacatgggaaggcctttcctaactaggtctcaaagtgcattagagtcacctcaatgtactcgaagagatgacaataaggatccaactacagatagcacaagtgagtcattttcagaagcatgtctgagcatgagcctaggtattgcaaacaatgtaaacaggatggaggctacttcaacagcggaaaggcctgtgctattgtcaacaacagccattgctgaaggaagagaacttgccactacactatctccctttcaacacgcacaaagggcacggcatttcctgaccagacctccaaggattggtgaaggtgctgcttttgatccaacaagagacatgtttccacatcttcgtgttgctagaccacctgctgatggaaggggacgcaatcaattacttcctcgttattggccaagaataacagaccaagagctgcaacagatatctggagattcaaattccacgattgttccattgtttgagaaggtcctgagtgcgagtgatgcaggccgcatagggcgccttgttcttccaaaagcttgtgctgaggcatatttccccccaatttcccaaccggaaggtcgccccttgacaattcaagatgcaagaggaaaagaatggcattttcagtttaggttttggccaaataataacagcagaatgtatgtcttggagggtgttacaccatgcatacagtctttgcaattacaagctggcgatacagtgacctttagtcgtatagatcctggagggaaacttgttatgggctttcggaaggccacaaatactgtcagtctgccagactcacagatctcagctattgcaaatggttcccttctcagtgagacactcttttctactgcaaatgagaacataggtgtcgtaagtggttatcctggatttcttcactcaataaagggagccgcagatctccatccaaactctctatatgatcatcatatgaacttagttgatggggatgtcagttggaataaggcagataaatttggcagcaggccagatgagggatccttgcaatttttacaaaaacgtagtcacaatattggttccaaaagcaggaggttcttaatcgatgctgaagatgccatggaactaaagcttacctgggaagaggctcaagagttgttgcgccctgctcccactgcaaaaccaactgttgtgatgattgaggactatgaatttgaagaatatgatgaaccccctgtctttgcaaagagatcaattttcaccatccgtgcaacaggggaacaagatcagtggattcaatgtgacgactgctcaaaatggcgccggttgcctcttaatgttattgttgcgcccaaatggacatgcaccgacaactcatgggactcaaaatgctgctcctgctctgcgcctgaagagttgaccccaagagagttgcaaagtgttctgcagcagtatgaagaataattgcaaacagacaatctgcagcacggtcaaaggaaagaaaatctagatatataacagaactggagcggaaggttcaaactcttcagacagaggctactactctttcagcgcagctcacactattccagagagacacaactggactttcggcagaaaatgctgagctgaagataaggttgcaggccatggagcagcaggctcaactgcgggatgctctaaacgatgcgctgaagcaagaagtggagaggctcaagatagcgacgggcgagatgccgaagtccaacgaacaattcaacatggggatgcagcacgtctcgtacagcggcccttctttcttccatctcccggagcagcacgtagacattcagctgccgcaccatttccagcagcctccgcggaacgtccagatgctgtcccaccccaactccctctcggatatggcgcagcaagactcgcttgggcggctccgggggctggacattggaaaagggtccatggctatgaagccagaggcagaggtcgtggtgaagtcagagggcagctctgtatctgcaggtgaaagcaacaccaccttctagctatacaatacatctgccttccaagaagcctccgtttggtttagagttcttttgttcatagtctgacatcctccttccttgagctgcttcgtccttctcagtaggcctattttttttattccattggttatatctactagttaacattggtcggttgccaatcgttgttgtcgtggtggctgatttctatagggacattgatgtgttggtttcgagtttgttgttgttgttgtgtgtgtggttggttgtttcgagctaggggctgaaagggcaccgagtgtttttttctccacctgttttagttttgttatagatttgacaacaatcgttatgatttctccttctggaaaggtgtacattgtgttgctatgctaatttgtagtgatatttttgatgattccaactgtaccctgctgtgcctgtgcgcgaagctgttgtttcagctgtgta

SEQ ID NO: 24692 - DNA, 1160 bp, Zea Mays
gacaattacaaatctaaaagatatgcccagatacaatctctaacacttaatgcaagtaaatttactgtttaacacctttaaatttattccttagaagcatgtcatgttcagcatgttaaacaagacccagatttttgctaaattcatgtggtcccgtctccttttggatgctgctcctcattttttaaaactttgatttacaagattgtgctgttgaggccatggttcaagacttcatcttttaaaaaaatgcaatctctcttacatattcttgatttgtttgcagttcaactatccatatatctaggaacaggtcaaaagggcacaccatgaaaatttgatctgtttccactctccagatcatgggaataaattttgcttgcaaattatatgttatagtagttttgttttcacagtttgtctgaatttactttgctaactgtgtgttgaagattattgctggtctagtggagtatcgactaggagagagcctggtgacatactacaaccaaccccttattgctggtttgttgtcattcgtggctaggacactgaactcatactggggaacacagcaatgggttgatcttgcgcggtacactgggttacagagaagcgaggaaaagcctcctgctgaggccactatgccacctgattcagcacatttggagggttgtacgacggaaggacatgattttgatgacagcagcaataacaccaacaaatcgactggtccgagctagtgatttgattacttcacagtggctgcagatcacatggcctattttcatagacaatgaaagtggctgccttcctgctcttgggatcacaaggaagcggaaatttgaggaaatattagtcacaaaaatttgttcagattctttttcagcgttaccacaagagtgcacatacagttctcgtttctattcgttagagtaagtattgttttgtacaatctacatctgtaagaactgcagcacctaaaggatgttcagcaatgagggctttaacttgtcgcattgcatgctcgtaagcatgtttgttgcggctttaatcaagctgtttgttgcggctttaatcaagccgcgactacggcttctacaatattttgtctctatagattgcagctgcagcagtccgaaagtgtagggcataaaaaa

SEQ ID NO: 24693 - DNA, 192 bp, Zea Mays
acggagccttatttaaaaaaaagctctagcattaatataaactcatacgtaattataaaaatgtccaaggaccaatgaaaaacaatacaaattatacaagagaggtacagccgtacagtagcaggctagcagcttcgaggcaaggacggctttagcgcgcgaagtcgtcgcggtcgcccccagccacacatc

SEQ ID NO: 24694 - DNA, 1279 bp, Zea Mays
tgacaaagatgttcacatctaggaaggaaaatgcaaatctgaactttattgagccattaaagaactcttcttggacacataaaaaacttttcatgtcctgtctctcctgatagatcaacacccaaagagaagccacaaaagagagacaggagtgaaggaaagaagcaaaagggtggctcttcaggagctggatctggttttctcgtgccccttcaactttcggatgatttagtaaaatttatcggcactggtgagagcatgttatcacgatctgatgtcgtgaagaaaatgtgggattacataaaagggaacaacctgcaggcccttttatttcagtcgccttccagaaataggctgtatgcctatccactatggccaatagccagagttctaaattgcagcagcaaccagccaattactgtcagtaactggaaaaattctagggcacttttgacatgttatgttggacttcttgaaaaccgtcgtgaaagaaaataagagaacataatgcagtgagatgtctcctggctcccagcaaaaggatccttctgaccggaggaaaataatctgcgatgagaagctgaaggacctatttggagtggaaacattcaccggctttactgtttcgaagctgcttgcccctcattttaccaagacgaagtagcaacctgccatccacatcttctaaaaccaaaaaggcttgggacataaaattatctgtgcggtgtggcttctagtgcgttcttcccgagttcatggtccaccatttttcatgctcagggttgaggatgacattgctcggtctcctcagatgaccctagtggtcatggaaccgtaaagacaaggggggagcactagcgcttgtcgcctagggtttcagggttctccacttgccagtgaatctttcatcctttttagctcctgatatggatgaagtttgtagcactagcgcaaccgccttttgctgttccttcccactcacttggtaccggttgttcagaggacgccagtttatatttgtatggaccacctaaactgaagctgttttgtcatgtgggtggcatggcgaagtgggtcgatatcgcgacggttctgtaacgcgatcttgcgctgtttccaactgctggtgccatttgcctgtcagttcaaagttaaattgtgttcagattctggttccgagggggtacaggtacgtacacattgcacgagcagaatgtgattcaggggtagggtcggagtccgtttcagcagttgggtcgtcgtgctgcgttggtctcca

SEQ ID NO: 24695 - DNA, 4290 bp, Zea Mays
ggctccccaacccaatcctccagctgcggaatggcggcggcggagccgtgctgcatctcgcacgcgttcgagcgcgccactcgccaggaacccggccgcctcgccgtcatccacgcagcggcctcgggcgccgacagcgaggagcgccgcttcacttgcggcgacctcctcgccgccgtcggctccctctcccgccgcatcgccgccgcgctcggcagcaccgccaccgatacccgccgcgaccgcgagcaaggctcagggtttcgggccgccggcgccgtagtgccgagggttgtcggggtatacgcctcgccatcgttggagtacgtcgccgccgtcctcgcggtgctcaggtgcggcgcggcgttcctcccgctcgacccgtcgtggccggaggagagggtctcgtgggctatctcggcgtccaacgcggcgctcgtcgtgtcttcagttgggtcgcgaggagccacgctgtttgagagcagcgcctgccctgttctgcgcttttatggtggcatccggcggcgatttcgggatggaaatggcggggatgacggggaggagcttgtctggccgtgcgagcacgagtggcaccgcaagttctgctacgtgatgttcacctctggttctaccggaaaaccgaagggtgtttgcggcactgagaaagatgatgttttgttgtttaagacatctgtcagctttgttgaccatctacaggagttcctttctgcggtcttgacttgctcaacacttgtcattcctcccagtgagtggagagctaatccagcatccttggccaacttaattaaggtttatcggatatcaaggatgacattggttccatcacttatggagataatactacctaccctggcggaaaaactttctgatggctgtaacccacttaagatcctaatatttagtggggaagttctgtctgtatcgctgtggaagagagtctatgaatttctgccagaggctactatcataaatctgtatggaacaacagaggtttccggtgactgtgcattctttgattgcaaaaaattgcctacaattttggagcaagaagaactaaacagtgtaccaattgggtttcctatttcaaattgtgaggtttctcttgtcaccaatgatggactatcagatgaaggtgaaatctctgtcagtggagcatgcttgtttactggatatttagctgatcccatgacaagtaactgccctgaaggcagtgaagttttagcatactacagaacaggtgactttgcccggcgcctaaagacaggcgaacttattttccttggaagaaaggaccgaattgttaaaatttatgggcaccgtttctcacttgaggaggtagaatccacattgagggatcatcctgatgtcagtgacgctgctgttacttttcaaagtaatggatctctggattttaaggcatacttggtgctgaggagtaataataaatttcttaaatgtactcagggttatagtggattacattcttcccgagatatcattgcaccacttcgaaactggctcatcatgaagtttccactagctatggtcccaaggctttttatccccatgaaatcattacctttgactttgtcaggaaagattgactatgtcaagttatctagcttggtttgtgcatttgagccttgtgaaattcatccagaaagcagtccagctgatcctcatatgcaagttatcaaaaaggcattttctgatgccctactggttcatgaagtgtctgagtatgatgatttcttctccttgggtggtaactcaattactgcagcacatgtggcccacaaattggagattgacatgagattactttatatttataccaccccttctaaactttttcatggtttacttggggaacacagtcatgtaattcctccaactcctgaatttcacaacagaaagaagttgagaaaatatgcaagcatatcagattcctttggcccagtttctgaatatttggacagtaactttcatgaccaagggcagataagtaaagagggtgcatacgatcactttgcagggaatcattggcagaccatggatactaaattttcacttacaaaaggtgtggtctattggccgttgcaatagatttatgcatggttctgaagggatggtacaccttgaagatatttgttcatatgttccatataacaaaaagggttacctcgtgaaaatttggagcattcttctagattcatgtgttgatgcctcacctttgcttgtcataaacaatggaatgatgtccatctttattggttctcattcatatttgtttctttgcattgatggttatagtggttcagtgaggtggagtgtcaaattggaaggccgtatcgagtgttctgccgctataactggtgatttctcagaggttgttgttggatgctataaagggaaaatttacttccttgatatgtctacgggaaaattatcctggacctttcaaactgatggggaggtaaaaatgcaaccagttgtggacaagatgaggaatttaatatggtgtggctcgtatgaccattacttgtatgcgttaaattacaaagatcgctgctgcacatacaaagttttttgtggtggaagcatttatggatctcctgctattgacatggcacaaaatgtaatctatgtcgcatctacgagtggccttgtgactgcagtatcatttaaggaaccatccttcagagttctttggcaatatgaagctggtgcgccaatttttggttctctcgccatagatcatcaaagtggaacagttatttgttgtttagtgaatggcctagttatgacattgaactcacaaggttctgttgtttggaaggcaactgttggtggtcctatttttgctggtgcatgtttgtcacccaccctccctcatcaggtgcttataccttcccgtgatggcaacttgtactcttttgatactgtgtctggtgcccttctttgggtatacaaggctggggatccaattactgcatccacttttgttgatgagctgttaacatcagtgtcatttggaccatctgagagatttgcttgtatctgcacgagttccgggaaggtccatgtcatcagaattagagtagacatcagaactagagtagatgctaagtacaatcaggagcaaggtggtgacggtgttaaatctgaggagttagttcaaggactggatgctaagtacaatcaggagcaagctggtgaaggtgctaaatctgaggagttagttcaaggactggcatccattgatcttccgggggacatattttcgtctcccttgatggttggtggacgcatctttgttggatgccgagatgatcgattacattgtctcaccgtcaccacatagtttcaagtgattttgctggaggtgatatagttttgcccatgcctgctgcccgacaacctctcttccgcgacaagggcctttggcctttcctattggtaaggtgcgtggcaggctggcagcacaacacaggccacgaatgagtttggttgaagctcctgattgcatttggtgatttgggtctccaatgattgctttccatgtctacacaagaagctttccacagcctgctctcgcctaagcaagtgctacttgatgtcttgatcaaagtgagtggaaacctctcaacctcacattctccttgcagcatctgtattcagcccatgtggaacctttgccactgtcctgcaaggctggtcagtcatgccgctgttcccttcagtggaaattaactgataggaagaccagtgatttgcggagactgtaaaaattgttccacatagatctatactatttcctaaaaggagtttatgacagggacaatattctccaagaaatggttcgagtcgatccagcttcctgcaccagaaatgtactagtctctaggagtagaagttttttctttgcattaggtttcatgtttttttacttaccttgcatgcttccagaactctcgctgggaatgcacacatttttcatttcctttggctattagtagggatgccaatggagaattccccgtcgggttttggctccactatagaaaacgatccccgcggggatccctacgaactcttcctaattccccgttctctcgcggggataaattcccgtcggggatctctgtccccgtttaaattataatcatgatatacttttttttgttatgaatacaaaatattgtcacttgtatatattgtcagatgttagaaatcattatgtatacatcaaaataaatatatttgtat

SEQ ID NO: 24696 - DNA, 4430 bp, Zea Mays
gtgatttttaggtaacccatgcccgcgtccgagaccgagagacaaggccaaaatcatcgctgcgccgccagtggacgcgttcgactccggccgccgcccctgctcctcctgcccacccgcaccggccattgccctcgcctgctctgccacccgcaccttccaccgcccccgcgtgctcctccgcaggtctggccgttgcacccacctgctccccaccaccgccgccccacccacttatccaccgttgccggtcgtcgccccacctgctcccccactgacaccggtcgagtttctagaaccttccagacctccagttcccgacctcggcgccatggacctggacccagaggggatcttccgcgacgacagcgatgaagacgaagacagtgtccaggagagggaggcgaacaaggagatggttgtctaccttgtcgacgcctcgcccaaaatgttcacccctgccaccacccaggacaatgaaaagcaggagacacatttccataccattgttaactgcatcacagagtctctgaagacacaaattattggtagatcttatgatgaagtcgcaatatgtttctttaacactaaagagaagaagaatttacaggactcagccggtgtttatgtttataatgtcggagacagagagcaacttgatagacctactgcaaaactcatcaaggatttttctttgatagaagattcttttatgagcaccattggaagtcgatatggaataacagctggatctcgggagaataccctgtataatgctctttgggttgctcaggcgctgttgcgcaagggatctgtgaagaccgtgagtaaacgaattcttatattcaccaatgaagatgatccttttggtactattacaggagcagtgaaaactgatatgattaggacaacacttcaacgtgcaaaggatgcacaagatcttggcctgtctattgaacttcttccactgagcccgcctgatgaccagttcaacatgtccctgttttatgcagatttgattggtctggatggagatgagatgaccgaatatttgccatctgctggtgataagctagaggatatgactaatcaactgagaaaacggataatgaagaagcgcagaatcaaaactctttcatttgcgattaccaatgatgtgtgcatagaagtcaatacatatgcgctggtccgtcctactactacagggacaatcacatggcttgattcactaagtaacctcccattaaaggttgagaggtctttcatatgcaatgatactggggctctacttcaggatgcacagacacgtttccagatgtacaatgacacaattgtcaaattttctgtacgtgaactctctgaggttaaaagggttgcaagccatcatcttcgccttataggtttcaagccattggattgcttgaaagattaccataacttaagaccatcgacatttatttatccgagtgatgagcgtatatttggaagcacctgtgttttcgttgctttacatagctcaatgttacgtcttggaaggtttgcacttgcattttatgggaatccaactcgaccacaactcatagcccttgttgctcaagaagaggttacttcgtctggtcgtcagtttgaaccgcctggcatgcacatgatctatcttccatactccgatgatattagatatcctgaagaagttcatgtgacttctgatgatgcaccgcgtgcaacagatgaacaaatcaagaaagcttcgaacatattcaaacgtattgatctgataaatttctctgcatgccaatttgctaacccagctttgcaaagacactatgggatcttggaggccttagctttaggcgaagatgagatgcctgatataaaggatgagaccctgcctgacgaagaaggcttgtctaagccaggggtagccaatgctattgaggaattcaagacttcagtctatggtgaaaattatgaccaagaggaggcagaagcggcagcagggaaagcttcccgtggtaatgcttcaaaaaagcggaaggaggtcactgatgcagctgcgcagataagtgctgcttatgattgggcagaacttgcagacaatggaaaactgaaggaaatgaccacggtggaattgagatcctacctgaccgcgcatgatctcccggtttctggtaagaaagatgtacttatcagcaggatcttgactcacctgggttttatgctcagggtactgttgcatgctgcgaaatggctttggcttcaaatgagcttggagacaggagaagctgatgaagtcatgtgttgggcaatccttgtcatctatagggtgacttcctgggctttaggtactcgctttcgcttccaaccagcgcgtcctcagccagcgctggaggccgcccagccgcgcctgcgaccgcagaccgcgcgtcctcactcagccagcgctggagatctcctgtccgcccagccgcgcctgcgacagtgcgaccgccctcctgcccccaggtacgcagccggcccctctcctccctcctccctcttccctccgccagtccgcccacaggctagtgcgccgccgtgccacaggccactgcccagtgcccactgcgccgcgctgcacggccaagctccagtgcccacttgctgccgctgcatccacttgcccggccaagctccagtgcgccgccgcatccacttgttgccgctgccctcaacggcccagatccatccgctgcccttgctgcccctcacagtgaatcacctctgcggctgggagtgaggggtcccagccacttcccactgggccgcagaccgtcggcctctgcgctgcgtctcacgtctgtggccactccacaagaccagcagccaagccaaattctatgtcaagtctgaaaagacgttcaacgttcgtttaaacgtttaaatgttaaaaagttagttcataacgttttaacgttttaccgcttccggggaggaaagcactgcaagatgatactgctccagtccccatcgaggttcctgctccagatcctgcaagaccgtgttctcagtggcgagaagggcatggacattgactgtcacacggtagagttcgatgatgtccggtatcatatccagttttctatgaggaatccaaaggtaatggtgttgtcagttgctttgcctctgccacctcctgaagcgattctgtatgatgggctaccactaggtgccattgaagctataaaagcagcatatgggccagttgtgcagattcttgatcctccaaaggacgggtttgatctcacaatgaagataaatttgacaaaacttccgctagatgaagagcaaaggaatactatcttgacacaaattgcatctattagagaggttgtgttgggtgcaccactgaagctcctgctgaaacatttagcctcaaagacagttgcacctaatgttaacaaccttgttgctcttgttcaccgccctaatgaatcatttttccttgctccccaggcagataaagttactattgtgtatccaatgagattccaggactccattgatattgttttagcaacttccttcctgcaggaatttgtggaggcaagacgaacagctgcacttaataatgttccttcttgtatgtggtctccggtaccacctcttgagttaaaaggagtatctgctgatgcactaaatgcaaatgctggctttgttactttcgttgtttaccctcggcatgttgagggtaaaaagctagatagaacagtttggaatttgttgacatttcatgcttatgtaagctatcatgtaaagtgttctgaaggattcatgcataccaggatgaggcgcagggttgagtcgctgatccaggcgttggaccgggcgaagtctgatgctgagaagttgaagaagttggtacacggtggatctttcaaaagactgagcctgaagaacgagggggactcgcgtttctgaagggaattggcaaatgttgttgttttccatttggctaatgacttctgttgtgggaagcttacttccgttcagttttgggagcgaaggctcggaaccggttaaatccatgccattgaattttaatgtaaattcgcgttgcttttacatatttactagcctgaaatctctcggcgtatcagttccatgacacatcgcctttgcaaccggagagcctgctgcctgcatcttggtgcaagtagtttgtttttgccatgagatgtctgagtctgatcttttttggcattaataaatgtgttgttcttggatcacatgatgtagtagggagttgaggcttggttgaatcacatgaccactcacggtcacggtacagcatcggctgagttatgtcgagcagccgcattcatttttttataagcttgatggtgtattgttttataagcttcggctgagttacgctcgaaccacggtcctcc

SEQ ID NO: 24697 - DNA, 431 bp, Zea Mays
agtgctcacacacttctccctttccgccgccgccaccgaggaagacaccaggtcaccagccataggcccatagcaaaccaagcgcgaggaggaacaggcgtagctccgtagccatagatggctaacaagcgtcagcgggatgcgcggaagcgcttccgggaggcgaacccagacctattccctccgcaaaccgccccttctgccgacggaaccaagaacaagagcaagaagaagaagaataagagcatgttcaagaaggccaataagggcggcacgggaaggtttaagcacccgctacgggttcccgggatgcggcccggggaacgctgcttcatctgcaagtccaccgaccacgtcgccaaggcttgccccgagaaggccctctgggacaagaaaaagggtggagccaattgctaaagattccatggacg

SEQ ID NO: 24698 - DNA, 2474 bp, Zea Mays
ctctcacctaaccaatcctgaaaaaaacttgaatcagcacgcggactatccgcgccactgaccgtgcgcgaggaccttgtgtgttcaacagttaacaccctgcactctgcaaatttccatttccacgcgacgacgacgaagaggaggtgggattcggaggagtaaatcctaacagccgtctcgcgccggtggtccggtgcccgcgcgagatcggggggggggggggggggggggggggggcgacatctagggcgcggtgccggccatggcgagctctggactcgcctaccccgaccgcttctacgccgccgcagcctacgcggggttcggcgctggtggggccacctcctcctctacggcctgcacagcaggccacagttggtccgtgcaatgtgcccaagccaagggcgtggaaccccgtggagcagagcaaatgggccagttggcacggacttggaagcatgccatcggctgaggcgatgcgtctttttgtcaaaatcttggaggaggaagatcctggatggtactcaagggttcctgagttcaactctgagcccattgtagatattcaaatgcataaaccaaaagaagagccacagattgtaccggcttcaacgaatggaacatcaatttcagaaccaaaaatcatttctgaaaatggaagttctgtggaaacacaggacatagatgttattttggaaggccttagtactgttagttctcttgacgaatggacaccattagctatcagtggccatcgtccgaagcctcgttatgagcatggagcaactgtgttgcaggataagatgtatatatttggcggaaaccataacgggtgttaccttagtgacctccaggctttggatctgaagaatttgacttggtcaaagattgatgccaaattggaagcagaatcttctgattcagcaaaaacctcacaaattgctccttgtgctggccattcattggtacgcttctgcacaactagttgagcacttgaactgttgcaaagtcagatatctgtaaaactgtagctaatggtggttgcctcttgttctgtaccattttgtggataacatggggcaacaagtttttctccattgctgggcataccaaagatccatctgaaggtgttacagttaaggaatttgatccgcatacttgtacctggtctattgtcaggacttatggaaaatcaccggtttctcgcggaggtcagacagtgactcttgttggaacaacactagttttgttcggtggtgaagatgcaaaacggtgcctcttgaatgacttgcacattcttgatcttgaaaccatgacatgggatgatgtggatgcaatatggagtggtcaagacccaaacaacaaggcctgacgccaagcccaagagctggccatgctggtgcaactgtcggggagaactggtacatagttgggggtggcaataataaaagtggtgtctctgatactcttgttcttaacatgtcaactctgacatggtcagtggttagcactgcggaaggacgagttccccttgccagtgagggcatgactctagtgcatagcaattacaatggatacgattatctcatctcatttggaggatacaatggacgatacagcaatgaggtttatacacttagcctcaaatcagattttaagtccaccacaaaagaagaaactgtctcagatctagggtcgtcgaaccagaggttgaaatggtgattggcgtggacagtgctgattcagacctgaagaacagtagtacagtactgatgaagcaagtgaacagttcttagcagctctcaaagctgagaaagaggaactagaagcgacacttaacagggaacagctgcaaactgtacaacttaaagaatacattgctcaagcagaatccagaaatgtggaactcacaaaggaacttcaagccgtccgtggccaacttgctgctgagcagtcaagatgtttcaaacttgaggtcgatgttgcggaactacgacagaagcttcaaagtatggatgcattggaaaaggaggtcgagctgcttcgacgacacagagccgcgtcagagcaagcagcgctggacgcaaagcagcggcaaagttctgggggcatgtggagctggctcgttggtacccctcctgatgataaatctgaatcgtgatcgcgtcgtgagggcagcactttagttcatacaggccgtgattcatatattatacttgtaacatttatatacccgttgatattttttttacagttactgaattcgtgttcattttgaccacagaagataaggaaatcattagttttatgccttgttttggcgtattgcaatcactcaaatgtatcaggaagtttcaacattatttcttgaaaagctagatttcaacattgtcatcatgtattggtcctccttttgacgacatggttcaatatatgttattcgtttgagactcttgttttttaaaaaacca

SEQ ID NO: 24699 - DNA, 689 bp, Zea Mays
acataatctatttaaagatagtggacatcttcagtagcagctgccgtggccaccataagaatcctccttcagagccatatgtccttgaggttggggttttgcaagattatgttggaagtggaggctgtgtgcaaggcgtgacagcgtgtcgtggtcaaggaccctaagctctagcgccaaattcatatcacatttgttctagaatgagatcatgaatggtccctggggttggcctggttcacgctccattctcagtgcgttttccgacatcgttcttcaagcaagcatgcgagctggctcctattttcactgagcttgtggattgtgtgagcttagatggggagtccttgcaagctgctttgtctagaacaaagcaggttcatgaatttaccgcaaggctgctagatattcatgataagatgatgttgataaataataaagaggacctacctaagttagcccagcaaagcacaagcccctatccgcacgacattgcccctacctttcgccgcccagatgctagacacagcgcccagtgcccagccgccatggccaggtccccaatgctcagtgctaggacgcctgccttgacttcatggaatattatagctatgttccctccaacactggaaaatgagccgctaatgtggaaaactaggagttagattgaccgattggttgggagtttg

SEQ ID NO: 24700 - DNA, 612 bp, Zea Mays
ataataacttcagatgcataacttaacgaaaatgcaagcactgctacaggggcctgaaatttccaagtttaagaccacatcaggttgactccatgtatgttgacattttcacaggtgattgaagttgaaattgtttgactccttgggaaatgagaattgcgttctttttggaagtactagggagtacataccaaaattttgggcatgttcagctattggctgcggcagcagctgtacagccattcagcaactgtagcacatgcagcatccaatcagcagctggcacctcagcaaacagccgcttatacgcacagggaacaggcctttactgcagaagtcgcatttgtgcaggagtcatcaggttatgaaatgtaatgactatgtgtttttgtttctaataaataacgacgcaactgtaactaccaaaaaaaaagttctgttaaagaatgcagtaaccagcacataccctcctcttgttcagtaaatatcagccaaagtgccaaatccaaactaaagttatcaagacatctggctgtggctgcctgaaaaactacttggtgcttttcgacccagatgctagctccacagtcaaaaggctttggtgtatcctaa

SEQ ID NO: 24701 - DNA, 1308 bp, Zea Mays
gtcgtatccggattccggtccctcccaagtcccaactgttcacctcccgccgccccctcgcgccgtcaaggcctccggaaccggtcgcaagcggcgtaggacccccgccgctacagagccctcgtccgtcgcacttcgccgccgcgtcggagtcatccagctcgtcgacgcctggcggggagatccccagtgcgaggggaacctccacgacgcgagtacttctctacttcctgtcacaaaaaaaagatttgcaatctagcatatttatggaagcctttgctctggataaaatttgcgggtcagggagatcagcggtcaccacccaagaaagagtgatggaagcccaaagtagtacttgcttttcaaaagtcgtgggacctaacttatggtatggcgatcgcacaagacttacgcccaagcaagaagaagctgcgcttggtttgtcacgtgcctgtggctctggcattccagcatacatttgcaccatgaagaagtctaatgttgtcaagagacagatggtattttcaagacagttcagtaagcgacacatattcggtcgtctgggcacttatgggtgtgaaaccagagtttttgcaggcagggacctggtcggcagtaagctcaacttctcaatgatccatggagaactaaggcttcttggtggatggcccctctttgtgaagagccaccgtatcgaagcaggacacgtgtgtgctttcatgttccaggaagaggaagaggaagagggcgaactgtcacttagggtgcacgtgctgggtactatgccagtgccaacaatctagcctttgcttgtttcgttgatgaggcacgggatgaacgtcgctaacgaattatgcatcagacattagtattggaaacagcagcatgtggctatcttgctctggaattagttgttgttgttctatctagataactatgtatggacatattgttcttttgtgttggagagagtaagcgttagtgttttaagacacaaagattgttatttttagactgaccgctccagttgtgcaaataggaactgaattagtggcattgttagcatgtacatgaaaacgtgatttgtgcagtgctgggattagcttgggaatgtcgtccaaggatggccttatattgtttcctcgcaatttgtggttggatttttctatcccatctttaaagtacatttggaatgtttctaattcttcttggaagatgtttgagaagtgtaagatacagctatgtacgactatgattcctttcattgttttcatcaagttggtgtgaaattacccacctttgccatcg

SEQ ID NO: 24702 - DNA, 1591 bp, Zea Mays
agatacggaggggcaaggtacgtggtgccttaccttggctaaggcactgaatctggatccctcctccacctccacgcgagcggacgacacgaagcggccatagccgcacgttgggatcccctccgctacgcctctcgatggtctccgccagcgcgccgccgccgcaggcccagtccgacgcggccgggtcgggggaggaagtgagcaagaaggtgcggaagccgtacacaatcaccaagtcccgggagagctggacggagcaggagcacgacaagttcctcgaggccctgcagctctttgatcgtgactggaagaagatagaggcttttgttggctccaagactgtcatccagattaggagccatgcacagaagtaccttttgaaggttcagaaaaatggaaccagcgaacatgtcccacctccacgaccaaagcgaaaagctgcccatccatatcctcagaaggcttccaagaatgattcatcttccatccataggaactctggcatgaacgtgcctgtttcttcatgggctcatagttccatcccacaagctgttgcttcatcaatggtgaaagaagatttaggtgctggaacaccaggttcaaacaatttttgctcaagtagtactgaaggccttccaagaacttggcaacctggtgaaacaaatgatccaataaatcaaattccgtcactccgccttatgccagattttgcgggagtgtacagcttcttaggtagtgttttcgatccaagtacaagtggtcatctgcagaaacttaaggagatgaatccaattgacgttgagacggcactgttgttgatgaggaatctctccatcaatttaaccagtcctgattttgaagatcaagtcttgccaattcgtgatgccagtactcagcagagcaggcctgaagtccgaaccactatcttatagcatagactcttatctcctgacacccacaaagggatgaaagtgaggaagttgttgtccttatacagcgcttctgatggacctgggctagggagctcaagaagttcagctctagcgacgagcgcgcctttcatgtaaggaagcgtgcacccttcctggcctttcctatccccaaaagctcggccatctaggctcgtgaaatgctgcttcagatcaaggctgtccttggaaatgggaagatgaaaggagaatctgggtaatgccggttgctccctttcccattctttgttgagttcagctttctgattggtttctggtggccctcttgatacggaacttgtgcgctccgtctgagaaagcatgtgtgcaaagtttcatttgaggagttgaggcgatcatggcgctgtaaaatgcggcttatcttcccccttcagggctggtttggtggaccaaccctcaaacatttgcaattcctatgtacgtctgtagtgcatcaggtgttgttgcccacgtgtaaaaggaaaataaattcacaatgtaaaggagacttgtgcgttagcactaccatttgaatttatgaaatgtcaaagcagcccagcgagtttgtacttgccacatttttttgtcgctgtatcagcagtctggctactctggcatcg

SEQ ID NO: 24703 - DNA, 2292 bp, Zea Mays
tccgcggcgctgcgtcgccagctcgcagcgtttggataagataagacctgagaaggagcttgaacgagccaaatcagaaatcttacgatgcaaattgagaatacgggaagtcttccaaaatattgattctcttctatccaaggggaaaattgacgaatctttatttgattctgaaggagaaatatcttgtgaagatatcttttgtgctacttgtggttcgaaaaatgctacattgggtaatgatatcattctctgtgatggagcttgtgacagagggttccaccagaactgtctaaatcctcctctgcgtactgaagatattcccatgggagatgaaggatggctctgcccagcatgtgattgcaagttagactgtatagatctaataaatgaactccagggcagtgacatctccattgaggacccttgggagaaagtttttccagaggcagctgctatggccaatagctctaagcaagatgaagcatttgatcttccatctgatgattcggatgacaatgattttgaccccaatatgcctgaagagcatgtggctagtaaggaagaaggatcttctgaagaggaagaggatgatgacggaggatcagactctgacgactctgacttcttaacctgttctgatgatttggaacctttgatagataaaaagaatgttgatgacctgggattaccttctgaagattcagaggatgatgactatgatccagcaggtcctgattcggataaagatgtcgaaaagaagtcaaattctgatgagtctgatttcatgtctgactcggatgatttttgtaaggagattaaaaaatctggtggacatgatgaagtttcatcgcctccattacccgatgtcaaggtgggtgatatggaaaagaacactgctcagtctaacacaacaagttctgctgacgaccctatggagactgaaatagaccagagtgtggttttaccagtatcaaggaggcgtcaagctgaacggttggactacaaaaggctgtatgatgaggcatatggtgaagcatcatctgattctagtgatgaagaagaatggtctgggaagaacacaccaataaaaagcaatgaagagggtgaagttggttctcctgcaggaaaaggctctagagttgcgcaccataatgaactgactacacaaaacactaaagaaagcttgcattctcttcatggttcagtagatgagaaacatggagatcttacttctaatggcagcaatatcaaagataggaaaggacattttggtccagtgattagtcagaagctacatgaacattttaagacacaaccataccctagtcgttctcttaaagaaagcttggcagaagaactagggctaacatttcatcaggtcaacagatggtttgaaaataggcgtcattttgcaaggttagcttcttccaggaaaggcatcagtccagataagcatagcccccaaaatactaatagcccagtgacacctagtatgcaacctaaagaaccagaggggactgtgatggaagaatctaatgtatgcataaacagggatgctaccatctctaaaaaagcggtttcttcaaaagtcggatcaagaaagaaccttagcaagagttcccctaaaagccgggtcagaagttgattctgccgcggatcagaatctgtggcctgaccttacagagaaggcagggcaggcaaaaagcaatacagcaggagttgaagaagaaaatgggacgatgaagtttgtagacaaagacatgagccagaatttggactgctcctgaaatttgcaggtctatgggccttgaaacttggcttgtatgactctacactggtagccaaaaaacatagatataccattgcaagtcagctagctctcattagatcatgccaatcaactaacaagcacgtcattcagtttttttcttctttttttttcctgtgggggctattgattcccgttctttgccaactgagggcttcctctgatttctgggtcgctctataggtattagctatcctacagatttgtttgcagcaattactgtcattgcaggaagagctcaattacaaaaccctaaggttcagtaacgacagcacgatgctgctatgacaggatgcagaagatgcattgttttcatcgatgttgattttcttgtaagatggaatgttgtaccaaacctgaacagatcactttgttgtgattcagtgtgcggctatggcctatggatttgtacttgttggactcacagagcatcgcgctttacatgcaaacggattttcggt

SEQ ID NO: 24704 - DNA, 1270 bp, Zea Mays
gtcttctggtatgaaaacccatcttggagaccagattctgaatcatgggaacaaatgcttattctggttcgagaagcggtatgaatgtgaggagaggattagattctgtttcatcagacaataggatggcaagaaatgaacggagtaatgatcaagcgggtcctcggagaggttgggacaaagggcagggaccctttaggttcggtgagggtccttctgcccgaagtgcatggcgagcatcaaaagatgaagcaacactggaggctattagagtggctggtgaagataatggaaattcgagggccgctgcaagagttgctattcctgaactggatggagaagctttgaatgatggcaaccaaggggacgaaagaggcccactttgggaggcctggactcgtgcgatggatgctgttcatcttgatgatatggactctgcttatgctgaggttctttcaactggtgatgctgaattacttgtaaagttgatggaacaaacgggaccgattattgatcaactttcaaatgaggttgcaaatgaagtcctacatgcagtgggacagtttctcgtggaagaaagcttctatgatgtagcattaaactggcttcagcagaatcctggcttttcatttggtctagaatgatggtccatcagttttactggattgctcaaggttgaagggggaaactgtagtgaattgactgacctggtaatggaaaacggctctggttatctcggaatacctctggatgcaaagcgggacctcttactgggacttcatgaggctaccgtgattgagctttctgatgattgggagggagcaacacccgtacagataatgaagcagctagcttcatcctggcgcatcgacctgcagcaacttatcaattagggttacattgattgtcgatatatgggttaatttgaatatttgaattgttcgtttccctctggttcttgtctggtctttagctattagtattaggaatattatattgggtggggtggaagtggcactgtgttgaaatggattggttgtattggaaaatatggtattgatgttgtctcaccttcattgaggctagggagcaacgaagaaaaattctaggttgggttttagatctccatcctcgtcctggtcctggtgacggaaaaagtttcctgcggggatcccataaactcttgcccgtatttctttcccatttccgctccacgcggggataaatatctgtcgggatcctggtctccgcttaaattataatcgtgaca

SEQ ID NO: 24705 - DNA, 270 bp, Zea Mays
gccgtagttctcagacgagtcgatataggcgcgggtcttagccctgcatccgggctataagaagaagtcatccgccgcaaaccccctggccatccaagtcacaagcttcatcggcgtcgtctcaattgctcatcggtcttcgtcctgctccaccatgccgcgcatctccgtggtcagaccctccacagcttgatagccgatgaacaagtgatcgaggacccaggtgttcagaaagtggaaattgctgagcaggagcccgttgaaggcaag

SEQ ID NO: 24706 - DNA, 490 bp, Zea Mays
tatctatagtcatgagacgaatgattacagggacctaattcaattcttttgaattgagaaacaatctaacacaatatagacaaacatcaggggctagctagaaaaaatccacttcttctaccttccctcctctatttcttgcacgcaggggctggcgacgagcgaggttccgaccgattgtggacgaggtgagtaaaggatgtggacggtggagcttcgagctccggtcgacggcatggacggtggacagaggtgttccggtggtgacgaacgtcggagacgacgagacaatgtcggtcgacggcgacgtacgacgacaaggagagaggagaggcgtgggcgagctcggcagccgggggaaatggtccatgagcttggcgtcgagcttttatagagggagaagagagagagagagagcaccgggagagggagtaatggccgtcagcagccattaacgacatcaatggtgcggcttcaatggggagcgaga

SEQ ID NO: 24707 - DNA, 450 bp, Zea Mays
gcccaatgactcgcccttggcttctccatgtacctgctcactatccccacagaatatgcaagatctggtcttgtgttcaccaagtatctcaaactcccaatcacactcctgtactttgttgcatcaaccagagaagacttatctaccttgctcagctttaacttgttttccattggaacatagcagggattgcacccactcattccagcctgttctagaatttttttgcataggaactctgacacaaagttgtctctctctctttctgatctacttgtattcccaagtaatatgtgagcagcccaaggtcactcatactaaagcttttcatcatttgtcgcttgaatacagcaatgctgtcctggctcggccctgtaatgattaatcatccacatatactcccactataagaaaatttccattatatctgaacgtctgtacactgcatgc

SEQ ID NO: 24708 - DNA, 961 bp, Zea Mays
caactcatggatgaggatttatacaaatataaatgatccggtgggctacataggttatagggttgttatatattgtcgtaccaataccagttcaatttgtcaagcaatcggttgctttgatgtgtgatagtaattgtaaagcaagagcgctacaacaagctgcccaagtgacagggacaatcgcagcaggtcagcaccagaatatctgaatgtgctgcgcccatgctgagttcctgaaaacctcacgaactgacctgaccgttaggagacaacacgttcctgggccctgtgttcgcggacggaaacttggcaccacacactcttatccacaacgagagcgtgggtgtgtgtcccaacattctccacgcgttccttccttccctccatctcctctctgttcatagcctcccaagaaacaagagccaaacagcgcttgcgaagctcaagcgccgcagcaatgtctctggccccgtccatcccttccatcaaggtgaaggtgggggccgtctcggtcgctcctccacaccgcgcatgccgatccttcgcggtgatcaggagctccaaggcagagggccccatccggagacctgcggcgcctccgctgtcgccaccgccgccgatgccacccaagacgccggctctgtccactcctcccaccctgtcgcagcctccgacgcccgtgaagcccgctgctccacccacgtcgtcgcagccgatgccaccttctcctgagcccaagccagttgacgccacagcccagatgcggaagccggtggctggggccatgacgctggagtaccagaggaaggtggccaaggacctgcaggagtacttcaagaagaagaagctggaggaggccgaccagggtccgttcttcgggttcttgcccaagaatgagatttccaacggaagggacatttcactgcaaatcgatctagcctgagcttttcagacagccagc

SEQ ID NO: 24709 - DNA, 2932 bp, Zea Mays
tagagtccgggcaggcagccatctccgtcttctccgcgctctccatcctcggcgggcgggtgggaggggcgagtcgacgaccagcacgcgcgcgcgtccagcgcaaccgcgtcacggaaccctagcgtcgcctcgttcgctgcccaactctcctccagactccagtgcacaggtctccatcacggggaattctcatatagcaagtcgtcgtcctcgtcctcgtcctcgtcctctcctccggtgggtggatcggccatcgcgccgggccgggcgggcatacctacgtacacactccccggttcccgtccccgtccccgtcccgcattcgattggttccttcgtcttcgtctgccgtatgtatatgcagtagcagaaaaaataaagaagacagctcattgggaggttgatgttcaattggagttgtttcacacagatataggcgcaaatcgtctatctggtggtcttttcaagggaaagactctcttgtattcagacttaaagcatgtgctattgagagttactcccaaatatttaccagaagctgaggaaaacttgattctggtttcttctcatattgacactgtttcgacaacggaaggagctggagattgcagttcatgtgtgggagtcatgttagagcttgcacggggagtggcccagtgggcacatgggtttaagagtggtatcttgtttttatttaatactggagaagaagagggtcttgatggcgcccatagttttataactcagcaccactggagaaattcagtaatatttgcggttgatctggaagctatgggtatcagtgggaaatccacactcttccagggtactgaccattgggcattggaaagctttgcagctgtagccaaatacccatctgctcagatagcttcacaggatgtttttagttctggcgcaataaaatctgctactgattttcaaatatatgaggaagttggccgtcttcctggacttgattttgcatataccgatacaacatctgtgtatcatacgaagcatctccaaaatttttgaaagatgcacaacaaaggaagcaaggaaagacagagcaggatagagctgtttacttcgatatcctgggaaagtacatggtggtctatccgctgcgacttgctaccatgtttcacaactcaatcatattgcagtcacttctaatatggggaacatcattgcttatgggtggacaccctgcactggtgtcctttgcaatatcatgtttgagcatcattctaatgtggatattttctatctgcttaccagttgtggtagcatttgctctgccctatatgtgtccgtttcctattccatatgttgcaaatccatggttaactattggcttatttggttcacctgcactgcttggagcatttattggtcagcatattggatttattctcctgaagaggcatcttcgacgcgtgcattccaaagcaaaaacaggcataactcctagcatgatagaaaatgttactgacctggaagctgagaggtggatttttaaatctggttttgtccagtggttaatagctctgatactaggaacatatttcaaggttggatcatcgtatatagcactcatctggcttgtttctcctgcttttgcatatggttttttggaagctactctctcccctgttcggctacctaaacagcttaaggttgtcacgttggttgtgggtttggttgcaccagttgtgtcttctgctggtttggctgttcgtatggcggatgtaattgttggaagtatagtacgtattgacaggaatcctggcggactaccagactggcttggaaatgtaatagtttcggttgccattgctgttgtcgtttgttccacgtttgtgtatctgctttcatacattcatatctcaggtgataaaagaattctgggtttgctattatccttatcctttggtctttcaattgctttggcatcaagtggcattgtgccagcatttacggaggatgtcgctcgatctgtaaacgttgtacatgtcgtcgataccacaggagtacatggcgggcatatagaaccagtatcctatatctctttgttttccaatacacctggaaagctgacgaatgaattagtggaccttggaggcgaagaattttcttgcggaaggaacatgactactgacttggtaacatttacagtgaagtatggctgttggagttacaaagagagcagtaccggatggagcaggtctgaggttcctgtgctccttgtagaaagtgattcggttataggtggtgctcgacagacagtagtatcagtggataccaagtcatcgacgcgttggacgcttggaatcaacaaagatggaatcgatgacttcacagttcaagtggattcggagaagatagtcctacctggtgataagagcgagatagatgggtggcatacaatccagtttgcagggggcaagaactcgccgacgaagttccagctgacgctatactggtcgtctagcaaaccatctgagagagaagctaaacaagcagcggacgctcctttgctggtgaaactaagaacagatgtgaatagagtcacaccgcaggtggcaagggtggtggagaagctgccacggtggtgcacgcccttcggcaagtccacctctccgtacacgctagctttcttgacggccctccgtgtcgatatttagtcagtcagcagcatttgtttcccatacataggcgtccagtccagcacctttcgttttgaactgtattttagtttgatagtagcaagttataggcccatagaattgtacacaaaagctgccaagggcggtctggtgtaaacgtgctttgcacttgctctaatttgtcctgtatcaaagtttcagattagtttgtggtatttgtgtgtaccattcctgcccccatccttcaagctacgttttct

SEQ ID NO: 24710 - DNA, 2992 bp, Zea Mays
gtccagtccaacccaaacctcaaccgacactccccgtggggggcggtgccgtcgccggcgactcgccaattttgatttgaagaaaagaaaccaccagccaccacgcccgcggccgtcagccggaggtgaagcacgcaattcattacaaaagggtcccctgccaagatccaacactcatgaattgcaacaatacggatcggagacagcgagcagatctcgcggacttgcaattcccctgctgagctgtgagctgtatgcatggcatggccacccctgtggcgcctcttctccatgatgagcctcaagctgctggtatcttactcccagggacaacccagcattcagatcaaacaaactctgactctagagttggagagcttatactgcctaatggggatacttatcgtggcgcgttatcgggcaacacgccacatggcccaggttgttatatctggtccgatggttgtgtttatgagggtgattggaggagaggcctcaggcatggccgaggcaagacgctgtggccaacaggggccacctacacaggtgactactccggtggctacatttatggtcagggaacgtataccgccgggcttaacagttacaggggaggctggaagctgaatcttaagcatggccaccttggcctacagacatatcccaacggagacacttttcaaggttcttgggtgcatgggcaaatgcaggggcatggcacctatacctgggcaaatgggaacacttatgttggcgccatgaaagatggggtcatgtcaggcaaaggaattctcacatggaacaatggagattcatttgaagggaactggttagatggtgccatgcatggctatggaatctacacatggaaggactctggctactatgtaggaacctggacaaggggggtcaaggacggaaaaggcacgttctatccaaaatgccgtgggattccggttaccgacatcgacgatttaagaaacagaggtgtactgcctggtgctgaaagccagactcatggttcccgtatccttcactctgcctcatcggacatggcagacatggtggctagcagaaatcaggactctgtaggtatttcatctgttagaagcttgaattttgagaaaactcgctccactaatgtgctactggaaagaaggtggagccttggagtggctattgaaaaattcctcggtcgcgaaaccaatgaaagttctgcaattgaaagatgtgaaaacaaggctgattccaaccttcctatactggaacgggaatatatgcaaggtgttctcatcagcgaggtcgtggtggatgcaagcttctcgaatccattaaaaagggtatcacgccgccagaagaaaatagtgaaggacataaagaaacctgggcagacaataattaaaggacataggagttatgatctgatgctcagtctgcagcttggaatcaggtatacagttggaaagattacacctattcagagacgtgaagtgcgagcttctgattatggttccagagcaagtttctggatgaacttccccaaaaatggttcacgacttactccttcacatcatgctgataattttaaatggaaagactactgcccaatggtgttcagaaatttgagggagatgttcaagattgatgcagcggattatatggtttccatttgtggaagtgacgcacttagggagctatcttctcctggaaagagtggaagtgtcttctttctatctcaggatgatcgatttatgatcaagactctacggaagtctgaagtgcaggttcttctacgaatgcttccagagtattatcaccatgtccgtacctatgagaacacactcataactaagttttttggcctccacagggttaaaccgtccagcagtcaaaagttccggtttgtagtgatgggaaacatgttttgcactgaacttagaattcaccggaggtttgacttgaaaggttcatccttaggccgctcaacagacaaagtaaaaatcgacgagaacacaacactgaaagacttggatctaaactattcattttatctcgagccttcttggcggcagactttgcttgcgcaaattgagaccgatagcaaatttctaaagcagcacgcaataatggattatagtttgcttcttggcgttcatttccgggctcctcaaagcctacggacacaggcatcctttcatcaagcaatcctaccagataggctggctgttctttcagaagaaggtgctctggaggaggatgttttgaacagtcctgaaggactggttttggttcagcgagctagtgatcaaaatgatgttgtcattggttcccatataaggggggcccgtcttcgatcatcaagtgcaagttttgaggaagtagatctcttgcttccaggcaccgcaaggctccagatccaacttggggttaacatgccggccagggcaaaacagacggttgaggatgatgacagtgaagataatggtcaggtgtatgatgtggtgctgtacctgggaataattgatatcttgcaggagtacagcataaggaagaagattgagcatgcttacaagtgcatccaatataactcattgtcaatatctgtcgtggaacccagtctctactcggagcgcttcctgaaattcattcaaactatctttcctgaaaattcataaaataaaatccagtaattcttcacctacaggagcaaagtgaaagaaacattgttcagtgtgcattgtggccctttgcaagttcaaattttacataatagaaggtgataacatactctgtccgtccatacttttggaagcagcagcagcacctgctgtcatccacgagctaagcatatagaagcagcagcacctgccagagacttatccatccatgtccctatattcaaacttcaatacagtttatagtgcaaaatagtgtttcgaataatggatacggtcattttaagatttgcttggatattcacctcaatccacat

SEQ ID NO: 24711 - DNA, 2822 bp, Zea Mays
ggcggcgatggcgtcccgggacgacgggtggggaggcggcgaagacggcagctcgctcttcgagggcatggtcctcttcgcgccagagcccaccgccgccgaggactcggtccctgcccctgcccctgcccccgcccccgccgaggactcggtccctgtccccgccgctgtccctgagctgccatccgccgcccgccacgacgccgacgcggcctcgtccgtgccaccaccgctggacgaggatctcttctccgatctcaccctcttcgccccgccgcaggagccgctctcgctggagcagacacccccgcccctgctcccgcaaggcgaggatcggagccacgcggcacttgcccccgcgccgctagcccctactccggggctctctcggcagccgtccacctcgtcgctgcgcaagaagaagagggccgtgcgcatcgggtacgcccgctcgccgcaacccgcgccgccttcccctcctgccacggttcccgcctccgcagctgctgctgcgatctccgctagtactatagccttcctggacgcttcgccgtatccggccgctactcgtaccctcgaccagctccctgatcggcaactcgatgtccatgtcaacggctacgaggcgcacgcggaggcggtggatgttgataccaattcaccgcatgtggtggaggcggtggatgtggataccaattcgccgcgtgtggaggaggaggaggcaaaggaggacgatgacgggaaagaggatgaagatgctggagtggcagccttgggggtcaaggagaggctaggtctcctcagatctcaaatctcgggcaagctcgactccatccagcagagggctgctgctgtggctgccaagaggaggcttctggctggccggcggaggaaggtggcggaggaggcgacctccgtggcatccaggcacaaggatttggagagggagctggaggtggcctgcgaggctgaggactttgagagggcagagagtatcagcgactccctcgctgccctcgagaaggagaaggatgggctgttgacggcgctgcgtgatgctgagcttgactacgattcagtggattcggagttgcaggaggtgcttgagtcccgtattgctgccgaggaggaagctgctatccttctggagcaatttgcaaagagagcaaacaagcacaagaattatcgtcgaaagaaatagaagggtggcaaacatcaatggagttactagaaacaaagaagttggaaatggaggttgaaacacagttggttttagaagcacgttctgggttggaagggtcaatagagcatttggttgaagaagacaaactagaggaaggtacacttagtataaaaggagaagtcctcaccaaggagttagctgaccttctagagttggtgaggttgaaagaagcagagatagctgagaacaatgcccggatccatgaagttcaagaaagaataagtgcagtggtctccagattccatggctctcagtcagatgttgatttgaagctcaattccttgaaggaagcccaatgtaaactggatctagagactgaagcacttgtgttgaaaaaaaatgaaattgataatttcatttctttaacagagcaaaaagattcagagttgagggaaattattggtgcttgtttctctgaagcaaaaacttgccaacaatcagttgaaataagaagaaagcttgcatcatcgattttgaagtcaagagaggatagaattgggttgctaaaaatggaggaggaaattttgcaagacattcaaatgcttaggcaaaaaattacagatgcaagaactactcttcaggaggtatcttcaaggagaacaagtatacaacaagaaatggattcatttaagcagaaattgagcttcattgacaaaaggggccctgaactagaggctgaaaagaaagttgcggctgctgcaagaaactttaaggaagcaggaaggatagctgcagaggcaaaagctcttaattccgaaaagaacgaactgcgtggcaagttggagaaagctgctactgatctagagttaatagaaaaggacattgcagcaactacagacaagatacaagaatgcgaagggcttgttgtactgaaagaaaaggactcagcattgacaagttacaaaagactgcggttggattgtgctgctgccagagcagaactgactgctgcaactgaaatacatgataatgaagaagttgagatactacgcaaagaagctgaaactgccgattctaaagcaatggagctcaaaacatgctatgaccttcaggtggaggacaatgacttcatgtttcagcctgtagttcctatagcattcataacaaattcaacaggacagcacttggtagaaattgcttcttcatttggcctatctcctcagaagtgacattggacagtggatttgcacactaccaggtctgcccgttgcactgtgatccaagttgtacctgtcatattgaggggaagagctgtgctagtgtgaaactttctccttccaggatatcctcctcaacgacctctctttaaatcccagcatttggaatctactccaaactagagtaggaaggaagcatagggatgatcaaatgtacaacatacattttgcatgctctgtaggaatttagcttccctatgcattttttgtgtacattaagactgtaattcttttgttgtgccagttttgattcaattgcagtgacatgccatcatggaccagtatgtagacagatttttgtttcgagaaaaaggatgtaaccagaataaaatgtccaggaatggaactccttttgcattgcc

SEQ ID NO: 24712 - DNA, 889 bp, Zea Mays
catgaattctcacggtactaataatcgcatgaatctaccaaacaattccataacgcacatacacataaattgtgaatcacacgtgttcatattacaacaaacaaaatatacaactcatgaatcgaatcaaaaagtacttttataaaatacacaaaataattcggttcgtcatcaaccttgggttcgcacgtgcgacggggagagttcgacggggttcggccgggtggagaaaagcaggatctcgactacggacggcgagtgcgtggctcgagcgacgaactgcggctctggtgaactctgacgacgaacgacaactccggcgacgaacggcactagcgatgagcgaggagagctagagagagaggcgagctcgggtaggaggaagaagggagagagctctgctgtcccttttatagggagcaggagggagagaaagggtcggccaagctcttcaatggggcgcagtcggacttcatgaccaccaatggcgccgacggttacagggagtgatggaggagaggaaacggaagaaatgaagctcattaatggcgaagaagaacggtcgtcggggtcagttggtgcggggcgcgtcggtcacggccgggctcggtgtctcgcgtcgggctcctcagtcgcgggggtgggttagcctcagttggcgcgcttggcgtcgcagccggtcggtgtagggcgccatcggggctcgtgcggggctggggacactcggtcaggcgggcgctgctcggccggctccctggctgcgcgatggtgcagggcttcggcggtttcaggcgcgagcgtgagagagagaagaagggaggagagagaataggggagaggaaggagttagcagggggcggcggcggcttgggagaagccagccaggggg

SEQ ID NO: 24713 - DNA, 1280 bp, Zea Mays
cctcaatcccatctactcctacaccctccttatcacccacgctgtattaatttgggatcatgtgtaagcattaaagaatccttttaccttgatgagtcatgttgccccggtgatggcaatagtaacagcaattatttccatcgtgatggatccatggcatgacttcagagcaagtcacttttttgatagttctactcacataataagaagcagtgtgttgctgcttctaggtggggctttggcctttttcatggttttgacagaatatgtccttgtttctgtgactagcgctgtcacagtgactgtagcaggaattgtgaaggaagctgtcactattctggttgctgtgctattctttaatgatccatttacatggttaaaggcgcttgggctggcaataataatatttggtgtcagtctattcaatatttacaagtataaaaggttcaaaaaagggcatcacagtgaagatgctgggacaaatatccaatcttacaatgggacttcaaagtacgttatccttgatgatgatactgaagatcaggatgattcaggctgacctgaatatggtagaatgcagactactatatgcactggcgtttccagagaagcaagatcttctggtgcctgcatagacttacttccacaggctaactgatatcatactattttttgagttgatcaaccgctgtggccactggccagccatgcacgagcgtgacgcttgcagccgtgtgacaagttgagaagactacacgctcgtacatggaacatacaaggtacagcctggtatcagtacagatgttttctcctttcgttcaagacaaagaacggtgcatatatctgaacgaggcattctgcagtatgtccacgaagaaaatgttgcatcaattacaattagaaacacaggtaacacacttaactttatggatgaggatagggttcggttttgtagtgcattctgattgttgaagggagattcagcatcggaacatagctttcttttctttagttctttctttttttgagatgaaaaataaatagtactaacaatcttatatgtaataatgttgtatttacgggaatgtgtaccgtttcacgtaggagcatttcgcgccttattgtaatacctcatcttgagaggtcagtgccaagtcggcacggtccatctcaaatttcctttgcgtattttgagagcagcttgtcattgtacatgtcatccattagcatatcttggcgtttggcttcatccgtaggactatgagtatatccagaaggtt

SEQ ID NO: 24714 - DNA, 1412 bp, Zea Mays
tccatgactgttctggaagctccaagcgttggcgaaaaaagtaagatatttctgcgaggcaaggaatccctcccccgcttctactctttcggttcgccggttcgccgtctcgcacacccacttcctacaccgccaccgagcactcgctcagtttcatacccatcctcgaagtcgcctctgtctagttcctgctcttccaccaccgcctgtgatgtatccccgaggcccggatgggggacgagatgcctcgtctcgccctatgcttgccactcccgccggcaacgacacgcgcgaggaggatgagatcaccaccgcggaggctcatgtggagaaagacgccgcgcggatggacgctgccctcctcatgcggactacgcccaagatggacgagtttcacaccgggggcgatctggactcaagtggaagtggaagcggcatctcggggccaagcgcctccaaaagacagctacaaagaaggggatcgtggcggcaacgagtcagcaggtccagcatccatgcttatccttttcctttgtgtttctatttgatctgtttttttgcccgcgccagcaacagagaagaatgtggtcgtggctgtaatgggtcagcaggaaatgttgcatgtgttgccgacagaaccatctcactctctctttagtttctgcaattttttggacgaccgagaggtgctgccgtttatgagtaactttccagtgggaaaacagtatgccacaacatcatggtcagagtttggacattgcatgaagcacttgctggacaattgagaagaactcatgcctacttgcaggagggttgttgtacacgtgagtggaggtcgaacccttcttgtagggctcttaatgtatgaagtacgccatgctagctattgaatcaagttcaatgggattcgttaaaatataaggagggttgttgtacaagtgagacaaggtcagcccttcttgcagggctcttaatataagctcagcctgtactacacgttcatccacgtcgagctcgtcggctcccaacgcaaccccttcttctctcacgagatcagtggtgaggacgacactggggatagagacctagggttctccaagtgggcctagaaactccatggcaacgtctcaggtttcatgcagttctctaaatttattttgctcgattgtaagggaactgtgtcctctataagctcgcgctcgtgctgtaccgggagtaccccttcttcctgcaagtctggttcaattaaaaaattttgttctgtcgtgttgtaaagtacttggcgagctatgatatgtcattaccttagtgagaagactgcttctaatatattagtaatttttagctgtgcagatcatgtcatcatataaatgttgcaaacattataaaatagaggatccatttgaactctt

SEQ ID NO: 24715 - DNA, 4367 bp, Zea Mays
cgatcgccatctgctcagctgtgatttgtgagcgcaaagcccgacatctataaatatcccgcatccatccatccagccagccattgcaaccaccggccgggctgggagcactcagcactgcgacgaggagagaggagacggagacggatgcttattcctgtgcctgccttggtgagtgaggcgctgctggtatgcatgagctaggaggtaaggaacaaccatacgagggcgagcagagcagagagcacacggcgcgccgagctagcagcattgcccaatctcgcggcggggagagattcgtgagcgcggaggcgcgaatcttcgacgcagcgacggcagccatgccggagtcctggagacccgccgaggcgaatgcctcgtcgcagccggcggcaggcacgtccggcccctcggctcagagccctggcaatgacgccaagggacgcgcggcgggggaaacccccggcgcggcggaggcggcggcgacgcgagtgccgttccacaagctgttcgcgttcgccgactccaccgacgtggcgctcatgctcctgggcgcgctcggggccgtggccaacggcgccgcgatgcccttcatgaccgtgctcttcggcaacctcatcgacgccttcggcggcgcgctcagcatccacgacgtcgtcaaccgggtgtccatggtctctctcgatttcgtctacctcgccatcgcctccgccgtcgcttccttcgtccaggtgacctgctggatgatcaccggcgagcgccaggcggcgcggatacggaacctgtacctcaagacgatcctgaggcaagagatcgccttcttcgacaagtacaccagcaccggcgaggtggtgggcaggatgtcgggcgacaccgtgctgatccaggacgccatgggcgagaaggtcggcaagttcatccagctggtggtgaccttcttcggcggcttcatcgtcgccttcgcgcagggctggctgctgaccctggtcatgatggcgaccatcccgccgctcgtcgtggccggcgcggtcatgtccaacgtcgtcaccaagatggcgtccctgggccaggcggcgtacgcggagtcgtcggtggtggtggagcagaccatcggttccatcaggacggttgcgtctttcaccggcgagaaacgggcggtggagaagtacaacaagtccctgaagagcgcgtacaagtccagcgtccgggaggggctcgccactgggcttggcatgggcacggtcatgctgctcctcttctgcggctactcgctggggatttggtctggcgctaagctgatcctggagaaggggtacaccggagccaaggtcatgaacgtgatctttgcggtcctcactggctctctggctctaggtcaagcgtctccaagcatgaaagcgtttgccggcgggcaggccgctgcatacaagatgttcgagacgatcaacagagcgccggaaatcgacgcgtacagcaccacaggaaggaagctggaggacatccggggggaaatcgagttcagggacgtccatttctcctatccgacgaggcctgacgagccgatattcaggggtttctccctcgccatacccagcggcacgacgatcgcgctggtaggccagagcgggagcggtaaatccactgtcatcagcctgatcgagcggttctacgaccctcagctcggcgacgttctgatagatggcgtcaatctcaaggagttccagctgaggtggatcagaagcaaaatcggccttgtcagccaggaaccagtccttttcgctgccagcataaaggagaacatagcctacggcaaagccagcgcgacagatcaggaagtcagagctgccgctgagcttgccaatgctgccaagttcatagataaaatgcctcagggtttcgatacctcggttggcgagcatgggacacagctctctggtggacagaagcagaggatcgccatcgcaagggctattctgaaagatccaagaattctactgttagatgaagctacaagtgcgctggacgccgagtctgaaaggatcgtgcaggaagctcttgacagggtcatgtcgaataggacgactgtcatagtcgcacaccgtctgagcaccgttagaaacgctgacaccattgccgtcattcatcaaggaacactagttgaaaagggcccacacaatgagcttctaagagatccagaaggagcttacagccaactgataaagctacaggaagcaaaccagcagaacaaccggaagggtgatggcaatgctcgtctaggcaaacagatgtcgatgaacaagtcagctagcaggaggttgtcccgtgataacagtagccaccattcgttctcggtgccgttcggtatgcctcttgggattgaaattcaggatggttcatccaacaaactgtgcgacgagatgccacaggaagtgcctctcagccggctcgcgtctcttaacaagccagagatcccggtcctcgtactaggttccattgcctcggtcatcagcggagttatcttcccgatcttcgcgatactcctgtcaaatgtgataaaggcgttctatgagcccccacatctcctaaggagggactcacagttctgggcttccatgttcctggtgtttggtgcggtgtacttcctgtcgctccccgtcagttcctaccttttctccatagcggggtgcaggctgatcagaaggatccggctgatgacgtttgagaaggtggtgaatatggaggtcgaatggtttgatcacccagaaaactcgagcggagcgatcggtgcaaggctgtcagctgatgcggccaaagttagaggacttgtgggagacgcgctccaattggttgtgcagaactcttcgacactagttgctggtttggtaattgcattcgtatcaaactgggagctatctctaatcatcttagctttgataccactcattggcctaaatggatggatccagatgaagtttattcagggcttcagcgcagactcaaagatgatgtatgaggaggcaagccaggtggctaatgatgcagtaagcagcataagaacagtggcctcattctcagctgaagagaaggtcatggatttgtacaagaagaaatgtgaaggtcccctaagaacaggaatcaggacagggattataagtggcatcggttttggagtttcctttttcttgctgtttggggtctatgcagctagcttctatgccggtgctcggcttgtcgaggacaggaagacaacctttcctaaagttttcagggtttttcttgctcttgcaatggcggcaattggagtgtcgcaatcaagtacccttacatcggattcttccaaagcaaaatcagcggcgtcctctatatttgcaatcgtagaccgaaaatcaaggatagacccaagtgaggatgcaggggtgactgctgagacactacgaggaaatatcgaattccagcacgttagcttcaggtatcctaccaggccagatgtccagatcttccgggacctttgcctgacaattcatgctggaaagactgttgcgcttgttggggagagtgggagtggcaaatcaacggcaatttcattgctccagaggttctatgacccagatgtaggccacatactactagatggcgtggacatacgcaagttccagcttcggtggttaaggcagcaaatgggcctggtcagtcaagaaccggccttgtttaacgacacgataagggcaaacattgcctatggaaaagatggacaggcaacagaatctgagatcgtatctgccgcacaactggcaaacgctcacaagttcatcagctcggcgctccagggatatgacacaatggttggagagcgtggagctcagctgtcaggagggcagaagcagcgcgtggccatcgcccgtgcgatcgtgaaggaccctcggatcctgcttctggacgaagcgaccagcgcactggatgccgagtccgagcggatcgtccaggacgcgctggacagggtgatggtgaaccggacaacagtggtcgtcgcccaccgtctgtcgacgatacagaatgcggatctgatcgccgtcgtcaggaacggggttatcatcgagaagggaaagcacgacgccttggtcaacgtcaaggatggcgcgtacgcgtccctcgtcgcccttcactcggcagcctcttcatagctgcaggtggtagcaagtcaggtgctagtatctgttcctctatttgatgacacacataattgcttattatacctaagcggggaaatggtacaaatagcaagggccaaatgtaaatgcaaggagctggtccttaagatagttaatatatatatatatatatatataatttatattattatttttgaa

SEQ ID NO: 24716 - DNA, 2568 bp, Zea Mays
cgccacgtagctgcggttccttggtgatatgcacgaggtcaaaagtgggcgcgggaaataggtgctatgcgctcctgcgagaggattggggaagactttacctcactcaaatttacgggaacagtcaccctcgatgcgtgacgcgaaaaaatgggagaactttgcatgagctgttggagttattagagaaataagggtcggcttggttgcccgaggcctacccagcgcctgcgatggaggagaaggctatggcaaatggagcagcgactgctgatgttgctgctcctgataataaggataacaccaaggaagaggctagcgagagcaaggaaccagcagccaatcaggatgccgatgaccagaacaaaggcttggaaaatggcgccgagggccagtcaggtggagatgtcaatatggcagatgctgaggtcacagaggaaggcgatggtgatcctggtgttgcaaagcaggtggattctgaagatatcaaaacggatgccgatacaaaggaagatggcaatgcaaaggcagaagaagttgaggatgtcaagatgactgaggctgacacgggaagtacagaggtcaaagataaagaagagaagggagatgaagttgtggacacaactgtggataagcaggatgaatcgaaggagcaagaggaaggtgtttcggctgagcaagatgagaagcaaggagaggaagcagaagaaaaaggaaaagaaatggatgccgatgagaagcaagaagaggaagcagaagaaaaaggttctgctgatgagaaagatgaagatgaaggtgaccagaagatggaagagaataaggaggagactccgaagaataagaaagcaaggagtgccagggatagaagccagggaaatgataataaacatgatggatcaaaatctagggaagccaaaagtttgctgaacaccccaagcccatatggtaccgatcgtcctcaacgtgagaggaaaatagtggagaggttggttgaggtgattgagaaagagccaaacaggaatttcgtggttgagaagggacgagggactcctctgaaggatataccaagtgtggcacacagaatatcaaggaagaaaccttctgatcttaaatttcttcacagtattctttttgggaggaaaggcaaggctgtcgattttaaaggacatatactccagttctctggatttgtttggcatgaaagtgatgaaaagcacagagtcaaggcaaaagaaaagcttgacaagtgtgtaaaagaaacgctgttggacctttgttggacccttggcattccaactccaaaagcaaacattagaaaggaagatattgtgtcaaagctgttggactttattgctgaacctcactctgcagctgattctgggctctctgatgaccagggttcaaattctaaaaaacgcaagagaggaggtgaaagtgcacgtaagactcctgatagcacacctagtaggtcaaggaagaaatttatcaatgacagcacttctagtaaaaggcagaaaaaagcgctcgagtatgatactgatgaggatgaatccatgaagtcagacagtgaggaaaacagagatgaagattcagatgaagctggtgacaaacaggaaggtgactatgtatctgggaaagaaaaggcagggaagttctcagaggtaaaagaatcttcaggcaaaaagaaggcaaacacagggagtggccaccaatcaggtcctccaaagaaaattatcagaagtccggtaaaaaaagtatcatccaagattcatgaggaaaaagaaagccccaataatagtgcaaaggttttttctaggaagaagaaacccacagcagaaaaggagatcaaagaaaaaaagtcatcaggcaaaaaggtgacaaagggtaaaggagaatccgttgaagcagttcttcccagcaaggatgatctgaggaagaccattactgaaatcctcaagaaagttgacttcaacacggcaactttcagtgacatccttaagaagcttgacaatcactataaaatggatctggccccaaagaaagaagccatcaaagttatgatccaagacgagttaaccaagttatcagaggaggacgaaggagagggagccggagacaccgagaagaaacagcagcagcctcaggcgaaggagatcgaggcatctcgttgattatcgccgcaccaactcgagaacctcacccctgatcgtgtatgttatggggcatgatgtgtaggcagcctccacacctttttagctgactgatcggagagttactcctaggcaactcttgtttctagatttgcaaatggtgtctgaaactctgcgtttgctgcggcagaacgtgtacttaattgttcgtgataggtctgaataacacatggatggtatcagtctgtagcttattttttttacttgatccgtttcttctgtgggttgtgatttgtgaatgaccaaaagatggatgctgtattccagtttctgttctctcagagtaggcatgcaagaataacagctgaaccaaaccgagaaacagaacagtggctatctcctatctttagtagcttcc

SEQ ID NO: 24717 - DNA, 3742 bp, Zea Mays
cgcagacgcgtccgtgatccgtccgtcgccctccccttcctgcgcaagcgtgcgcctacctgcatccgctatccgtcggcgatgtcggtgccccccgccggcaagcgccaggtgtccctgcggggctcgagcgcgaaggagatcacacgcgacgcgctgctgcagaaggtttccgaggagcgccagctccgcagccacctccgccgcgccgccgcggccgccttctccatccagatgcaaggaaaaacttctgctcctttgctgtgggtataccagaagagagatctatttggctttatcaggccaaaaagctgatttcactgtgctcttccattcttgccaggtacgaccattcctgttgcaaggatggaagcatagtcgacatgactgctattgctatgagattggctgtctctctaactgattgcaaaacatggaaaagtttgaacagtgagaacactagcgctgcagatgcttctgtacagagtttgattgaatttattggtacgtgccagagtggcatgtataattgtgttaggcaatatataaagtctcttggtcctcatgttacttcagcgaagaaaagttctgcaactgcaacagatgatgattttcttattactgctagtgcagtcactttagccttgcgcccattcgattctaagaaagcaaagggcggtgttgatctgaatggtgcttcaaagaaatacttcacacttatacttacaataccagatctgtgcaaacgcatgccacctcttttgttacctgctcttaaacatttttctgtgctgcaaccgagtctcaatattttactgatctccaaggataaaatatttgaagaaataataaaactggaacagtcagaggtttcagctagtattattccttgttctggttgggctcttggaaatatagtgaacttagctaccaatcatgatgacttatccaattcagggtgtttcattcaagagttagatttctgcttatatgttgatgttattaattgtatttctgaaaacttactggaaagttttgagaaaagcaagggaacgtctcaaaatgttggtaatatcactttccatgccgacacatctgttgcagaggaagaggataccaatgacgactgcagaatgagaacattatttatggaccttctgaagccaatttaccagcaatggcaccttagaaaacttttgatgttggcaaaagaggattttccatgccgcagggcaactgattatgatccaaacttgaagaatattcactttcgaatcctaaagttgtcagatgttatatgcttctactatcacatgcttagaattttctcatcacttaacccttctatcggtgcaatgcctattctcaacatgcttgcattctcacctggatttctagttgatttatgggaggcactagaaatgcccatttttggtccacctatccagaattcacaagaaacaggacacgagaaacagttggctacaagtagttcaggtgtgcaagtatcctccatgaggcaaagaaggaatgccaaggacacagcaaacaggtggtcaaatgtgctccagaagattactggaaaatccaatgattcagaggagggcactttatctgatagtattttattttctcatgagtctaatgatgatgcattaacttcatgggatattgaagccatgagacatgcatctgagggtattggaaaggacttaatgtgcattatgtatcttttctgtgctatatatggacacctattacttgtgctagatgatatcgagttttatgaaaagcaggttccttttactttagagcagcagcggaagattgcatcagcacttaatacatttgtatacaattctttcattcaaaatagtggaagctacagcaatcctcttgtggatgtagctgtcagatgtcttaatctactctatgaaagggacagtaggcataagttttgtcctatttccttgtggttggcacctgctagaaatggccgaattccaattgctgctgctgccaggtctcatgaggcagcatttggtatttttccagggattcctcatcggagctctgtacttaccacattaccacatgtatatccatttgaagagagagtgcaaatgtttagagaatttattgagtcagacaaagcatcgagaagggttactggtgaagtttctgggccaggcccgggatcgattgagatagttattcgtcgaggccatataattgatgatggatacaggcagttgaactgcctaagatcaaagttgaaatcttgcattcacgtgtcatttgtgagtgaatgcggtcttcctgaagctggtttggactatggtggtctgtcaaaagagttcctaacagatctctcaaagtccgcttttagtccagagtatggactattttcacaaacatcagcatctgatactagcttaattcccagcaattctgctaagcttctggataacggaattgatatgattgaatttcttggtcgagttgtcggcaaagcactctatgaggggattctgttggactattctttctcaccagtatttgtgcagaaacttcttggacggtataattttctggatgaactatcaactcttgatcccgagctttatagaaatcttatgcaactaaagcactatgatggagatgttgaggatctatttttggattttactgtaactgaagagttgggtggtaaaagaatcgtccatgagcttagacctggtggtaaaaatatatcagtgacgaacgaaaacaagttacactatgttcatgcaatggcagatttcaaacttaaccgacagatacttccatttgcaaacgcattttatagaggactcagcgatctcatttcaccatattggctgagcctgtttaatgcaaatgaatttaatcagttactttcaggcggactacaggattttgacgttgatgatttgcggaacaacaccaagtatactggtggttatactgagtcaagtcgaactgttaaactcttctgggaggtcatcaaagcatttaagccaacagagcgttgtttgctcttaaagtttgtgacaagctgttcacgagctccactgcttggattcaagtacttgcaaccttctttcacaattcataaggttccatgtgatgtaacactttgggcatcaattggaggccaagatgtagatcgtcttccatctgcttccacatgctacaatacgctcaagcttcctacatacaagcggtcaagcacgctaaggagcaagctgctttacgccataagctcaaatactggatttgaactctcgtagaggtatattcagtggttttgtaaccctgctttggttttgctgtgaatagaggtatagcaaaattcgatcggatgtacaattgcatcttgattaatcggagtaacagcttctatgaaggtagcgcaatgcataaaaaatgtttgtttggccggcggggccgtttggatcgatcccaggcaaaatccgacgcctggggagctccgttcaccaggccggtttgcaattcaaacagccatacgtgtgtttctattgattgtgctgagagagagagagagagagagagagagagagagggaggggggagggagagggagatagagagagagtgagggaggagagagagagagagagagagagagagagagagagagagagagagagagagagagaaagagagagagagagagagagagagagagagagagagagag

SEQ ID NO: 24718 - DNA, 1211 bp, Zea Mays
atgccccccgcctccatagtccctgtcatcggcgacctcagatccaacaggttggtctgcttgcgccgtgatcgcggaagctaccgcgccttcgtctccgtggatgaggtcctggatttgtgtgtcactggcgcggaatatgagggatcgagggcggcgcaggcggcgagctcgtgggcggaacagactggtgagagcaagaggatggatcaggagcttgagccccaggtaagccattctgaaaatctgtatcgcgctgatttacccgctttaggatttgtagttgtcgttcgtttctcaatgcgcttggttatcgatactgctatctcatggtctcagttcagctgagttcacttaactaggaccagcatgtgcagtagaaaatctctggttaattatgggtccttataacctccgttcgttgcttgaatttctcgttatatgtggcatgttcattcaagttgtttacttacaatcacataatgcttgcggtgttacatgggacatgctaatttctttggatgttagcatgtgaacttgtgagtcagttcattgctcatttcattgaacctatgctgccatgctggtgaagagacaatgaagcagccagttggtgttataaacacaatacacctcgctcccagctccgcattcgcctccgcctcagatccctacagcgtgatgcgagggaacagcaaccgtgcggcctccccatcctgagcacctcaaatccgatgcccctccccaagccattccctcggccacgacagcgacggcaacgagcatggcccccctctaccacctatgcctttccatttgtggcctccgcatcgccccaacgttgacccctccgtcctccccctctactcccagcgcagcgccggttttagctttggaaattgctgatcgattaattatggggggaagcgtctctacttccttctcggttggtcaaggtatccccttcctgtgtcctctctcctctgtgtagatggcgaatttgtggagtccgaataatctgaatgttctcgcattctttacataatcccttgccaatttatggcaagttttatttgctccatttgttttatggtatgatgatctagatctgatgagcccattcaaattcttttgccgagccgccgtccctctttttctactgtttgtttgtgcatcggaattgctggatctataccaaaatctgaaaagtg

SEQ ID NO: 24719 - DNA, 2360 bp, Zea Mays
atccctctctagtctctaccctttccgcctcggcacctccccacccctctcgccttcgcttcgtcgccacggcgagccccacgccgccgatcggggcgccgccagcggcggcggcgcccgatccgatggaagcggaggtggggccgccgaatccgccgcggccggagccagccggatcggagcccgacgacgcgcgcctctccccgcctcctcctgctcctgctccgccgcctccgcccccgcctcctcccgccgccgaggctgccgccgcgcccaccgcctccgcggccttctcgctgcaggctccagctccggcgccggcggaggcgaacggcagctccgacaggaagaggaggaggaaggcggaggacggggacgggtgcaagacctgcagctgcaagaagtccaggtgcctcaagctgtaagttgccctattactccccgtgcttgcagttgcagccttctctattgtctcgttcgcccacgagggagggagggatggactaggatgcttcaccattttggttcggtgctgatttggatccctgtcactgacgaattcagtgttttttaggcatgtttagatctgacagtctcacgtttcaaatgtggcaaaatgctgcagttttattgagctcccagtagttcggaattcgatatccattaacgagaaggaaattgccaagatcaagctaccgatatgttctagaaccatggacgaaccagtgattaatctactgagttgaaaactctgcgctaagcaaactgggctggttcatgcacacacctgtggccctgtggacgcttagtgtgtgccattgcctgctcaatggcatgcaacctccacacttgagcatgcgtttgtctttgtgtttttttttcttgctaatttaagttcccttttgtgtataacctttgtctgtgttattctgtaacagttactgtgtgtgctttgcttctgggttacattgtactgaatcatgtggatgtgaaccttgtcataacaagccacaattgcaaggtactctgcggatggcaacagttttacctctgaaacctgtccaaacattcgaagctggccaagatatagtggaacaagtcataaggtctcctatggatcttattagaagaaaatgcacatgcaagaagtcaggctgccttaagaagtactgcgactgctaccagggaggggcaggatgctccatcaactgtaaatgcgatgattgtagaaacccatttgggagaaaagtcggcgttattttggacggtaaaagcagtcttactgcacctatactgcacgaaagaaacgggactgaagttgactcaagcgacgaggaagacgacttctacatgaatcgacagctctccccaatacctccgtctccggtgtctagggagtcttcgttccaacaggagactctagtcggcgtcgaggtccagaccatgaacgggcacctgtaccccaaaccactgacccaggtgcgccccgagccgtcgtcctggcagctctcccggaggcccatcgaggaaccgcgcggggagatatggcgcttctcgaggaggccgagcgaggacgggacctctgatgccatggaagtgcacgccgtcgccccgagagagagcaagaaggcggcagaggtccgcggggacaggttcggcatcccgcggtgcatcgaggtgatgagcgccatggcggagctgtcgccggtggagaagtcgctggcgcccgacgtcttcttggacgcgagcaaccgggagatcttcctctcgctgagtgtagatattaggccaatctggctgaggcgcaagatgaagagccttgtctagctagacgctacaacagagatagcctgaggaattttcgtcgtcggcgtatacctaataaacccgtgctgtactgtagatatataatatatgtgccttagattcagagttgagttctggaccgatgggtgtaatataccttagtgctaatttatggtgcatgctgttatattggagttcttcctatggtaagttcgttatgatttcagctagaagtttaacagtaaattatctctctctctcttccttggatagatatgttcatgaacctgtttctgacgtgcaaggtgtcattgactgttgactttctcattccatttggccaatggtcgcagtgtttcttggtgcccatagcctgatattaaaccatgttagggcttgttcggtttcttctcaatccatctggattgagtgagatttggtaggtttaaatctcaaacaagtcaaactttttcttatttttttccaatttcattcaatccatgttgttggtcacttgttcttaaatactatgaatcaagaacaatacaacacaa

SEQ ID NO: 24720 - DNA, 3224 bp, Zea Mays
gaggcgacccgtaacaacgcggagcgtcagcctatagccgtcgctcccgtgtcccgtccgccgtcccccttcctctcgtattcgcttcgccgcccaacccactgtgcaccgctgccttcccgaccgttctcgccgccgccgtctccgcgcctgccaccccgcgcgctcggccaccggcgcccacggtgcggctcgatcaaggccagatcagaacccgccccggtccgcgtcacgccgatattttctgttttttggtacggatctagggttttcctgctgcggattcgttcgattcgctcatggccgctgggcgccatgggggttacagggactacgaggcgagggagcgggagctcgacgcggaggcctccaggaggagcaaggagcagcaccaccatctcggcggccgccaccgcgacgtggaccgccaccgcgatggcgggcgcagcaggggtggcagagactttgccaacggctacggtcgccgacgctcgccgccaccccggagccggctggcgggaaggcttggtgaccgtgagcctggcgaggtgctgagcggtagtgcatctgatgactccggtgggaggccgcatagagggagggagaatggcgtgctcagttccggcagggagggtgatgtgatggcagtcactgatgactccggtgggaggtcgcataggaggagggagaatggcgtgctcagttccggcagggatggtgatgtgatggcagtcacagggatatcttcgccgagcaagaagaggaaattctcaccgataatttgggacagggatagcccaaagccaccacattctgatgcagccagggacaagaaagctgtagaacctgtgccttctgagctccctccgcccccgccgttgcctccacaagaccacatcacactgaggttggctgtggagaagtcacttatggatatagaacctactgttggtacagagagtgctgtgcagttgctggaacatgaggtgaataaggtgacagagcaggaagaggagtatgcaacaatgaggaacatatcgacttcaagatgggctggtgctaatgatgatgatgatgatggggcagctccagtgaagaagaaaagtctgtctcctgcagactcctctgtggcagggcagtggaaaagagcaagtccagaacctggtgaagtatctggaggaaggacaatgtctaggtcatctgactctgggaaaatgagtaatgatgagaaagaagactttgaagcaaatgaagatgactatatggatgtcgacaagggacatgctagtgacagtgatacagaaaaccgtatgtcagatactgactcagacaatgaaatacacagacctgaaacccctgaaagagagaaggcaccacacaggtgtatcaatatgcttcaagattgcagaagtgttgatgagtttgagaggctcaacaaaattaacgagggcacatatggtgttgtatacagagcaagggataagaagacaagtgagattgttgcattgaagaaggtaaagatggagaaggagcgagaaggtttcccattaacctctcttagggaaataaatatcctcttgtctttccacaatccttcaattgtggatgttaaggaagtagtagttggaagtagtctagatagtatttttatggttatggagtacatggaacatgatcttaaaggtgtcatggagaccatgaaacaaccatatacccaaagcgaggtaaagtgtttgatgcttcagctgctagaaggtgtaaaatatctacatgacaattgggtgcttcatagggatctgaagacctcaaatcttttgttgaataaccgtggtgagttaaaaatatgtgattttggactgtctcgtcaatatggaagcccattaaaaccttatactcaactggttgtgactttgtggtacagggccccagaattgttgttaggaacaaaggagtattctactgctattgatatgtggtctgtgggctgtataatggctgagcttcttgccaaagaaccgttattcaatggaaaaacagagtttgaacagctagataagatttttagaacactcggcacacctaatgagaagatttggcctggctatgctaaattaccaggtgtgaaagtaaattttgttaaacaaccgtataatagactaagggataagttcccagccgcttctttttctgggcgaccaatcctgtctgaagctggttttgatctattgaacagactgctgacttatgaccctgataagcgcatatcagcagacgatgctcttaagcacaaatggttctctgaagttcctctgcctaaatcaaaggacttcatgccaacattccctgctcttaatgaacttgacaggcgttccagaaggtatctgaagagtcctgatcctctggaagagcaacgtttgaaagaactgcaagggaacataggcaaccatgggctttttgggtgaactagaagcacttgattgggtctgcaagggaacataggcaaccgtgggctttttggctgaactagaagcacttgattgggtcctgtccgtcctaactgttatgcttcacactgaaatcctgagttcatgaggttagatatcttctgaggcttggtaccggtttaaatggataaggtttctccttgtggcccatcatagaaattttgttgcaggattaacgcttcatccagatcgatcataaaagcaaatataatctacctgcatcataaggtgtggcgtgttggcttttattggttacaccagtttcacctttggaacttctctatgtaaaatattccagattggtacgttgtaaacaatgtccagtgtgttggatttaaatttaaaacgaaacatcatcattattagttttctttatgctccttgtgccttttcttttgatctttgcgttttgtttgcaagagacaaaagaagcgcaggggaaggatgccttttgctttcatcaggaaatcaatggcattaatacaacttagaagctaagctgtggctgcttcaagataggaagcttgatggctgtcagcttattgtacctaagtgactaaattttgtggagggccttcaaaagtgttcatctcttactagtgaaccatggtgaaaaacacaaagcgatttggttctcggaataaataaagtgaaagttagcatgtagagtatcgcaagatgtgctgtgccattcttctatttcaaactcaacttttatga

SEQ ID NO: 24721 - DNA, 303 bp, Zea Mays
ggcagactggtggtgggccaagctgtagcgaaagagaaggctttgtggtggcgggcggcggctacagctggagctggcgacgcatcctcctcgtccgacgaggtatcacctaattcccagcttgttctccctcatctggcctggcgcaggtagaagcactatcgcacgtagtgccgccacttcaagcagggccgtgccgccacttcaagcagggccacttcaagcagcgccgcccttcgctaccaagaacccgacctatgaggctgtgaggagtactacaaggttccaaggctaagagtgttg

SEQ ID NO: 24722 - DNA, 4609 bp, Zea Mays
cgcatcgcgaaaaaatctttttctcgcctctcatcgctcctcgccatttctctctcctcccctccgtctcacccgccgcccgccgcgaaaatctgcgcacggacgcgccggctgcccgcggagagcctcgggtgggagcgcgccccgtcgaggtgctcttattggttatgggatcaatgtgcaatttttttctttccgtttgagagcctttctagtttcttgggcaggctcttgagctaccaagcatgtcagaatcaaatgtgaagtggattgatgggcttcacttcacatcattgtactggcctccaccccaggatgtggagcagaagcaggcacaaatcttggcctacgtcgagtactttggccagtttacagctgacagtgagcagttccctgaagatgtagctcagctcattcaaagttcctatccatcaaaagaaagtcgcttgatagatgaagtattggcaacttttgttcttcatcatccggagcatggtcatgcagttgtacatccaattctttcacccatcatagatgggacactgtgctatgataggcatggtcctccattcagctccttcatctctttatttagccatacttctgagcaagagtactcagaacagtgggccttggcctgtggagaaattcttagagtcttaactcactacaataggccaattttcaaagttgaacgccaacacagtgaagctgaatgtagcaccacatctgatcaggcaacatctagtgattccacagataagaaatctaacaattctctaggaaatgaatctgaccggaagccattgaggccactaaccccgtggatcactgacatattgctagctgcacctttgggcattcgaagtgactattttcgatggtgtagcggtgtaatgggaaaatatgctgctggtggagagttgaagcctccaactactgcttacagccgaggatctggaaagcacccacaacttatgccttccacccccagatgggctgttgccaatggagctggagttatattaagtgtctgtgatgaggaggtagctcgttatgagacagcaaatttaacagcagcagctgttcctgcgcttctgctacctccgccaacgacacccttggacgagcatttggtggctggtctgccccctcttgaaccatatgctcgcttgttccatagatattatgcaattgctacaccaagtgctacacagaggttgctttttggtcttctcgaagcacctccatcatgggctccagatgcacttgatgcagcagtacagctagttgagctacttagagcagctgaagattatgcttctggcatgcggcttccaaagaattggatgcatctgcatttcttgcgtgccattggaactgcaatgtcaatgagagctggtattgctgctgatacagctgctgctctgcttttccgaatactttcccaaccaacgctgctttttccaccactgcgacatgctgaaggagttgacgtacatcatgaaccactaggtggctatgtatcatcatataagaaacagttggaagttcctgcatctgaggccactatcgatgccactgcacaaggcattgcttctttgttgtgtgctcatgggcctgatgttgagtggagaatatgtaccatctgggaagctgcctatggtttgctaccactaagttcatcagcagttgatttacctgaaattgttgtagctgccccgcttcagccacctacactgtcatggaacctgtacttaccattattaaaagtattcgagtatctacctcgtggaagtccatctgaagcatgcttgatgaggatatttgtggcaacagttgaagctatacttaggagagcttttccttctgaaacaccagagcaatccagaaagccaagaagtcaatctaagaatcttgctgttgctgaacttcacacaatgatacattcactctttgttgaatcctgtgcctcaatggaccttgcctcccggttgctatttgtggtgttaactgtttgtgtaagtcatcaagctttgccagggggcagcaaaagaccaactggtagcgataaccattccctcgaggaagccactgagcattcaagattaacaaatggaagaagcagatgtaagaagagacaaggccctgttgctacgtttgattcgtatgttctagctgcagtttgtgccttatcttgtgagcttcagctgttcccttgcatttctaagaatggatcacattcaaatttaaaggattccatgaagattatcatacctggaaaaaacaatgggatcaataatgagctacacagtagcatcagctcagcaattattcatactcgtagaattcttgccatcctcgaagcccttttctccttgaagccatcatcagttggtacctcatggagctatagctcaaatgaaatagttgcagcagctatggttgctgctcacgtttctgagttattccgtcggtccaggccatgccttaattcactctctgcactgatgagatgcaagcgggatgctgagatttctaccagggcatcatccctctaccatttgattgacttgcatggtaaaacagtgtcctccattgtgaacaaagctgagcctcttgaagctcacctgacccttacaccagtaaagaaggttaatcaacatcgctgtgaggaaaacaacaccaactcatcggatagtgccaagttggaaaacaagaatggttcaacacataagaaaaacggtttctcaaaaccacacttgaaatgtgcagaagaggttctgaacggcaatgttgcaagtacatctgggaaatccattgcaagcttacaggtggaagcatctgatttggcaaacttccttaccatggatcggaatggggggtaccgaggttcacaaactctcctaagatctgtattatcagagaaacaagagctgtgcttctctgttgtctcattgctctggcagaagctcatagcttctcccgaaatgcagatgtctgcagaaagcacatcagctcaccaaggatggaggaaggttgtggatgcactttgtgatgtcgtttcagcctcaccaaccaaggcctcagctgctatcgttctccaggtcaagatattgctatattcgtacgtttggtcataactaattttggtttgagttttgtttgaattatttcaagtaaattctttttacccttttctggttaatttatttcaaagcaaacattcttagtttagttttttttgtttctgacagatctctttcgaaacacgttttaactacaatgcctatgtgaatatgcacccgtttcctattcacgtttctagaattttcgcaggccgagaaggacttgcagccttggattgctagagacgacgaacaaggccagaagatgtggagagtcaaccaacgtatagtgaagcttatagcggagctcatgaggaaccatgacagccctgaaaccttggtgatactcgctagtgcctctgaccttctacttcgtgctactgatggaatacttgttgacggtgaagcttgtactttgccacagcttgagcttctcgaagtaaccgctcgagcagtccatcttattattgaatggggagatccaggtttatcagttgctgatggcctttctaatctgctaaagtgccgtctttcaaccaccatccgctgcctttctcacccaagcgcgcacgtgcgcgcgctcagcatgtccgttctccgtgacatcctggaccacggatccgtgagccccaacaagatcagccgaggggaacagcagcggaatggcatccagagcccatcgtaccggtgcgtggccgcaggcatcctcaactggcaagcggacgtggagaggtgcatagagtgggaagcccacagccgccgcgccaccgggctgacgctcgccttcctcagtacggcggcgaaggagctcggctgccctctcccgtgctgacgaggccgctcccggatctgatctgacatcggcggccacttgacggccagtgctggcagcttgctgcgggaccggcgagtaggacgctaatctctcgaccaaggacgactcgccggtttgttcacgtgatatgtgatcaaactgatattagatggtgtttccaaagtatatatctactgaggggcttgctcccatgatgcgattttattccaatctgacgtcagatgctttacgagcatatttaactgcttgagctgtacgtagcttgtattacttgtaactttgtgtaatatggttattattgccgaagaagcagaacatagctttttcttttttttctctctcttttttagactgctgctagatccttatccatgcgttgcaacggagcgccatatagattgaagttccccttgcagggctccttgtacggtctataacatgaacataaagatggcatccagtagtcaatcagcaactatcgcaatgagattggtcttctgcacgtgacccagtttagctcccgtgcagggctctctgtaacctactgtgatgtcccatgacatgaacataaatgtggcaggtttatcattcaataaccaaacagcagccgatatgtttcatctttatacataagtgctgatctaat

SEQ ID NO: 24723 - DNA, 237 bp, Zea Mays
tcccgcacgcggaccgtccgcccctgttcagagggcaccgccacagttcttgttgagtgtttgacgctccgaaaaggcgtcaacagaagtaataaatctgctaggtgctaaaatacagttcaatttcatcatcaagttttcagtaacttgacagtttggggtcatacgaaaataagcattaacaagcttatttatataacaatgcctgtaccaagcattactaaaatccgcgttgaa

SEQ ID NO: 24724 - DNA, 3439 bp, Zea Mays
ctggctggctggcctgggaggctgggacggacgacggaggagtgactccgctgcccggcatcggcaggcagcgaagcatgcttgcacagatgcggcatcatggcatcgcccctcctcctcgaaagtggcatgcaggcgcggtagggtagagttcctcacttctcgcccatcaacgatgacgaagtgcgcgtaagctgctgctgggaaacggagattggatagattcgccgggggtcttgttggcttcaagagagcccgagttctcctttttccagcttgggtctggtacgccatctctgggtctggggactgtagatgatgacgtcctcgtacgagaaggccacgtcgggtgtcctgaggaacgcggcggcgctgctcgacgaaatgcagctcatgggagaaacgcagggtgccaagaaggtgatcaactccgagctgtggcacgcgtgcgcggggccgctggtctgcttgccgcagcgggggagcctcgtctactacttcccccaggggcacagcgagcaggttgctgctaccactaaaaagatacccaactctcgcatcccaaactacccgagtctcccgtcgcagctgctatgtcaagtccacaacatcactttgcatgctgacaaagaaactgatgagatttatgcccagatgaccctgcaaccagtacactcggaaactgatgtgttcccaatcccaacgctcggtgcttataccaaaagcaagcaccccagtgaatatttctgcaagaatttgactgcaagtgatacaagtacgcatggtggtttctcggtgccacggagagctgcagagaagctgtttccgcagttggattattcaatgcagcctcctaatcaggagcttatcgttcgagatctgcatgataacatgtggacattccgtcacatttatcgtggccagccaaagcgacatcttctaacaactggatggagtctttttgttggtgcgaaacggcttaaagctggtgactctgtcttatttatcagggatgagaagtcacagctccttgtgggtgttaggcgggccaccagacaacaaccggctttgtcatcatccgtcctgtctactgacagtatgcacattggtgttcttgctgctgcagctcatgcagcatcaagtggtggctcgtttactgtttactacaatcctcggacaagcccgtcgccatttgtgattcctctcgcaaggtacaatatggccacatatctgcaaccatcagttggaatgagattcgcgatgatgtttgagacggaggagtcaagcaagcgcagatgcacaggtacaattgtgggaattagcgactatgaaccgatgcgatggccaaactcaaaatggcgcaacttgcaggtagaatgggatgaacatgggtatggagaaagacctgaaagagttagtctatgggatatcgaaactccagagaacatggttttctcttccccattgaattcgaaaaggcaatgtcttcctagttatggagtttctggcctacatgtgtcatcaatttcaaagccacaaggaagtccttttggtaacttgcagcacatgccagggatcagttcagacattgctttgctgcttctcaatcaatctgcccagaacctcgggagttcaattgcttgtcaacaatcatcattttccagcattattcaaaatgctaagcaaagctatttccctccaacgacattaggtgcttccactggttggaatgaatctcagcagcagttaaacgcccttggtattcaaaaaggtgatcaagtaagctgtgatgttcagccaggtattgattcaatcactgcaccggagatgaatgttaaaccaagagtcccaagaagcacggattcatactcaagtcagagcatttcggatccaaacagcaagagtgaccctaaaacaaaaacgcgaaggagcaagaagagctcgtctcacaaaaccatttcggataaatctgagatttcttcagtaccttctcagatctgtgacaagcaaaggcatggttcagaaccaacatcggcagactttgaagcagaacaagctacctgtgggaacaatgaggattcatctggtgcactcacacgtggtgattttgctggagagctacaagttcagcaggttgaacaagatggtctacttccaccaccgaagttagagtcatcaaagtcacctgatggagggaagtccgtcagctcgttcccaaaccaagggtgtttctcacagttctttgagggtctggattggatgatcccgccttcctgctaccaagactccaatggcatccattcagttaccacatcggatagcatctttaatccgtctgaaggtataccaccttccacaatgaacgcggacggcatggacgcgttccaaacctcttgcctttccgagtgctttcctaattccatccaagaattcatcagcagtccagatataaacacactgacatttatgtcgcctgagatgcaacatctggatgcccaacacgacggcagcaacttgcagagcacgtccaactcctatgtgcagatgagcttctcggaggagagccagagtgcatccttaagtggcctacacatggaagctgtccatatcaacagctcctgccttcaaccactggcgacagggagctttgatgcagggacgttctcaaaactatcaaacataaaagaatgccaggccttgcctctgcaggagattcacaacagctccatgggaacaccttcgtgcagtatggatgcggcggcggtcgagtactgtatggatcgaagtgtgaagccactgaaaccaccggtccggacatatacaaaggttcaaaagttaggatcagttggaagatctatcgacgttacacggtttagagactaccatgagttgaggtcagccattgcctgcatgtttggactacaggggaaactggaacaccctggcagttcagactggaagcttgtttatgtcgactacgagaacgatgttctcctcgttggagacgacccgtgggaggagttcatcaactgtgtgagatgcattcggatcctggcgccttcggaagtacagcagatgagcgagaatggcgtgcatgtcttgaacgactgcatgcaaatggcttagaaagtcagggctatatgtcctgcgcagcctgcacagtgtaacgtcgcaaatacgagaaatgagtgttcttcgtagccacgcagcggctcttcttgtaaataaaagatacatcacgtgcatccaattctctgaatgctttgattcttttctagcacgagaagagaccattattatatggcggtgcattacaggtctattttctattttttcatgcaatgacttaaattatgagcttacgaggaagggggtgataatgtatcaaattatcccatctatttatttattatattaatacaagaaatttaaaaaaaaa

SEQ ID NO: 24725 - DNA, 1798 bp, Zea Mays
tgacgactgacgagtctgggagacctgcccgctacggcgcgccccccgggccaatcgcctcctcgcacctcgctcgcttcttccccttctccctcctctgtcctttcacacgtactccagcttgctcttttcctcctcccttcggccctcgcccatccgcctctctccccacgcgcgcgcgcatcgccctcccacagtcccccccccccccccccccccctcctcatcacccacccctagcaataccacactcctactgcaagacccgcccgcccaccgcttcctcgcatctcgggcgcgtgcctgcctgctctcgcggacgtggtggtggttctccggcgccgtggtgggcgggggacgagcgggtgggggaccggcgggtatttttggttgctgtggtttcgtgatggcggcggcggcgatctgcgtggaggacgaggcggcgtgcgccgccgcggaatgcgcggggatcgggaatctggatctcgctgccgccggcgccggggctggcggcaagaggagcgtctatctcatggactgcgcgccggtctggggctgcgcgtccacgcgcggccgcagcaccgagatggaggacgcctgcgccgcggccccgcgcttcgcggacgtgccggtgcgcctgctcgccagccgccgggacctcgaccgtctgggcctcgacgctgacacgctccgcctgccggcgcacctgttcggcgtcttcgacggccacggcggcgccgaggtggccagctactgccgggagaggctccaggtgctcctgaggcaggaactgaggctgctcagcaaggatttgggggagacaagcgaggccgacatgaaggagcactgggacgagctgttcaccaggtgtttccagaggctggatgacgaagtgtcggggcaggcgagcaggctcgtcggtggcgtccaggagacacggccggtggccgccgagaacgtcggctccactgcggttgtcgccgtcgtgtgctcctcccatgtggtggtcgccaactgcggggattcgcgtgttgttctctgccgtggaaaggagcccttagagctgtcgattgatcataagcctgacaggaaggatgaacgagcgaggattgaggccctggggggaaaggtcatccaatggaatggctaccgggtctccggtatacttgctatgtcaagatcgattggggaccggtatctgaagccgttcgtgattccaaaaccagaggtcacggtcgttcccagggcgaaagatgacgactgtctcatcctcgcaagcgatgggctgtgggatgtggtgacgaacgaagaggcatgcaaagctgcgcgccggcaaatccaagtgtggcacaagaacaacggtgccgctggcgcatcgtggtcgttgtgcgacgagggtgatggatccaccaccgaccccgctgcccaagccgcagcggattatctcgtgagggtcgcgctgaagaagggtaccgaggacaacgtcaccgtcatcgtggttgacctgaaacctcgaaagaaaagctcaggagcaactcgtagcatcgggcgttctgggtccatcacagtagagctgagctgaccatggcatggccaaagaactgctgctaggtgctagctggtcgtccgcacgagacttgaccggcccacagttttttttttgggtccgttgggcgtcaagaattgtacatgtatatatggtagatgcgttttccgtggagggttatggcgctcaaccccgctcttgtttctgttggctaaaaatctctccaatcggcatctctaccgtgagcccccc

SEQ ID NO: 24726 - DNA, 1508 bp, Zea Mays
atttgcgcctcgaaaaacaattgagaatagttacctcttgtgatcatgcattctgcaagacttgtttgatagactactctgcagctttggggaatgtttcatgtccatcctgttcaatacctctcaccgtggacttaacagcacaaaattcagttggaaaagtaactcgaagtgtcaagggtcgcaaatgttcaggaatattgagcagactaccaagccttgtggattttaagacgagtacaaaaattgatgccttgagggaggagataagaaacatgattgagcacgatggttctgccaaagggattgtcttcagccagttcacatcattcttggatttgattcagttttccttggagaggtccggcattaagtgtgtccagttgaatggagccatgaacattaccgaaaagggaagagccatagacaccttcacccatgatgcagactgcagggtcttcttgatgagcttaaaagctggaggagtcgctctgaatctcactgtagcatctcatgtgttcctgatggacccttggtggaatccagcggtcgagaaccaagcgcaggaccgtatccaccgaattgggcagttcaagccaatcaagttgagtagagctcgcaatgctgattagttgaatcaatcgaaatgtttttcccggtgcaacacccctctcctttctaactaccttccggttgtggttgggcaggagcactaggtttgtgataaaggacacggttgaagagcgcatactgcaactgcaacagaagaagcagctggtgtttgaaggcaccgtgggggactcgccggatgccatgtcgaagcttacagaggcggacctcaagtttctgtttcagatctaaatgctgacgtagttaagcatgagtagggagggccaggctatgctaggactaggagcactgacttgttggaagttggaaccctgacgctgccataacaccaggacggacggggtcggcggtgcgtagatcgactgctgctgtgcctgttggaactgatgtacttttgcagtgtgtgtaacatcgatggcagcgactagcgaggctttccgttggagtagcccgtttgggaaagaacagaacagggtgttgtaggcctgtgtagtgtggggggcgtgcagcgtgctggtgccgcaagaggtgcggtggggtgggggtacagtctcagtacagggtactggtgtgcgctgagtgagcacttgagcccaacgcgctcaattgtttgcaggcggtcccccgcccccgtatctcgtggacaggcaggtgggtaggggaattgtagcagcgtgggaagcggcagtgacactgacaggaccatccgtccgaacgccttttgcagggcggattgcgaacaccgaccggattcatgtgttctttctcttgtgaagagaccgcaagagctgccgatgcacaggtgactagtggtagtagagtctggcagttgtctagtagaccgatctggccaaaacaggtgaggcggtggcagcatc

SEQ ID NO: 24727 - DNA, 3925 bp, Zea Mays
actttccaggccatcgtctccttccccttctttcaccggcctcgagtcacacgcgtgagatctgtgccttccgccgcggccacatgccacacaacgacgcccggcgagcttcaccgcgatagaggtaggcccgcccgataccaaggaggatggcggcagtgggcgttggtgcagcggacgagcggtgggcttcgttgtgcaactgcgtggtgaacttcttgctggaggagcggtatcacctcacggcgctagagctattgcaggagctccaggaggacggccgctccgcgcacgccctccgcctccgcgctttcttctccgacccagcgcttttcccgcccgatctcgtcgcccgctcatcctctgcgccgcccggtgctgatccacagattttgctagaagagaaaatagcagcagaagaaaagttggcactcacggagtatgatctgcgcctagccaaagaagacctttcacagttgaagcttgaattacaaaaacaaaaagaatcatctcctgatgattcaaatgggctccttttgggtgcttctatacgcgaaggatatactaggcaacaagaaaattgggatgtgaaaatttcagcattaggccctctaaaggataatgaacgaaaagatcttaattgcgctgtaaaagaatacttgcttttggcagggtatcgacttgctgttatgacattcattgaggaggaaaaaatatccatacttcaggaaaatgaaacattactcaaggacaatgaacgactcaatgctgaaaatgattccttgatgaagagcagggaaggagctaatagtcaggttgccgctttaaggaagtctttggaagctgcacacaaggatataaaagacaaggaaaaaatgattcaagacttgaggcagtcactggatgtccagaggaaggagctgaatgactgcagagctgaaatcacagccctgaagatgtacatcgaagggactcaatcaatcaaacaattgtttgttggaactagtgatggtgtaaagtcgcattcctttgctaattctgtgggagcatcatcattgaataatgaagatgaagattcaaaaggatctgaagccataacaaataagctagcatcagcagtaaatattactgatgatacgcagaaagatcgccaagttctagaaagtagcgctgaaggttcctcagtttcagaaactccagtgtctttcacagctgttgagaatgacagctatggtacatcaaaagaagataaatctgtgtcaaatatctcatcgaataatgtatgttttcagagtaatctgcatggagcttccatgactggtaaaagccaggggagttcagatggcatatccatgtatttatctattgagaaactagagagcccaagtaaacaaaaatcttcagataagattgctttggagactataaagatagtttcagatgcacttccaaagattgttccttatgtgctcataaaccatcgtgaggaacttcttccattgatcatatgtgctatagaaaagcatccagatagcgatgtacgggattccttgactcatacattgtttaacctgataaaacggcctgatggagaacagagacgcatcataatggatgcttgtgtagaattagcaaagagcgttggtgagatgaggacagaaactgagttacttccacaatgttgggagcagataaaccaccaatatgaggagcgcagattgcttgttgctcagtcgtgcggtgaacttgccgtttatgtccgtccagagatacgagattccctcattttatccattgtgcaacaacttgtcgaagatgctgcaacagttgtaagggaagctgcaacacataacctggcattgcttcttcctatgtttccaaatctggacaaatattataaggttgaggagctaatgttccaattggtctgtgacccgtctggggcggttgtggaagttgcactcaaggaacttgttcctgctgtagtaagatggggagataaattggatcagatatcaagagtactattggctcatatcctggcatctgctcagcgatgtccacctatttcaggtgttgaaggtacaatagactctcatcttcgtgttttaggagaacaagagcgctggaatattggtgtccttcttcggatgttgactgagttgcttccatttattcatcagaaagctatacaaacttgcccctttgcatcagctgatccaacaagctctacaccagagaacttctcagcatcctgcctaaaatcatatgcaacaggtgactctgagtggtcagcatttgagtggatgcacactgattgcctgccagatttgatcaagcttgcctgcttgttgcctgtgaaagaagataacttaagaaccatcatcacaaagtacctcttggaagtatctggactctacggtaaagattatctggagcacattatgctacctgtatttcttgtagctgctggtgacattgatagtggcgattttacctattttcctctatcaatccagccaaaagtccgtggcttgcgtccgaaaacttcaactgctgaaaaacttgccatcatgtgtgtcttcccattattgttatctggtattttgggttctccttccagtcgtcaacagttggaagagtatctgagaaaagtacttatccaaaacaccaaggatggttcattttctatgcatcatactactgagatcattaacgcagttcggtttctttgcttatttgtggagcaccatagtgtcatctttaacattttgtgggagatggttgcgagctcggataccagcctgaaaataaatgctgcggctctactgagagcacttgtaccctacacggatgtgaaaatagcatcaactcatattttgccagcacttgttacccttggctctgatcaaaacttgaaagtaaaatatgccagtatagatgcatttggagctgttgctcagcatttcaaaaatgacatggttgttgacaaaatacgcattcaaatggatgcttttcttgaagatggatcacatgaagcttctgtttctgttattcgtgcacttgcagtagctgtacctcattcaacagataggctacgtgaatatcttttaaccaagatatttaagatgacatgcatcacacctgtcggcaatgatattgaacggcgtcgtgaaagagcaaatgtactctgtgaagcgctccgggctctggatgctacagatcttcctgctatgggtatacgtgatttgcttctgccatcaatacaaaatctgttaaaagatctggatgctctagaccctgcgcacaaggaggctttagaaatcataagccgggaaaggtcagggggtacgctggaaagcattagcaaggtaatgggggcgcatcttgggattgcatcatctgtcagcagtttctttggtgagaacagtctcctcacaaagaaagaaggtggcgaggaacatgatcctgctggccccaccgctcctgagcaaaacctgcaggctcagccagagagcacgaggtttggtcgcataatgaggagcggctttggagacatattgcgaggtcaaagcaaaggacagtgatgcacttagattgaaatgatcaattacatacatagctgccgataccacattctttgtttgtaagttgacagaatatacctcaagggttgtatgttatttgccgagataaaaaaaaaggatttgacgttgcaaatctagcatcaaacttcctgtatgtaagttgcctgtagttagctgctcatttataagatgctaataattgtgtctttgtttcatttgtttttataaataaaatatataactagatatgagacactttgcccatcttttctgaaatttggatgttatagttggctgacatcatgtaattgatctgctttggttgaaggaacggtggg

SEQ ID NO: 24728 - DNA, 2384 bp, Zea Mays
ctgagatttattttaataacaaaaaaaaaaacaagcaagactcatactacactctagaagctacaaaccacgagcatttccgcggcgccgccttcctccggctccgacccccttgcccgttgcagctgcattggttttggttctcttcaagccagccaccgcaaagcgcgcagcaaagctggcctcactcatacagctcagcgcgcagctttcaaagcgttgggagagatggcagaggagacgcagccagaggccgcagccgaggccgaggtggtcgtgaccgagccggcgccggcgccggcggaggcggaggtgcctgcggcagcagatgccgaagccgtgaccgaaacggagaagaaagccgatgagccggcggtcaccgccgatgacgcgggaaaggggaccggctcgttcaaggaggagagcaacctcgtggaggacttgcccgacccggagaagaaggtgctcgacgagttcaagcacctgatcgctgccgctctcgccgccggtgagttcaacctgcctcccccgccgccgccgccgaaggccaaggaggaacccaaggccgaggagacgaagacggaagaatccaagaccgaggatccggccgaagaagagcctaaggcggagtctgcggcggaggagcccaaggccgaggtagctgcgaatgccccggatgaggaggtcaagacggaggtgccgccggtcgaggaggccaaggctgagacagtggctgtggaagccaagcctgccgagcccgagccgcaggagaagaccgtcgtggtcgctgaggaggagcctgccaccaagacggtggaagcaatcgaggaaagcgtcgtgtccgccgacgaggcggccgcgcctgagcccgtgctggtctggggcgtgccgctggtgggcgacgacgagcgcacggacacggttctgctcaagttcctgcgagcgcgggagttcaaggtgaaggaggccatggcgatgctcaagtccgcggtgctgtggcgcaagcgcttcggcatcacctcgctcctcgacgccgacctcggcctgccggagctggagaacgtggtgttctaccgcggcgccgaccgcgagggccaccccgtgtgctacaacgtctacggcgagttccaggacaaggatctctacgagaaggccttcggcgacgatgagaagagggagcgctttctcaagtggcgcatccagctgctggagcgtggcatcctgtcgaagctggacttctcgcccaacggcatctgctccatggttcaggttaccgacctcaagaactccccgcccatgctcggcaagcaccgcgccgtcacccgccaggctgtcacgctgctccaggacaactaccccgagttcattgccaagaaggtgttcatcaatgtgccgtggtggtatctcgctgccaacaagatgatgagcccgttcttcacgcagcgcaccaagagcaagttcgtttttgctagcccagccaagtcagcagagactctattcagatacatcgcaccggaacaagttccggtccaatttggaggccttttcaaggaggatgaccctgagttcacaaccttggacactgtcactgagctcactatcaaaccatcgtcgaaagaaaccattgagatccccgtcaccgagaactccgcgattgtatgggaactccgggtgctcggttgggaggtgagctacagcgccgagttcacccctgacaccgagggtgggtacactgtcattatacagaaaacaaggaaggtgcccgctaacgaggaaccaatcatgaagggaagcttcaaggtaggcgagcccggcaagcttgtgctaactgtgaacaaccctgcatccaagaagaagaagctcctttacagatcaaaggtcaagagcatcagcgagtgagtgagtgagtgaggttgctgctagctgcctgggtcctagagttaaatgatgtaccacagttcatctcagcatgatagaagagaggagaagccttttggtttggttcgttaatttattgggttttgctggcttttggttcacattctatattttgtttggttaaaaccaaagcgagcttggttttgtgacagtagatggggaagtataatgacattctgatggatggttgttgaggagggcagggaagacgaaaggctggggaatgtctgctcctctgtagatgtgtctgtacattgcatctcttggattctcattgatatgtttaggttttaggagtactttgtcacatcattatgcaatccatgttactctctgcatgttcctctttctcttcgtgtcctttcccttgtttaattgaacgctgtctgctgtccatgcatatatcaggatctgcctgctcccaccatttatgtgctcatttccag

SEQ ID NO: 24729 - DNA, 3354 bp, Zea Mays
tcctctgtcttttccaacaataatagtataatacaggcagctcacctccaagataaaatggcctgacgaaatgagcttcagggaaggccgccgccgcctactcctcgtcctcctcttcctggggtgtcgacaagccgcggcacgctcccacggtcggagacgaccaagatttcctcttttccgaggggagcacgagcacgagcaccaacgccgaccccgacctgacggctcgcacacacatcgataatttgccaacttctgcataagttcgtagcagcctctgtaacattttggccaaaatgaggatagcttttctcgtgctgttggttctctccctgtttctcctccctaatgggatcggcaaaagcttagccgcaaggccttcggtcgtgaatattgggtcgattcttcggttgaactccaccactggaggtgtttcagatgttgccatccgtgcagcagtggaggatatcaactcagaccccacagttctaaatggaacaacgttacatgttcaaacgagggatacaaactgcgacgacggttttcttggcatggttcaagctttgcagttcatggagactgatgttattgcgatcattgggccacaatgctctcctattgcacatatcatttcgtatgtcgcaaatgagctccaagttcctttgatgtcctttgcatcggatgcaactctgtcatcaatccagttcccgttcttcgtgcggactatgcccagcgatctctaccaaatggcagctgtggcggcagttattgattactaccaatggaagatagtcactgccatatacgttgatgatgattatggccgaaacggcattgctgctttggatgatgaacttactgcaagacgctgcaaaatttcattcaagattgggttccgttccaatgctaaaaaaagtgatcttctgaatctgttggttactgttagtaatatggagtctcgtgttattattctccatactggttcggaacctggactcaagcttctgtcacttgctaatggactaaacatgatgggcaacggctatgtatggattgctactgattggctttctgcttatcttgatgctaattcatcggtatctgctgaaactataaatggcatgcaaggtgttctgactgtacgtccacacacccctaaatcaaaggtgaagagtaatctggtgtccaagtggagcagcttaagcaagaaatacaaccacagcgatctccgcaccagtgcttacggtttttatgtttatgatagtgtgtggactgtagctcgggccctggatgccttctttgatgatggtgggaggatttcctttacaaatgactcaaggctgcgtgacgaaaccgggggaactcttcaccttgaagccatgagtgtttttgacatgggaaacaaattactgaataagattagaaatgtgaacttcactggggtgtctggccaagtgcaatttaatgctcagtttgaactcattcatcctgcctatgatatcataagcataattggcaacggcatgcggaccattggtttttggtcaaactatacaagattgctatcgaccgtccttcctgaagacctatattcgaagcctcctaatacttcgcttgccaaccaacaactctatgatgtcatttggcctggtgagactgcacagaggcctcgaggttgggcttttccttccaatgccaaggagttgaaaattggtgtccctaacagatttagctttaaagactttgttagcaaagataatgctactgggtcaatgaagggctattgcatcgatgtcttcactcaagcattggcattgcttccttatccagttacatacaggtttataccttttggcaatggtactgaaaaccctcattatagccaacttgtgcagatggttgctgacaatgattttgatgcagcaataggggatatcgtaattacaatgagccgaactaaagctgttgatttcacccagcccttcattgagtcaggcctggttatcttgtctccaataaaaaagcatataacaaattcttgggcattcttgcagccatttacattggggatgtggtgtgttacagggttgtcttttcttgttgtgggtgtggttatttggattcttgagcatcgaataaataatgatttccgcggctcgccgcgacaacaaataataactattgtttggttcagtttttcgactctgttttttgcacatagagaaaacacaatgagtaccttaggacgtggtgttttgctcatatggctatttgttgtattgatcattcaatcaagctacactgcaagtcttacttccatcctaaccgtgcaacagcttgatacatctataagaggacttgatgacctgaaaaatagtgattatcctattggtttccaagttggttcttttgtcgaagaatacatgattaaggaactgaacatctcacagtcgaggctaaaagctcttggttctcctgaagagtatgctgaaaatctcaagctaggtcccaagaaaggaggtgttatggctattgttgatgagcgcccctatgttgagctgtttttgtcaacttactgcaagattgctgttgctggctcagatttcaccagcggtggatggggctttgcatttccaagggactcccctctgcaaatagacctgtccaccgcaatcctgacactgtcggagaacggggagctgcagcggatccatgacaagtggctcaagacaggcgactgctcaacggacaatgctgagttcgtggactcgaaccagctccgcctcgagagcttcatgggcctgttcctcatctgcggcgcggcatgcgtcctcgccctgctcatctacctcggcatcacgatacgccagtacctgagacacgaacagccgggaccagcgatctccgtggacgcagggtcgtcgacgtcgaagcgcagtctccgaaaattcatctctttcgccgatgacaagcagccgccaccgaagaaaaagcgggccatgagcctctcgagaagttcaatgccaacgatgccgatgagtaaccgtcctggggctgatattgatgtagaaagctagtgcttgtgtatacgttttttacctgggatacatcatctttgggccaatctatgcgtccttcatatatattatgtataggaaattagagccaaaggctgtgtagtggattgtatttgttggtttttagcaccccaaccgcccacggttaacaagtcgtccgagtttggcagaactgtcaaattgtatagagtgagtcaagtagtcaacccttgttcacgaaccattgtgaatggaatatatgtttgtttcagttgatttgttctttcagatttct

SEQ ID NO: 24730 - DNA, 2177 bp, Zea Mays
gtgcagagtacaatccagatcagtatttatgggagccagagttcactcttgccggaaggaagtataaaaggctagatttggagcttacgaatgaaagaagtcagaccttaaagtgcagccactatgttcctgctgtcatcccagaaaacacttcccttccatgtgtagtctactgccatgggaatagtggatgcagagcagatgcaaatgaagccgctgtcatacttcttccttcaaatatcaccctttttacacttgactttgcgggatcagggctatcaagtggagattatgtcagccttggttggcatgaggtgcgtacacactataaattttgtagcaacattcatattctattttaaatggcaagtcctgaaaaatattaccactgtggtactcccagaagcaggatctcaaatgtgctgtgtcctttctgcgtaagaataagcaagtttcttgtataggtctttggggacgctcaatgggtgctgttacaagtctgctatatggagcagaagacccctcaattgctggcatggttctggatagtgctttcgctaacttatatgacttaatgatggagcttgtagaagtttacaaaatacgagttcctaagttcacggttaagatggctgttcagtacatgcgatgcgtcattcagagaagagctaaatttgacataatggatcttaatgttgtccagtttgcacccaagacgtttattcctgcactatttggacatgcttcaaatgatatgtttattcagcctcatcacacagaccatattcatcaggcttatgcgggggataaaaatctaatcaaatttgagggtgatcacaattcgccaagaccccagttttattacgactctgtttcaatattcttctacaacgttcttcacccacctcagtttccttcaacctgcacacataaacttgataagtattataaccttggtgcttttaagggtgctgctggtactaatgagagcttattgtatgagatcatcaatggtctacgggcagctggcactgatgcaggaagttcatcagctgctacagctagtttcacgaatgctacaaaatcagtagttgaattgctgacagagagggtaaatcagctatctgttaaaaatgataatgacttggtaagtcaatcattgcctgctcttcctcttctacttgagatttttaactccactcgagtgcaggattttcttttggatgaaaaccataaccttactgagatggacggtaacacaggagagtgtcatttagaggataaatcaaacagacaaacagatgaatgctgttcgtataccagctcaaaccgagagagctggggaagatgttcttccttgggtggagctagtgatggattgtcatcaggcgaacagcctgagatacctaatcataagcttaagagcttgacactaagggctctagcaaccccactgagacgggtacaaaggaaacctctcgcgatcccgaaggagaagaatcgatcactgtggaagaggttgaaaaaggagaggcaacagatgggggaaaacatatcccagcgtctgcggttgtgtctccaaggccaggctcgacacaagagaaccaaatcgtcttgacaactgtggatacatatttagctcttggacaaatctgctaggaactcactgatgattcagcaaccgagccgcgccgcaatttggagcttctggcactcagcgccaatcgtgccgtgtacattggttgaacattacctagaaatcttagatcatggattgtcccggacccaatgtgttaactgtcagtctttaatgttcgtttcttatgtttttttccccaatgtaatcctgtaaatttgaaggctagaactgcccatgtacttgtggttgagggagggacaccggttcgttgcttttttcaggatttgtgtagggtttggaggtcgagctgtatcgacagaatctcattttctatgttgctcggtaacgtctctgatttgctatgctggcgtgacatggttgattggttggtgaattgcacacgtgcatcgcatattcacattggttcctgtcctgagccattctctgattttgtgtgggtttgacttcgccatatggcaatcatacgtgttctgcaaatgcgaatccagaatcttatcaccacagcacattccactaa

SEQ ID NO: 24731 - DNA, 4197 bp, Zea Mays
gtcccggcaaaggcacccggtggccgcgtccagcgcctaccgtttccgggggggctcctcgcctcctcttcccccgtccacccattctcctggccgctcttccccttcgtcgtcgcactccgctagctcacctcctcgtccccatataaaccatatccctctccgggccccgcgcagccgccggcgacaagcgcgcaggagcagcagttgtcgcgcctcactgatggcgaccgccgtggcgtcgcagccgtgccaccttcccctcagcgccggcggagatcccaggtgcgcggccagcacttcgaatgttcatactctggagaaagtatatggtttcagattcatatgcagaagcattgttgatgtaaagactcacaaattccactcccgcatttcaaagaggaagtgctacttgaggaactcactgtcggagtgtgacaggaccatccacagtggtagatggttggagtttcggagacacaagggagtcttccagagaactagaaggatggttcacattattccattggcttctgatggtgatggcaaccatatatctgttaatggagctctgcaagttggttctacaagcaacattgatgaaataaagttgaaattgaataaagcattgcagagtgaagatatcagcaatggactcgtccagtcgatacatgatgctgcaagatctattgagttggctctcatagagcacagcaaattgccaaagagctcttggtttccaaagacatggctaggcgttgagaacaatgcttggataaaatcactgtcttaccaggctgctgtagactcattgttgaaagcagttatcgatgtttcatctcgtgggaatgacagagatagagatattaatgtgtttgttcaaaggagtttgtcccgcctgctcaccccccttgagagtgttatcaagaatgaattatctaagagggaacctgcattgtatgaatggtattcatccgatcaaaatcctttggtggtgagacaatttgtaaacatttttgaaaatgatccaatgttttactctgctacagcaatatgccttgaaggcgagccgatgaatactagtgaaagtgatctttctctgcttatgctaggtttgatctgtcttgctgcaatcacaaagtttggatcagcaaaagtttcttgtcagcaattctcttcaatggtgcctgatattattggtcgattcatggatatgcttcttgagtttgcccctctaagtaaagcatataacttggcgaaagatattggtcttcggagagaatttttgtataattttggtcctcgtgctgctgttcctaaacttggcaatgaccatggacttgaaatatcattttggattgaactggtgcagaagcaattactctgggctcttgatcgtgaaaagatatggtcaagactgacaacaagtgaaagcattgaggttctggaaaaggatcttgcaatatttggtttttttgttgctttgggtagaagcacacaaggatatttgtctttcaagggtttgactgatttggatgattcactgaatggtattgtaaggtatcttatcggtgggagtgtactatattatccacagctgtcctcgattagttcatatcaactgtatgtggaggtagtctgtgaagagctcgagtggcttcctttttacaatgatgatgttttaagtgcaaaaactgatactgaaggtagagaagaagtgcctaaaggagaagtcatatcaagagtcctaaatgtgtgctcttactggatgactagttttacaaagtacagctcatggcttgagaacccttcaaatgtgaaggctgcaaagttcctttctaagggacatgtcatgttgagtgactgcatgaaggagcttgacatatcaagaaatatgtcaaacgacagtggcttcctagaacctgaagaagaattggatactggaacagaattagcttcctttgacaagtcgcttgaaaatgttgaagaagctctggttaagttagaaaatttgcttcaagaattacatgtttccagttcgcactctggtaaggaggatctgaaggctgcatgctctgatcttgaaatgataagaagactgaagaaagaagctgagcttcttgaggcatcctttctagcaaaagcagaatatctggaggccgatgcaagtagcggatcactatctcctgcagaggaaggacctgtaaagacaagtagcaggacgaacgatacatcagcaccacaaaaaacaggaagcagggtggataataaacgtcgcccattttgggacttctttggtcggtctttgaaagttgatccagctcttgcagatcaggatctgatcactgtcgccaatgtggagaaggaaggcatggagtcaaatgacatcctccgcttcgaacagttaagacgtgagctgattgagttagaaaagagagtgcagaagagtgcggatgaagctcaaaaggaggagactgtgttgcaggggacacaactattagcaattgatacaggagctgctatgggtttgctaaaaagagctcttattggggatgaactaactcagaaggaaaagcaggctcttcaaagaacattgacagatttggcgtctgtcgttcctataggaatactcatgcttttgccacttaccgccgttggtcatgctgctattttggctttcatccagagatatgtgccatcgatgatcccgtccacatatgcccccggtaggttggatctccttaggcagattgagaaggttaaggaaatggaagttgctgaaggcagcagtgaagatatattggaggaactgaacaaatgaaataagctgggcatgtacagatggacatgattatactgcttagcttacggtctttcctgtaaagttgttttggaacaagacatttgagggggtttgttttatctaaagattctttgaatggcatacccgctggaaacagaagtgcaaggccctaggaataagtaaccaatcattgtgtcgacaaatgttccacgtctgcaggctggtgtatacataaaacatactccacattatacattacatgggcggctcacggtgcccttcaacatagtagaggatgaatgtccaagttcctcctggacagtgttctgtgtagggtagtggttttgatagaggattgtatatctagttggtatgttggtgatcacctttgttttgttttttaggaaccaagcctactacatgcattattgtctgtacccaaatgccaagttcagtgatctcctacgggattgagtggtgcgggcattttctaataataagccaagcccgtgagcaagatgtaggcgtgaacagtgttcgtcagtcgccgccaccgtctcccctcctgatccaatccaatggcgcgcctccacctcgtagccgtggcaatgggcttgctcttggccttgacgacggcgcaggcaccgggcgcgtccacgatgcccgcgcccatggcgcagcctccggcgacctcggcgcctcctcgtcccgcgccatccccgacccagaagaccgctccagctccggcgcccaatgccacggtacccgcccccgcctcgccgccggcgccgagctctatcgggcagacgccgaccgaggcgccgtcctcccctccgccgcccagcgccgcgtccagcgttgcctccgccttgtacgtggccgccgctatggcggctgtcgtgtttttcttctgaggtcggtactcggcgccgatggatccgccgcctatggtatggtacggtgcggtgtggatttgacacgatggctcccgctaccgctggtcgagtttgcttattaggatactagtagttaattaatagttgggttgatcagatcagatctagcgtttttgttgagtggggatattatttcttctacggatctgcacactagggttatgtcactatggttgccattgttattagggaaggtgcaaacttctaatttgaatcacatgatgttgatccaagggacgcataagggacgccaagcttattaaaacgataaaacgatggaacgctcatgggtgaaattttgacttttaaacgtttaaactttgtttaaacatagttttaaacaacataggaaaaataccaatatatcataatttcagacaataatatgaagttaaatactccctccgtcccaggatataaggcgtaactactttttat

SEQ ID NO: 24732 - DNA, 2248 bp, Zea Mays
atgggagagagcgtttccagtcgctgcgctgcgcgtcattctcctcccctccttccacccggcaaaaaccccgcgtcggccactctccggaggcgactagggtttcagcccctgggacacgccgccggtcgtggcacctccgccaccggatcccggtacccgagctacgccatcgccgccccgcccccggtcaccgccggtgcgcttccgccgacaccagacgcagctcgtccgccccgtcacgtgcacctctgcgtgggcgcgggattggatagggtttggggtttcggcggctggcgccaaatcccaccgctgctgctcgcgcaggaggtctcgagccctcggggttcccctactccgctccggctggagttctcgatgaaacttgttctacagtgttcttctgttgcatgactcagttgttttgagttatacttcataataacaatgcaaacacgaaaaaagggtgctgcaaaaaatgcagtggggtatcatgccaatcctaagacaagtaggccatccagaagggcaactcaatctacagttgctgaaaagaaagtatctgatctcatcacgtcttcttccaagaagcagagacctgttggtgtcacttccaagaagcattctaaaggaggaaggaagctgctagtttcatgtgatacaactgatgctggaaatgatgcacctcaggtaccccctagcgtcttccctgatctgcaggcccagcattctgatggtgttgcagatgatcgtcccaacgattccatattctctccaacataccatcatcacaaggaaggtggtgtgaataacctatccaaaggcttagaagaacaaacaacacatgttcatggtagtaaggaagctagcctaaaatctggttcaaaccttgcatgcaacactcatgatgggataaatgaccactctggcacactaaagttgcaatcagctgggcaaagcacattgcttgaagtggatgagtacagtgaactgggaaacctttcctcagaagtatcagcaatatatcttgctatgcagcagtctaagttggagtgcattgatgaacagagtcaagattctacctcaacagaaggttatggtgaagctgaggagactgaagagtatgatgattttgacccctactcctttatcaaagatttacctgatttatctatggtggtccccaagtttcgtcctgttctccttccaaagcagacccggagttgtcctacgatgactcttgtacttgatcttgatggtatgaactattagctatatacacacttaaatagtcttcaatactgcatttaatagccttttatagccatttacacgagtatctgcaaccaaagctgcttattcatgttattcggttcaaaactgcagaatgtctgctgcctctacaatgcataagtttaaagcacgaatccatctatctaagactactaattagggaacaagcaagcactgatctaattttgttgtcttagtacaattttcttgcagctatgggctggtatgtgttataacaagataaactccagtgctccacatgttggctaaatctagcagaacagaaggcgatattatttttgcaggctgatgtatttgtacgatgaatatatcactatcatggtatttcagaactcagattcatcatggatgtagatcttggttatttatgtaaactagattgtttgctgtatggtagtaatctagcacttagtagtaccgaaacttccctagaaccatgctttggtccacaatgttggatttatttctctttctcttgtctaggttctattactactgccagtttgatataagttttaaagtatcattcatttcttatattgatgttaatttcatgtttgtcttgctacaatgtagagacacttgtacattcaactcttgaacactgtgaggatgctgatttcacatttccagttcattttaacttcagagagcacacaatatatgttcgatgccgcccctatctcaaggaattcttggatagggttgccagcgtgtttgagacaattattttcactgctagtcaaagcatttatgcggagcaacttctcaatgttcttgatcccaaaagaaagttgttccgtcatcgtgtttatcgtgaatcttgtgtctatgtggagggaaactacatgaaggatctgacagtacttggacgtgacttaactcgcgtaatgattgttgacaattctccgcaggatttaaatgtaaagccgct

SEQ ID NO: 24733 - DNA, 2606 bp, Zea Mays
cattgacaaaaggtttcgccagcgccgagcctcatcatcagccacccgtccaccaccacccagcccatttctcgtccccaaaatttcgagtttcgaaaccaaaccaaacgaagcgacactgcacgtgtacgaacctacgacagctctctacttccctcgcgtcctctccatcgagagctgctcctgctcgtctcctcccacaccgcgcaattcgtcgggattcgggaaccctagcgccggatctccgcggcagcggcggaaatggcgaatcccctagcggggctgcaggaccacctcaagctcgcgcgggactacgcgctcgagggcctctacgacacctccatcatcttcttcgacggcgccatcgcccagatcaacaagcatctaactactttggacgatgctctgattcgtacgaaatggatgaactgcaagaaagcaatctctgaagaagtggaaattgtgaaacagttggatgctcaattaaagtcccttaaagaagctcctgggacaaggcggtcatcatcacctcctattcggtctaataaatcatttgttttccaaccgttggatgagtatccaacatcttcaccagcaccctttgatgatcctgatgtgtgggctccaccaagggatacaccaacccgaagaccaacaagaggtcaatctagtgcaaggaagtcctcccaagatggagcctgggcacgtggttcatcaaggactggaacacctagtcgaagcgcaaaacctaatgggattaaaggaggtgctgttaaatcaactgcctctaacagttctgtaaggaaagggaaacaaagttcaaacaaggctgattcaacgagtagtgatgctgaggaaggtaagtccaagaagggtcagtatgaagggccagatatggacttagctgcaatgcttgaaagggatgttctggattctactccaggagtaagatgggatgatgttgccggacttagtgaggccaaacgactcctcgaggaagcagttgtgcttcctctctggatgcctgaatattttcaggcgcatatcgatgggaatgatatggcatttttggtgctctaccatggacatagtctaagatatgcatagttactacgtactggttttttatacaactcttttatgtttatggctgtcaacatgatatggcatgaaactggtgtttcctttgtttggtgccactgacgttttcttgatgcttgtatctaggggtgccaatgggctctaaattttacactataaaatttaaggatcagatcgaattaggatcagactctatttctattcatttttgaactaaaatttatttagtgccctaagaaattaagaagcatttggatcacgatctattaccacccctacttgtatatgttttcttaattgccatactgatttggattatgctgttcttgaatgatcatgaacccaaccaatcttttctctcttgtagcctttttcatctggtctaaacttgatacatagtggctaattatgtccacttttccttatcagggtattcgtcgaccttggaaaggagttcttatgtttggtccaccaggcacgggaaagactcttttggcaaaggcagtggccaccgaatgtggaacaacattctttaatgtttcctctgcaacactggcctctaaatggcgtggcgagagtgagcgcatggtccgttgcttatttgatcttgcgagggcctatgctccaagtacaattttcattgatgaaattgactccttatgcacgtcgcgcggtgcctccggcgaacatgagtcgtcaagaagggtgaagtctgaacttctagtgcaaattgatggtgtaaacaatagctccaccactgatgatggccagccaaaaattgttatggttctggctgctacaaattttccatgggatattgatgaggcactgaggcggaggctggagaagcgtatttatattccacttccagattttgaaagtagaaaggcacttatcaacattaatcttagaacagttcagatagccgcagatgttaacatcgacgaggttgctcggaggacagaaggctatagtggagatgatctgacaaacgtttgccgcgatgcctcaatgaatggcatgaggcgcaagatagcaggcaagacccgcgacgagatcaagaacatgtcaaaggacgagatagccaaggacccggtggccatgtgcgactttgtggaggctctggtgaaggttcagaagagtgtctcgccttcagacatagagaagcatgagaagtggatggctgagtttgggtctgcctgagacctcggccatctgcttgggtcctgttcaaacattcgttttgtgtgggttgacacggcattccgtagcaatgatacggtgttacccgccggtggtcttgcttcatatagaccagaggcacgagctatcttgtctgtttccagtgatgctaggaattgagttcacgatcgtttcagttcttggtatatgcactttctgctgtcaaacgtatctcatcaagtagccgtggccgcctctatttccagatgctccgtgtttggttgaaggaatatcacaggaaccaaagttttagcgtgtttcaa

SEQ ID NO: 24734 - DNA, 2736 bp, Zea Mays
aaacaaacaaacaaaaacggtggtggggtttctgtttctttaagatttataggaagatagtgttaggcagcccttattggtgggcaggagtatattattgctcgaggtaggaggagagccaggggttgttagaacaagtccagtctagagagggagcgaaccaaaagggagaaataacaaaaaaagaatagagacacacacacacagctctgttcttcttattccaatcctctctcatcttgctggttcatccttgggatcggctctgtcgtcccctagctagttcgttcggtgctgtggtttctgccgctgtatccaagaactcttgctcttgctgagtctgggacttcagttcctcgcagagccaggctttacatatcttgggtgccgcacacagtatctatgcacctttgacaacaccaatctgattctgatgacaacaacagccactatctcccgtcatccttgcatcgatctgtcagctggcgtcgcctcgtgcttctgaagacgatggccacattcttctccacttccacgaaccagagggacctcgccggaggcggcggcgacatgtcgtcgttccaccactacgcctactcggacccaccagccggcggcctcatgcctttccccgccaccatcgtgtcgtcggaaggccacgtcgcgcacggcggtgacgacggcggcaggggcgcgttcgtggacgtgaacgcgagggacgggccgacgggcggcgccgagatgggcctgcagacgcagctgctcatggcgaacgccgcgtcggcggtgcagcaccaggggctgtcgcttagccttggcacgcagggggtgccggtgtctctttaccagtaccgccaggcggaggcaggcatggccgccgccgcctttctaagcccgaaccaggcgtcggtggcggcgaccaggagcgcgcagagcatctacgtccagaactccaggtacctcaaggccgcgagggagctgctggacgaggtggtcaacgtccaggacgcgatcaagcggaagggggacaagagccagcagggcaaggattccggcggcggcggcggtggcggcgagggcaaggacgccgagacgagcgacgagaaggctggcgagcacgaggggaactcctccgcgccggagctgtcgccgtcggagaggcaggacctccagaacaaagtgtcggcactgatggcgctgctggatcaggtggaccgcaagtacaggcactaccaccaccagatgcagatggtgatgtcgtccttcgacgcggtggccggcgccggcgcggcgaggccgtacacggcgctggcgctgcagaccatctcgcggcacttccggtcgctgcgcgacgccgtcggcgcgcaggtgcagtcgctgcggcggagcctgggcgagaaggacgggtccgcgcagggaggcgggctgccccggctgcgctacatcgaccagcagctgcggcagcagcgcgccatgcagcagttcggcatgatgcagcagccgcagcacgcctggcgcccgcagcgcggcctcccggagtccgccgtctccgtgctccgcgcctggctcttcgagcatttcctccacccgtacccgaaagattccgagaagctgatgctcgctaggcaaacaggcttgtctaggggtcaggtgtccaactggttcatcaacgcgcgcgttcgactgtggaagccgatgatcgaggagatgtacagggaagagttcggggcggagatggactcgcactcgtcgtcggagaacgcggcgggcaacaagggcaaggacgaggcgatatcctcggaggaccacgaggagttccagagcccgtcgagcgccgccgcggccgcagtgccactgccaggccacctcagcgcgttcaagtcggaggcgatcggtgtcatggacgccgccggcattggagcgagctccagcctcgacggcgccgtcatcggcccgtacgcgacgagcctcaacctcggcggcggcggcggcatcctgcaggaggccctcgcgcaccaccaccaccaccacggcggcgccgacgcgaggttcgtgcaggcgtacggcgacatggccggcttcggcggctacgacggcggcagcgtgtcgctgactctgggcctgcagcactgcaacgaggccggcgccggagccggccccgctgagccgcaggccctcctgtacggcagcgccggcgacttcgacttcatcagcggctccgaggacaggcagcggttcgggtcgtcgcagctgctgcacgattttgtggcgtgagcggctggactggacgtcgttggggaataacgtgcgcggacggcgtcagaagcctgggatggccggccggcgccgccgcgggtatacctaccaaccatatgatggccgtacgtcatggtacatggtctcaaattaaccagcaagggtaagcagctgtatatgatatgaggtgtggtataaagtaagtgtagggattattattggtattatttttggtagcttgaagattcgtctaatgatgattcaagtccggccagatatggtgtggtgttgttggacctcaagtgagtccatgtacacacaaatgtttcatgttttgtactgtaccagttgttcagttcagcgctaacaacaacgcagaaacattaagcatactactctgcttttctatacatatataaactcatgatttgaaccttattgtgacatctgatctgagacagatatggcagagaggccagc

SEQ ID NO: 24735 - DNA, 2079 bp, Zea Mays
gctcgcggacaaaagtgaaggtcaatctccacatgattcgtgcgttggtgctgcacgtgattggtaaagagagtatctaagatcacagaagatattctgtttgaacaacaagaaaactgtgacagtactgatgataacgaggaaggggctacaatttgtaaaatgctagagcatgccgctgagcctgagtttatacttgcgggcatgactccagagcagttgaagtgtttctcatcttatatagaaaagcaaaagattgttaagcaaaatgaagtatctgagaaggttgagaaggcccttgttgttgctggccttagttcaagggatgttacaccatttttgaaagtgagagtgattggccttgtcaataaacattcagcttccacatccagtaacaaggaagggctaataacaatttggaatccgactgagatgcagaaagataatcttgtggagggacaagcttattctgttatgggattggtaccttcgaactattgcaccgaaatcatgtacttgcatgctagaggatcatctacaacatggaagcccttagcatcagctcagactacagattttaaaccattctttacccctcgtagagcaattgaactcttgaaatttggtgaggtgccgatttcaagtgaatttgatattgcaggtcttattttatatgttggcaatacttatttatgtaacaacaagaaaaagcagtggctttttttaacagatggatctaaatttgtctctgggcaagggtgtgaagagcaagattgtcttctagctgttagcttttcgtccgcaaccactgatgaagactctacattatttagttacactctctctggaaatacagttggttttagtaatctggtcaaacgacagaaagacgagacgaggcaagtatgggtagctgaggcaacagagagctcaagctacactctttccaacgagattcctagaaaatctcacctaaaagaagctgcagttttggctgagagatgggcttctagatcttatcataaaattcaagagctaaaagaaagggttttatgtatagttggcaacgctggtgtctgaattataataaacgcaagatccttgcacaaacttcaaaaatcaacttgaagatgtacacatttgaagacacgaggcttcagggctgttttctaagtctgtgtataaagcctttttcagagggtcgattaactttgagccgtggaaaaggttatggagatcttgggcgccgcctaaatgcaaaacttttctctggctagccattaggaacaaatgttgaactgcagacagataggagaagagggctttctcacctagaggcctgccccctctgcgatcaagagcaggaaacagctcaacacatcctaacgagttgtgtttttgcaaggcttttttggcacaacattatggctcccttcggtatgggtacctcaccccgagtcagaatgaacttatcctttgcagatttgtggcgaaaagtgagcaacaatgtgcataaagagaagagaacaggaataaacaatgctattatcttggaggcctggtgcatttggcggcaaagaaatcgtacggtttttgaaggagatttgccagctgttagcaaggtgcagcaaagttttctagaagagctaacatgtttggtcttgactggggctcatcaccttagcattttagggataattgatactcttagagcggtcggattgggctctcttgatcatatgtaatttttgtttcagtttcgatgtggtgtgggtgatgatcttgctcagcaagatcctcatcttgtaggattttcttttctctctaatataaaatatgggacgcgttcgagaaaaaaaaacttcaagagctaaaagaaaggcttctatgtatagttggcgaccctggtgtctgaattataataaatggtgctgcccgccattttttttggagatgatgcaagattttgcatgggggttcttgccataactacatgtctacatcaatatttctcagtggtacaattagaagatcaacaacccacattggcacattgtatgcacaactttcagaacttcg

SEQ ID NO: 24736 - DNA, 1205 bp, Zea Mays
catacacatgtggcagaagcgctaaaagtaccaattcatatactgtttaccatgccatggacgccaactagtaaatttcctcatcccttttctcgtgtgaagcagcctgctggatatagaattggggtccaaagatcgatgttgttggattttgcttccttgatcttgcttccaattacgtgcctcctgaaccacttgtgaaatggcttcaagctggtgacaagcccatatatgttggttttggtagccttccagttcaagacccacaaaagatgactgaaattattgtcaaagcgctggaaattactggacagagaggtatcattaacaaaggctggggtggccttggaaccttggcagaaccaaaagattttgtatatctactagacaactgccctcatgactggctttttctgcaatgcaaagcagtggtgcatcatggtggcgctggaacaacagccgcaggtctcaaagcagcgtgtcctacgactattgtacctttctttggtgaccaacctttctggggcgaccgggtgcatgcaagagggctagggcctccgcctattccagttgatcagtttggtttgcagaagttggtggatgctataaagttcatgacgaaaccagtggtgaaagacaaggctgtagaggtggcgaaagccatggaatctgaagacggggtgacaggtgccgtcagggcattcctcagacacctgccttcgaaaaccgaggaaccgagcccaccgcaaccgtcaggctttcttgaattcttcttaggcccactaagtaaatgtttgggatgctcttagtgcagaacgcaatctgtcacggattggcgccttggcggcataccacaagagtttgccgtgatatcccatgcaaagaagctctggctcttcttttctttgtttccttttcctttcctgcgggtatttgtagtgtgcaaagagtggttgcttgtggtgtgcatggtctgcagcggatggcctgcgccctgtggtgcgtgtcattttgatgtttgccgtggagcaggcgacgatttcacgtccaacccgtacgttctgtatatttatgaaagaaagaaacagaggctaggttttccttgttctaatatggttaccgctaaatagctgatagcggctttgtaatggaaagtgagcgctatagcggacattgggttttaatagcagaatattaaaaataga

SEQ ID NO: 24737 - DNA, 1866 bp, Zea Mays
attttctagaggaagctaagaaacgtgatcataggatactagggaaatcacaggaactcttctttttccatgaacttaggtgttgagcccaaatatttacaatatgcaactttgggaaacttccggacatgctgcaaactacaaggagaacatgtttgtttttgagattgagaaacaggaatttgggcttaagccaatgaattgtcctggccactgtctaatgtttgctaatagggtccggtcatacagagagttgcctcttcgcatggctgatttcggagtgcttcatagaaatgagcttagtggtgcacttactggtttgacacgggttagaagattccagcaggatgatgctcatatcttctgcagagaggaccaaatcaaggacgaggttaaggctgttttggaattcatcaattatgtttacgagatatttggcttcaaatatgagttggagttgtctacgagaccagagaagtatctaggtgaaattgaaacttggaacaaagcagaacaacaattgacagaagctttgaatgagtttgggaagccgtggaagattaatgaaggggatggtgctttctacggtccaaaaattgatattggtgtgtttgatgcccttaagaggaaatttcaatgtgcaaccttacagctggattttcagctgcccattcggttcaagctgacttattctgctgaggatgaagcaaaaattgaaaggcctgtgatgatacacagggcaatcctaggttctgttgaaaggatgtttgccattcttttggagcattacaatggcaaatggcccttatggctaagccctcgccaggccattgtttgttcagtatcttctggttcagtggaatatgcgaaacaggttcttgccatgctacatgaagctgatttccatgttgatattgatgtgagtgacaggacaatacaaaagaaggtacgggaagcccaggtagctcaattcaactacattcttgtcgtaggcgcacaggaggccgagactggaaatgtctgcgttagggtaagagataatgccgacctggccacaatgagcgttgatggcctcatcacacgtttgagggaggaaatcgtagccttcaaatgattttgatgctgcataatttcctagcacttcgcaatcattgactgttcatttgtgattttgattgagttttcagggaacagtactgagttcctccaaggctccaagtgtattcttgttggtacggttggaagctactaagggcatatttagaagcacctagtttttaataaactggtttataaaaactgagatggttccaaacatatcggtttatatcctagtttttaataatctggtttataaaaactggatttctagtttcttaaaaattaagaagctagtctctcttagctaaaaccaatttatgaaaattaaggtagttctaaacatcataaaccaatttttttcttcataatccagtttctacaaactagagataaaaactaggttgcttctaaatagggtctaaacattgtctttttttattaattatatagatgtgaagttaaatgctacctatagtaaaaagttcctagtaaatactacctgtagtgtcaaaacagcttgttgtatttgactttgcatggtcttaaacatatatattgaccactaaattcttttgtacaatcttaaaatgatgagatcatatgcaacttacatgttcttaaactgttttttttggaaatattgatgtttgtatagttttaaaggtttgatgttatataagattttcctgaccgggaggaacatattagttttatgttatataaatttctttgtttcttttatttagaagctatcgtgtaccccct

SEQ ID NO: 24738 - DNA, 3556 bp, Zea Mays
ataagcccgtgtcacacgacagacacccaccgttcgcctgctttcgcatcgtcctcttggctggaagcgtccgcggctcggcgcaccgaatcccaaccaccggtagtgccgcatatacatcgccctgccgctcggcccggctcgcgacaagcaagctgatcacctgagcaagctcggtgaggccaagcagagcggcgctccagttccagccaggccccggagatatgcagatgcggcggtgagggccgggccggcagcagtggtgcctagctagaagcgtacgtaggggcgggcccagccatgtgggcgccgtcgcgggggtcgtcgtcggggagcgggcgaaggacctggcgccggcgcatcgcggactacctcgccgacgaccagaccgacgtgtcggacaatgagtccttcatcacggcgcacagcgacgagcacgccgccccggcgtccggcgccgggggaatgctgccggcgttcctcgcggaccagggcgacctcgtggaggtgatgctggagctggacgaggagtccatggtggtgcgcagcgtcacgcccaccgccgccgcgctgtgcgggcccacgtcgctgcccctgcccggcgcgcggagcctgagccggtgctcgtccacgtcgtcgcggattcgccggaagttcgcgtggctgcggtcgccgtcgccgcgccccccggccgcgaccgcggcgtccgaccagcaggtggtggtgcgggaggcggcgctggcggcccgcgagcggcgccgcgcccaggcccgcctggaccggtcgcggtccggggccaggcgcgcgctcaagggcctccggttcatcagccgcaccacgggctcctccgacgccgacgccggcgccggcgccgggctctggcgcggcgtggaggagcgcttcaacgcgctcgcgaccgacggcctcctcgcccgcgacgacttcggcgactgcatcgggatggtggactccaaggagttcgccgtgggcatcttcgacgcgctggcgcggcggcggcgccagaacctggagcggatcagcaaggacgagctctacgagttctggctgcaaatctccgaccagagcttcgacgcgcgcctccaaatcttcttcgacatggtggacaccaacgtggacggtaggatcacgagggaggaagtgcaagagctgatcgttctgagcgcgtcggcgaacaagctgtcaaaactcaaggagcaggctgaggagtacgcgtccctgatcatggaggagctcgatccggagaaccttggctacatagagctgtggcagctggaggcgctgctcctgcagcgcgacgcgtacatgacctacagccggccgatgagcagcggcagcgcggcgcagtggagccagggcctgagcggcggcgcgggcgcgggcgggcagccgtcggcgcagcagcagcagggcgtcgcgtcgcggtggcggcggtggagcccgcgtcgcgcggcggcgcgggcgcgcgtggcggcggcggagagctggcggcgcgcgtgggtgctggcgctgtgggtcgcggccatggcggcgctgttcgcgtggcggttcgtgcagtaccggcggtcggcggcgttccgggtgatggggtactgcctccccacggccaagggcgccgccgagacgctcaagctcaacatggcgctcgtgctcctccccgtgtgccgcaacacgctgacgtggctccgctccacctgggcgcgcttcttcgtccccttcgacgacagcatcgccttccacaagatcatcgcgacggcgatcgcgctgggcatctgcctgcacgcggggaaccacctggcgtgcgacttcccgcggctgatcgcgtcggcgcccgaggagtaccgtctggtggcgcgcttcttcgggcgggacaggcccagctaccgcgggctcctggcgggcgcggagggcgtgacggggatcgtcatggtcacgctcatggccgtgtccttcaccctggccacgcggccgttccggaagcgggaggaggccagcagggacaagaagaaggcggcggcctgcgcatgcaggggcgtcccgctcgccggcttcaacgccttctggtactcgcaccacctgctcatcgtcgtctacctcctgctcctcgtccacggctggttcatgttcctcgtcgacaagtggtaccagaggacgacgtggatgtacatttctgtgccgctggcgctttacgtcggggaacggacgctacgggccttccgatccaaggcctacgcagtcaagattctcaaggtgtgcctcctgccggggaacgtcctgaccgttaccatgtcgaagccctacgggttccgctacaggagcgggcagtacatattcctccagtgtccaacaatctccccgttcgagtggcaccctttctccatcacctcagctcccggagacgactgcgtcagcgtccacgtccagaccaggggcgactggacacaggagctcaagcgcatcttcgtcgagaactacttcacgccgtgcgtgcccagacgggctgccttcggggacctaggcgcggtggaccacaagaccaagagcccgccgaggttgctggtcgacggcccctacggcgcccccgcgcaggacttcaggaactacgacgtgctgctcctcgtcggcctcgggatcggcgccacgcccttcatcagcatcctcagagacctcctcaacaacatcaagctggccgacgagctcatggacctggcaatggagaccggccgggccgaggacagcgccagcaacctgagcgcgtcgacggcgagcggcggcggcaacaagaggagggcgtaccgaacgacctgcgcccacttctactgggtcacgagggagcctgggtcgttcgagtggttcaagggggtgatgaacgaggtcgccgagatggacaataagggtgtcattgagctgcacaactacctgacaagcgtgtacgaggagcgagacgcgaggacgactctgctgtccatggtgcaggccctcaaccacgccaagcatggcgtcgacattgtgtcagggacaagggtcaggacacattttgcaaggcctaactggaaagaagtatttacgaggatagcgtccaagcacccaaattctacagtcggggtattttactgtgggagacctacacttgccaaagaactgaagaaactgtcacttgacatgagccacagaacgggaacccgatttgatttccacaaggagtacttctgatggaaaatacaagtgcccctgatttcttttagtactagaagatacagataaaaaaattcacaaattttgcgtagaagcgaactgatcctctttcacagtatgtaaatgtacatggtataaagcagagagtagttagaaacgtttttttttctttcttaaccaaatgggagggtgaaaatatgtcctgcgctttcagacagccattggttactgcagatataactgtatagatcatatcattgtatgctaagcatgcaagagacttgaggccaacaatctgaatgcgtatcactcaattaactggtcgtgtttactttattacagc

SEQ ID NO: 24739 - DNA, 2005 bp, Zea Mays
ggcggcccaagcttcatcgatcgccgatcatcttctagctagcagctagcttgttattagctcatcggcgatggactacgtggtcgcccggatgcaattgcaacaagcagcagtgccgccgcctgttcactccatcgccgaccaccgtcctccgcctgtgtcgcagaggacgcggggcagcgcgacgatgcaacgacagcggcgtgaggcactcgaacaggaggtggcagagctgaagcagcagctatccaacgagcagacggtgcaccagatcctggagcgcgccctgcagcccagcagctccatggccctcgccaacatccccgccttcatccccaccaaggccaaggagctgctcgcggagctgctgctggtggaggaagagatcgccaggctggaggaccagataaaaaggatgaagaagtccgccgccacgcagcagcagcagcagcagcagacggagcactgcaagtccatgttcttcatcagccaggccatggacggcgaggcgtacctcagcacggtggtgaacaacaagaggcattccctggcgtcgtcgtcagatgggcatgcggtgttggagaagaagatcgcccagcacgagctgcccatcaccaagaagagccccacggtgatagcaaagaggagggcgagagaccagcagcagccgcccaacaagctgtcggagaggatcctcaagtgcctggtgtgcatcttcatgcggctgctccggtcgtcccgggcgtccgagtccgccgcgggcaacctcggcggcttcaggatggacatggggctcgtcaacgtggctgcagctgcggcggccaaggagaaggagaggggccagcaggatcactacggcatcttcggcatccaggactccatggtgagggacatcgggccctacaagaacctcgtcaggttcaccacctcggctggctccggctccggctccggctccggctccctggacctccacctcctcagcagagggttctcggcgtcgcccctggtaagcaaactgagggagatgctggaggcgctgcagcaggtggatgtgcgctccttgaatcaccaccagaggctggcgttctggctcaacatctacaacacatgcatcatgcacggcattctgcagcatggtttgccctcaaactcggacaagttactcgcactcaagaacaaggcaacaatcaacgtgtcagggcaaactttcaatgcgttggtgattgagaattttatcttgaggcagccgtcaagtgtgaaacaggagttgtggcaatgcgacgtggatgtggaagaagaacaggcggtgagggaggtttatgggctcaagacttcagaacccaacattctctttgcactctgctgcggcatcagatcatcgccagcacttcgcatctacaaagcagatcgtgttcttgtggatctggacaaggcaaagcttgagtacctgcaggcatcgctggtggtgacatccaccaggaggctcatgatcccaagcctcctccactccaacatgcatgactttgcaaaggacacggagtcgctgcttcgatggatctgcgagcagctgcccacgtcctggtccatcaggaaatccatggtggattgcctcgccgccattaccaacaacaacaacaagctggaggaggtggtcgtggatgtcattcccttggactacgacttccaatacctgctgcccatgtgatcaactcatcatgcatcataaatattattaattgcccattccattaattccatgcatggattattattctgtaagttaactgatacagatggagttattgtgtagtcttgtctatctcattagctactaggatggactccaacaaggaaactattcaaatgttgcttgctggtgatcattatattgtagatttctagtgattacaaagtttcataactcttcaatacctacaactttcatgttggtggttttttttctttcaaggtcattttcaaaattcaaattttaattattttt

SEQ ID NO: 24740 - DNA, 153 bp, Zea Mays
accgttattttcctaacttgataatccacacaaacagtgatgctctccgattcaatcatttcatcgaacatctggcacttgtcgcacggcttgcctggcctcaccaatatgaaattcctcacatctcgcacattacgcacacacatatacata

SEQ ID NO: 24741 - DNA, 6579 bp, Zea Mays
cgacactcccgaaacccagcccaggccgccgccgccgccatggcctccgacgacggcgacaaggacatcctcctcctcgtccaccaggtcccactcgacatggaggatgtgccagcgccccgcctggcgcacctcctcgccccgctccaccgcgcgcctccaccgcccccgcctccccccttccgctcgccgcccccgccccaggccgccgcttccgccgagcaccgcctctcattccgcggctggctcggcatcccccgccactgggacgactgggtcgccaagctccggcccctccacgcccgcctctggcgccgcctcggcatccacgacgccgtccttgcctccaccctccgcttcaagcgcgacgcctccgccatcctccatctcgcctccttctggtcccctgccaccgccaccttcgccttcccctggggggaggccactgtcaccctccaggacgtcgccctcctcgccggcttccccgccctcggcgccccggccacggccccgctcccgccccagtggcgccccgacgaggccgccctcaatggcgtgcgcctcggcttcaaccgcagcgcctgcaagaaggcgcaccactccgcctgggtaaaacacttcctcaccgacgataacgcggacacagtcttcgagcacgccgccttcctcgcgctctggctcacgcgcttcgtcctcccgggtcatccggagtccaccatgcgccaggccgtcttccccatcgccgtccgcctcgcgcgcggggaccgcgttgccctcgcgcccgccgtccttgcctcgatctaccgggacctccgcgagatcaaggccttcctcatcgccacgggcgccgccgccaccaccggcaacgccgatatgatctcctccttatccgtctactcgccactctacattcttcagctctggatgtgggagcgcttccctgccctcaggccagcaaaggtgaacccactcgttgatggcgatccgcttgccgctcggtggcatgatctgagcaggaagctgaacccggcgcagatacgtgaggccctcagcacaggatgcaactttgtgtggcagccttatgtcagctccatggagcacactgggtgggttcacagcagtgatctagccgaggatgatgaactggcatcgctcgcacaatttttgcacccctgtgagctcgtagggatggattgcattgagcagtacctcccgcaccgtgttgccagacagtttggactggaccaagatgtgcctgcagatgttcaccgtgccaaccaggattgggcgattgcttggcagacctaccagctggaaggtaagaatgtggctttcttcatccctcactctgagcctgggatcacaacacggtatgcacagtggtggaggcagcaacttctgccttctggcattgatgctgctacagcaagtgctccagtagagtggaagacttccaagcgcaaggtgaaaaagacaccagcggccatggaagctgaagctgagaaggagcgtaagatgaagaaggcccgggtctctcctacttatactgataaaaagcgcaaacttgaagagttgtatgatgctaagttgtcggattggcttccaactgcaaggaatgagattagtgacaccactagtgatatggaatcggaggaggccttattgcctaatgttggaactacaaatgatgatattgtgctactcatgccaaggaagcagacaacgactgcacctgtaagggcattgatggataatgacatgatcctggctctaggagagagaggaaactttatggttgatgagcctccagacatccaaagtgaacctgaagctgttgtccctgcaacgctggatgaggaaatagttaaaattcctgaggttatttctcttgatattccagataagccagaagaaggagccactgcagtaatggaggagcagaaggaagctactagtgtatctgatagatctgaagaagctagtgctctggtcataggagaggtagaagaaaaggttgccatagagggagctatttgtgttacagggatgaatccatcgggaaacaactcagcaactgtaatggaggcagatgaaagaaatgcagttccaaaagaatttggaagggctgccaaggaagtaattgaagctgtgccccagagccaacatgaagttaatgcaggtgttataaacaattctcatgatgtggtggctttacctgaggaggcccatccagttcagcccacaaataattctggtggatgtcccgtggtatcttgcataatggaagacagtaaagttgctggagattcgggcaaaattgattatgaatatttttgtgattttgttgaggaacagagggagattccttgtgtacaagagatttctggagaaaacagtcgaatgggtgagaaagagagagaagaaacctcccatgaatctcctcaactagagattgtagaatgtgtgcaagacatcgttcttagggaaacagactatgatgttaatcaaaagatagtttatccagcagtggaggatgtagcaacttccgatagtatgagtacatctcttctgggtgttcctgaaccagaaaatgcagaactcaataaacatccttatctagcaattaaagatgaggaagatatacccatggaagctgcacgaggagaagtagcagaaatggaacaaattagtacttctgcaaagggaggtgccgaggagcatggggacttttctgaacttgatcacatgggccgagcagatgctaaattgcatttacacttaaattctgaagtgcctgagaaaattgatgaaatagagtgtaaagaagtcgctggcactatgagactaactgggagatattctgatcagaagcttggagatgtgcctgaagttgggtacacagaagatgaaaacattagggggctggtagtgaacacaagtgataggaaaccttcagaagtctctcaagtcgagcctgcaaaactggaacattctaaggatctggtgaaagaggaaacagacaaatccgaaaatattcctggattagaatgtataggattggaggaaactcgtggagatttgatggaagagtgtgcaaataccaagtctgataatgttcccgaattagaaaatacaggattaggaggaactcatgggccaatagaggatactgatggtagactgaaggaaattcatgatgtcaatgcagaactggataaacacaatgtgcatgagagcgatattgatagatccgaggacatcatgcaaatcgatccactaacacaggataaagctacgtggctggcgaaggaagaaactgaagataaaactacaaaagttcaagaagtaaagtatgaacaattaagaaatgagccaccgattcaagaggattccaaggaaaagccctgtgctgatagcaaggatctatcagagaatgttgtagttcagtccaaagaggtagataaattgaaacaagcaggagagggttgccaggcgttaatggagaaagacatggagaatgctagtggtgcttttgtactagaacagacagaagatggacacagaaaatcattgatagagacaagtataaataacgatagtgaaattactctagtcgagcagttggatggacaaagtgagagtcttacgaggacaggtactgtggaaattcatggagaaaccattaaagcacaagacaatgagttctataaggatgtggtagaagattcaaatgactcaaccaatgaaaaggatgtggtagaagattcaaacgaatcaatcaatgctaagatgccatgtagttcagctactgtacagttaaaagaagataagatggaagtttttcatgaaggcaagatggaggagccatgtgctcaggatgctgaactgagtaatcagagggaaccatcatctgatgcaactgctatggagattgagtggctctggaacaggacagcagaatcatatgcaaaaacatggaggcaacaacagtggaaggcagccacacactggatagtggactaagttccgatctagccaaggttaatgaaactcatgctgcacgggaaattaaaaaccaggaagttttggatgtggacatgaaagtagcaatgagtgtttgtggtgaatatcaaattaactcaattggtatggaggatgtcaaatctaccaaaggatcacagaaccaagaatgtttggaccagaaagaagaccatataatggaggaaagagtggagtgtgaagtaagagaaggaagtggagtatcctatgaagaggcatgtgagctcggtggtggtagagtgaaagcctctggagttgcagtggatgttagtggtccagtgctaaacaaggaggcctgcaacacagaggagttgcaggcaagggaggataagaagcgtcatggagttgggcatgtgaatgagaagagggttttggaagaaactagtatgattgatactggtgaattgaaatctgattcgactgttatggagattagcatggctgggttaagacaaggaacactcaaccaatgtgcttcaagttcggagaaggaagaagcagtgcaggagaagcatgatcagggattggtagatgaaaacacaaacagaggttcagctgacaatgatgcacttgaatgtggtggagtgaatcctgatgtggccataacaatgtttcatgaaactattcttacaacagaagctgtcaatatagctgggtctaaaatttcgtctgagaaccagcaaaaggaagcaccctttgaagtacactctataacagaagtcgaaggttctgaatcaaatgaatcatcaagaaaggagcctgaaggagctcttgctcttccacaagagcctggcaacctggtaaaagttaaacaagaaagtttggagaatgaaaccgagatgtccatttttagggagaatgacaaagtttctggaaaagatcaggcatcagcagagtttataattgatccttcaaatacggatgaacggagggagaatgatattgggcggcccgatgaatcagcaaaaggctgtgaaaggttaacttctgattctataaacacagttcactccaaatttggcaagtctagtaatgaagaggataagagaacacagaacaccaggtctacggatccaaaagatataaaggaatcattgggtagaattcgtgccgaaccatcaaacagggtacacacaaccagtgttgggtattactctcagcatgcagctcatgatccgatttcatcttgtaaggagatcaaagtgcctttgcgagacggtgcaagggattctggaagggaccgtgcactggagttagtggttacaagtccacgagaagagactcctcgatggaggcaagaacagtacgcacttcagattttagaagacgttcaaaattcccgaattgctgagagatctaggatggagatggagatcagagtactgaaggcacaagtcagtagcatggagagacaagtgatgaacctggatcacttctctgaggtcaagtccagatctagtttgaaccaacaaatggtacatttgcacaaaccatacttctgaaactgtaatgggtttaaattttttgaaataaacacaaatccatgcaagttctctgtcccatcatcgactacctacctcctggaagtcggattgttttactcttaggttattccgaacctcctcccattatactgaatgattggatgcatgacggtgctagggcatgtctgggttatgcctgaatcctgatgacatgactaaactgcccaaggtgtcactagctcaaatcgatggtagttctgctgtctatcttttagattgacgataagctcggataatttggaacttctgtgcaccacatataaggaatcagttcatttcacagggaaatcggaaaaaaatatcagcattccaaaggggtctaggtcttggatggtcagccatttttattatgtacaaatgcagtagaagatgaggaacttcatagtatgtttatgaactcgcaactacttagaccgcatattagtgtgaagcgagtctcattttgtttctagaagtgaagttgaattccattagttgtcagcattcacctgttctataggagctgccgtccagactccaggacttgtgaaagaatataaggggtaagatcgtcaatgcacatggccatacaatggcagaagagcaatgaggacacaagattgaatttaaaatggggaactggcaacaaatcgaactactggccgtgtttttttatataaaaaactggctgttgagtgttgacggcaaacgggagaagcccaatgtttcgattggcagaacggcaaaattctggcctgctggctgatttcgacgcaccaaagccaacgttccttgcagtcttcctttcatgtagaaattctactctacctttttgaactaatctccttgtcctattttctttcttgaactctaaaaccatacattttagcctccaaattagggatggttcatgattttttattcagatgtaaaatttgtggtcttctttcttccattgtgaataaatatgatataaaagttgtcatgcaaatccata

SEQ ID NO: 24742 - DNA, 1920 bp, Zea Mays
cgcagcccaacacccgcatcaaaacacgcacctcggctcctcccctccccaccaggcaccaaggtcgccaccgccaccgctgccccaaagtatcgcacccccaaagccccgctccctcaccttctggaaccttcctcgcatggccccgcccccctccatgcctgccgcctccgatcgcgccggccctggccgcgacgcgggcgactcgtcctcccttcgcctccgccgcgccccctcagccgacgccggcgaccttgccggcgattcctcggtaggcttgcgggagaacggcgagccgcaaccgccgacgaatccgccgccgcaggagcagcagcagcagcacgagatgctatactaccgcgcgtcggcgcccgcccaccgccgcgtcaaggagagccccctcagctctgacgccatcttccggcagagccatgctggtcttctgaatctatgcattgttgttctgatcgcagtgaacagcagactcattattgagaatttaatgaagtatggcctgttgataagagctggattttggtttagtgcaagatcgctgggtgactggccccttctaatgtgctgcctcactctaccagttttcccactagttgcactcatggctgagaagctgatcacaagaaagctcattggtgaacatgtggttattctactccatatcattattacaacatctgccattgtctatccagttgttgtgactcttaagtgtgactcagcagtactatctggatttgtgctaatgtttcttgcgagcatcatgtggatgaagcttgtctcttatgcacatacaaattatgatataagggtattgtccaaaagtactgagaagggtgctgcatatggaaattatgtcgatcctgagaatatgaaagatccaacctttaaaagtctagtgtacttcatgttggccccaacactttgttaccaggcttgatgggcttcataattgagcaatatataaacccaattgtgaagaattccaaacatccactgaaagggaattttttgaatgctatagaaagagtcttaaaactctcagtgccaacattatatgtatggctttgcatgttctattgcttttttcatttatggctgaacattgtagctgaactcctctgtttcggtgaccgtgaattctataaggactggtggaatgccaaaactgttgaagagtactggaggatgtggaacatgcctgttcataagtggatcatcagacacatatattttccatgtataaggaaaggcttttccaggggtgtagctattctaatctcgtttctggtttcagctgtattccatgagatatgtattgcggtgccgtgccacattttcaaattctgggcattttctgggatcatgtttcagataccgttggtattcttgacaagatatctccatgctacgttcaagcatgtaatggtgggcaacatgatattttggttcttcagtatagtcggacagccgatgtgtgtccttctatactaccatgacgtcatgaacaggcaggcccaggcaagtagatagttcggcagagacatgtacttcaacatcgaccatcagaagcagactggagcgacgcggcaggaagcagcagtagcccctcacttgccattgtttaccatcagctagcagctggtcagcctgaaaatgcttctattccaggcggccgtgctgggatgcagcgtgtacattaccagcgatgcaacgtcaacggttaccaagcgcggataagcagtgctcgtggcatgtgaactctgtacacattgaagtctatatgtccgcggtgctgtgtgcataatgtcgtggtagatgtaatatgtacaatgtatgccacgacttaagaggtcaaaatgaggctcacgtcttgggatggagggagaacgactttcaaagaac

SEQ ID NO: 24743 - DNA, 2420 bp, Zea Mays
tccacactgactccacagtccacaccaccaccacacccaggcttccacttgccgccgcgcccgcgcctccccctcattttctccccctccactgctttgcgcctacgcatcgccgccccgcctctagtcctctgtcctcctcttcctactgtaaaccacctcgtccctatccgcggcaaccgttcaccgcgccgcgaggcctgctgatccgaccgaccttccaccgtcatggctcccctgcgccgcgcgtctcgcctccttcgatcagccgtctgccggctgaggtctccagcgccggctcgggccttctccagcgccgcggcgaccgagacgggtgccgtgatcgccgccgctgccgtggcggtggccagctccgggctcgggctgtggctgaaaccgccgtcgcttgccgactccggcgaggcgcccggcgaccagatctcggtcgcctgtgccggcgccacggaggcgcgggaggagaaggggtggttcctgttcgcagactcatttcgtagaagggtcttcttcaactacgagaagaggatacggcttctcagtcctcctgagaagatttttgagtactttgcgtctgtgaggaatcgagaaggggaagtttacatgttgcctgctgacttgatgagagcagtagtccctgtttttcctccatcagagtccacggtagttcgtgaaggaagattaaggggggagcggagccctggagaattgcactgtgctccatcagagttctttatgcagttcgacacaaataatgatggcctcatctcctttgctgagtacattttttttgtgacattgctcagcattcatgagtcaaatttcactgtggccttcaaaatgttcgacattgaccacagtgggtgagttcttatcctaccgttgctctaagtcttcagaataggttccccgaccctgctgaaacacatctgttgaccagaattttctcaacctgtacacttctatttggttttgataaacgattaaaataaatttgatgttttgagaggaaatttagttcttcaagtcctgtttgcttcagtttgaaatttcttttcctgtgtaaacatatgttgtttagtaatgctgataaaggtatgtcgttctgtactcatgcataaacaagaggacagttaatatggtcttgtttgtgttgtattgttgtttacctgtgatcattgcatgcagttaatttatctcgccaagaaaaaagacctgctcgttatgagcatgttcaatcatctgacttgtttgttgatggtaaaagaaggggtgatagacagagaagagtttaagaaaataatggcactgatgcggtcctttaacagacaagggtcgactcataaggatggtttacgtattggacttaaagttggcaagcctgtggaaaatggtggggtggtcgagtacttctttgggagtgatgggaatgaacctctacactttgacaagttttctaaaattttgaaggaattgcatgatgagattattcaactggagttcagtcattatgatgtcaaatcgtctaaaacaataccagcaaaggattttgcattgtccatggttgcttctgctgacatgaaccatatcaacaagctgcttgatagagttgatagtttggtcaaggagccagatctgaaggacatacgcatcacctttgaggagtttaaggcatttgctgatttgcgacgaagattggagccactgtcgatggctatctttgcttacggtaaattgaatgggttattgacgaaggaggatctaaaacgtgcagcgcaacatgtttgcggggtcgacttaacagatagagtagtagacatcattttccatgtgttcgacacaaatcaggatgggaacttgagcccagaagagttcttaagagcgttacaaagaagagaaactgatattcgtgaaccaacaataccaggtccattggggttcttgtcttgctggttcagtggtaggaagtgttcttcactaaaacatgtggttatctgattgagcccctatttgatcctcacggcgcagaaggtaatcaccaagcagtgcattgctgatcgttacaacggacttcactgtatgtcgtcttggtggccgaagcttgactagcagtaacagctctaattgtaaatcgtgtcttctgtagccctaggactgagtgatatacatcgttattctcacgtgtaaattaaaccccatatggccatatggcttcaatatatgaaacattgtcatttagctttatttttagttgaaaacgtgactcacttttgccggaaccgtagcgttagagtgccaaacagaccaaccaggtagcaggcaacaatcagccactaacgtcaagacaaaagatttgtagtttttctttcttttttgcgagctgtgtgaatctctcttataaaacc

SEQ ID NO: 24744 - DNA, 2919 bp, Zea Mays
attccgactccgacgcccgcccgccgcaccaccagcaccaggtactactcagtagacagactagacagtaggtcacacaggctgacaggcaggcgagtccaaggccaggcggccaggcggactaggtggggcccccacacgcggcactgcggcaggatactggtcggcggccttgtgcctggacagttattctctccctcgtcgacggccgtgtcccgcttgatttcgatcggcagctggagagaatcggttcgattccccgtctgccgcagtgcctcctttcctttcctttggcttaggctcggctcgttccttcgctcgtcgtattttttctccaccacttccttcatttttttttctttctccctccctacacggccactaccagtccaccacaaaccacgtccccgccgtcgtcgtcgcgcttcccctacgcgcgccccgtcgcgtctcggtgctgctgttgggtgcgcccgcgcgttgccgtgaagggtgaagctgcttccgcgcgccgccgccgccacctgccccgcgtgggttgcaagtcaagcagcaggctgggacggggccggagccggagggggcgggcgaagcgggataagggcggccgcggcacgcgcgtgagcggcacaaccgaagcaggctgcgtttagttggactgcggccggggatcgctcgcgtcgcgtcggaggaggatgtctcagacaggggaggcgcaggtgccgctgttgcagactcaggaggcggacgccgagtggagctccaagccgcgccgcattgctctcttcgtcgagccgtcgccctttgcttacatttccggttacaagaaccggtttcagaacttcatcaagcatctacgagagatgggcgatgaggtactggtggtgactacacacaagggagcccctgaggagttccatggagcaaaggtcattggctcgtggagctttccatgtcctctgtaccaaaatgttccactctcgctggcattgagccccagaatattttctgaggtgaataaattcaagccggacataatccatgccacctcacctggaattatggttctcggcgctctggctatatcaaagatgatatcagttccaatggtgatgtcttatcacacacatcttccagcgtacataccgaggtacaatttaaattggttacttgagcccacgtggagttttataagatgcctccacagatcagcagatcttactctagttccttcggtagctattgctgaagacttcgaaaccgctaaagtagtaccagcaaacagaatacggctttggaataagggtgtagattctgaaagctttcatactaaatatcggaggcatgaaatgcgtgtcagattgagtggtggtgaaccagaaaagccattggtaatacatgtgggtcgttttggacgtgaaaaaaatttggattttctgaaaagggttatggagaggctcccaggagcaaggattgcctttgttggagacgggccatacaggtgcaccattcctcagtcgttagctatatgttttttttagtatgatgcacacctgatgagatttttatgtatgttaaccacatattagtacttacatgctgtcaaaatggctttatctgtgtcacatgcctgctaaatacccttctgtaaacaatttgttttaaatcacaagtgaacatacataatttcaatcatgggtttggtagtgtttctagtcctaccagggatctgccgaagggagtatgggtgaggggaggagcaggccgggctacgacctggaggtggtgctggtggctgcctcttgggcgccatagtcgcagggaacggcgcactgggatgtgtattccagctcccgtgaggaagctggcagaagatatctgctattgcttgcctttcttgattacaaagtcctaattatataggcctaaggccaaccgactattccacaatactaggagataaaagatttatccaactactccataatattaggagataaactgctaagacttatccaactaaactgattacttatctgatctcctgcgcctattttggtgggtctagtcgccttttcgtagaccaggccggtcataacagggttggcctgagaattcatttttccaatagctggccataattgttcaatgctggacagttttacacgatgtacagtagttataatgcactaaagtacagccacaccacacatgtcgtagcagcaccatcgacaactaacttttactttggatgtttggtcatctgtttgaccattgcaatggtttgatcttcaaactagaaatatttacattggacatgcaggtccgagttggaaaaaatgttcacgggcatgcctgcagtttttaccggaatgctccaaggtgaggagctctcacaagcgtacgccagtggagatgtatttgcaatgccttcagaatccgagaccctcgggcaagtagtgctggagtccatggcttctggagtcccagtcgttgctgctcgtgctggagggatacctgatataatacccaaggacaaggaggggaaaccattggaatggctgccagagaagagatggagaagtgtgactggaggacagcctcgaagaaaatccgcaacgagcactacagcaccgcgatatcgtactggcggaagaagatgggcaagactaaccagacctccttgtttcaggattcttctgtcgctgccctctccaactagttgctgttaataactaaagaatttgtacattgtacccaaacagcttgcgagttttgtgtggctagctgcattcaaatgtccacagtctgactgactacggcttgtattcgattcatgtacatttagacagcacttaagattgccgatctgctaactcagaaggtttggcacaaatgctccgataattttgacgtact

SEQ ID NO: 24745 - DNA, 1057 bp, Zea Mays
gcaggggtcgcgtcgcgtgggggaaacgccgccgaaaaccactgggtgcccgctctcgctcggcacgtcccgcgcgcgcccacgcccacgcccacgcccacgactggtcacaagcgctagccagcgttcttcacgcgcctcgcgcctgcctgcagccgcaggggaatcgatcgtggcaagggcttgcagtcgcagctactggtagcagagcgatggcggccgcggcgagggtgtcggaggtgaaggccgagggcctcctgcggggcgcgtgcgcggcgctggccgcggcggccgcgctgctggtggggctcagcacgcagacggagacggtgctgctcgtcaggaagaaggccaccgtcaaggacgtccaggccctctgggtgctggccatggcggccgcggcagcggcgggctaccacctgctgcagctgctcaagtgcctctacctcggccgcgtcggcggcgcgcgcccctgccgccggagcagcagggctctggcctggacatgcctcctgctcgacaaggcgtgcgtggtcgcgctggacggcgcgcacgcggtgcagtggaccaagctctgcaacatctacacgcgcttctgcgagcaggtcgccggcagcctcgtgctcgggatgctggccgccgtcggcaccgccgtcctctcggccgcctccgcgcgcaacgtcttccgccactactcgtcgttggagacctacgccgcgcactaggctcgcggcccaaggcgtcgtcagctgggccgggtgcgccactcctctaaaacactgggccgtaacgaatttcaggcccagatgaagggtgacctgggctattaaagctggagctagtagagttctactccagagtgtactcctgcctacagtcctactgctctctccctccctctcgaagaggtgtgtacttttatttttcttttgcttctgttgcatttgatacattagtgaagacatgagtatgtacgttcgtcagtgtattttcttagatctttcctgtagactacattgcagctaaggaataaaaaaaccagcaattgctgcgcact

SEQ ID NO: 24746 - DNA, 751 bp, Zea Mays
atacgatggttggtggtgttgatcgatcaagcaatgtacgggacaggctgctgaggccggaagtgatcgctgagccggagatcaccgtgacggagcgaacggtggaggacgagtgcctgatcctggcgagcgacgggatgtgggacgtgatcagcaacgacatcgcctgcaacgtggcccgccaatgcctggaggacgggaacccgcctcccgccgaccccactgcgggaggaggaggaggagctccggccgccggcgtagtcgtcgtcgccgcccgcgaggccgagccccggtgcctccgcgccgcctcgctcctggccaggctcgccatcggcagggagacacaggataacgtcagcatcgtcgtcgtcgacctcaagcacagggactgagtcagtgagtgagtggtggtatccggtttctgatcctgcagcgcatcagcgtaatcgatctagggctgagctgaactgatactgtgaggaggtgatcgtctagatcgtctagacctttgacatttccttggttctttcgattctaagatataagatttgtagcctgtttcttttctttcggtcgaaatgtatgtgtggagagaaagaaagtggatggaagatttgccgtcctcaactgaaggtggggggaaaaaacggaggacaaaaggaacaatgaaaaagagagcaattgtacagagtatgacaacatgatgctacatttatgtgcattattaataccaacttgtttccgttttctt

SEQ ID NO: 24747 - DNA, 1477 bp, Zea Mays
aacacattataatcctcagtttactcccaaagttgtgccaatatttgacatgtttactcggtgtattttcacaggtacaatattaggtgtctagtggagagcttctccatacatggcatgcacactatcgtgctgttaggtgcctcgggctgtatgactatttgcttgtctcagggtcagaggatgggactatcaaagtttgggatctcatcacggtgcttgatgagcaatcaaggctggaggtccagacaccatatttgtatagtttcagtcagcatgcactgcctgtaactgatattgcttgttttcttggagcaatcgctatatcttcttctgaggatcgaacctgcaaaatttggagtttatctgagggtaggatgctgagaagcatttcatttcctactagcattgattctatagcactagacccaagaagtcatattttctatgctggtggtagagatggaaaaatatatgttactgctatgggtgttgatctcagttttcatggtagggatgagtcatctattctgggtgcattggatgaccacagcaaggcagtaacaagcttagcatcaagcagagatggacttctacttgtctctggatctgaggatggtaatgttcgggtgtgggataccagatgtcagcaagttacccgaaaattcaaacactcccaaggtccagtaaccaatgttcttattgtaacgccacaacgagtaaatctgccaccgctacaaccattacgcaaagttcggtctgcaaatggggaggctgaacggcaggcagtacttcttcatcggcctgaaaatgatgtcccaattcctggaaataagaccttcatttttatggagcgctacttggatgagcttcagaagcatggtggttcatccaggttatttgattttgggccgaatgctcagaatggcactccaaaccaacagggaacagaatggagagatagatacttggagttgcaggatctctttgtacatgaggtcctccatcagatgccatcctcgaggaacccatgatgcacatgctttggatatcgatcatttgtggtgtcgaaacagtgatggttgccattcgggctacaaacgatgtagatgagttctttggagtaattcaactgatggtgctttcggctgcgaggaacttatcagattctgaactaaaaccactagaatcggtgccagcagtcacttggaactggttctcgtttgtgtactagtctagagaaacgctaaaaatcaggtttctcttgattctagttctaattttaaggatacagtgagcttgctacataaagttattttgatttcatagagaaaatgttttgttctcaggggaatctgaattttgaaagttttctactagaatctaagatttgatacgttcagggttaaccataccaattaaggactaaaaagtgctagttagcggtatcggattttcgctggaaaaccgctgtttt

SEQ ID NO: 24748 - DNA, 1855 bp, Zea Mays
cccatcttttatcgagtccaggccagcgaccgcgtttccgccttctcctccccttccacctccgatggccacaacggcgacaacgatggcgccggtgacggcgccggtggccacagccaacctcgaacctacaccaacacctctgcatccacgtcctgccgcgccacctcatctccgggcgctttccaccttggcccccgtcaagtcagaggctcctcccaccccctcgtcttctaccgccatcaccgccgcagccggagcggaggatccatcctacatcatcaccgtccctagttattcagcgtggttctcgttcgactccatccacgacacggagcgccgcctcctgccggagttcttcgtgggggaggccgccgcggcgtcagggtgccggggcccgcacgcgtacaagtactaccgcgactccctgatacggaggttccgggcgcggccgggtcgacggctcacgctcacggaggctcggaggggccttgttggcgacgtcggctcagtccgccgcgtcttcgatttccttgaggaatgggggcttatcaactacggtgctttgccatcggggtcaaagcaagctaaagagaagagggaagaggctgcacaacagtcctcgttgccttttggggcaattgcacccaggaagctctgtaccggttgccgcaccgtgtgtgggcttgcttactacgcctgcgacaaggcagatataagtctttgtgctagatgctatgtaaataataactaccggccgggcctgtctcctgctaacttcaagagagttgaaattactgaagatgcaaaaccagattggacagacaaagaaactcttcacttgcttgaggctgtcttgcattatggggaagactggaaaaaggtgtctgaacatgttagtagtcggtcagaaaaagattgtattgcaagatttataaggctaccttttggagaacagttcatgggacacaaggaggatagaatgaggtttgagaatactgatgacaatactgatgagcctggagcaaatgtctcaaaacgactacgtctcactccactagcagatgcaagcaatccgattatggctcaggttgcatttttatcagccattgtgggttccgatgttgcctcagctgcagcgcaagcagctatttctgcccaatcccgtgttgaccttaatgacggcgagattgaaacttcaataaatagcattaagcaagaagaatcatctcacacaaatgggctctcagccaacgtgttactgaaagaggcagctgctaatgcacgggcacaactcgagaaggaaaggaacagcatagagcaatctttatcaaacatagtagacgtccagatgaaggaaatccaagataaaatatgccggtttgagcagaaggagatgctgatggagaaagagcggcagcagctccattttctaagggatctacttttcacagaccaattggcagtcatgcagcatcaacaaaggagtccagctgtagccacagagtgcaagggtgatgagaagccaaagcccgtggctagcatgagttgatacgagtagatcctcagcgtagcatggtttcacttcagatgtagcattggagccgcgttcatccgcatctgccgttgatgcctggagtgcaagggaagttatgatgacgactaccgattaccacatgcttcactgcttgtgcgctaacacgttgatatctttgccagtggcgcaacaatcgtgtatttcttgaccaaaacatccacgcaaagctccggtagattcgatggtgactagcaaggaaatacatactctctgttaatttatattttatttgattttttgccctaagtttgactgact

SEQ ID NO: 24749 - DNA, 1645 bp, Zea Mays
aatagcaccaattcaagcaaccccccgtctcgtcctccttcctctcaagagtcgagacccaggcagccaggcttccagttccagccccacctcgcctctaccctcctcaaaccctacaccacgccccccggcccccagcccccggccttcgcccaacccgatagcgtagcgccggcgcagaaccggaccctgccgtgcggttgtccaccccgctcggcgccgcccgccgccgccgccgcctttgatgtctcctacctgcgacctcggcttcctctgcccccggtcgcagaagagctcccaagaggtcccccgagccaccgcttccggcgcccagcgattggcttccccaccgcagccgagatgagcagcggcggcgagaagatgttgttgtttgggtcctttacggaggacgagactaagttgttacagggtcagcccctcaaaagtccaactaaaagtgtcagcaaagaatgtgaacggacggagatccagtttggcaccctgaacttgtcagtgctgaatttagagaaaatatctacttcaagtgttgttcttcctgcaaaatcagcaaaaggggaaaccagtgccatcacgaaggagaatgcatgcaataatgaaaagaaagctgcagggtcaagcctttcaaacggtggaccagttctggctaatggatgccctcctgttaatgttcctgctaacaatggtttatttgagaatgtgaagacagaggctgttgtcccaccagttatacctgtcaaaatcatcagcaatccaacaccgcaaatgacgttggagacgcataaggatggcaccaaacccactgaaagcagaaagttaaataaggaaagggaaattactgaaaatggtagtccaattgtcgataaacacattgttgctgctccagcagaagaggcagtcacaagcctaaataagaaagcctctcagaacatgcccttgcttccacatggtttgaggaacacaggaaatatttgctttctgaatgcaactttgcaggcattgctttcatgctcgccttttgtctaccttttacaggatttgaggaaccgcaggatacctaaggttggctacccaactctgagtgcatttgttgagttgatatctcaattggatgtgcctgatgagtcagttatcaagaaaaatgagaaggttattactgttgccgcaaaaccacttaatcctgccatgtttgatgctgttctcagaaactttacaccagatgtgccggctggaataactgctcggcctaggcaggaagatgctcaagagtttttaagttttgccatggatagaatgcatgatgaactgctgaaacttaatggagatggtttgaattcaaaggaggggatggttgtttcatccgctgatgatgatgcttgggagacagttggacgaaagaacaaatctgcaatagttagaactcagagttttgtcccctctgagcttagtgctatttttggagggcagctacagagcgttgtgaaagctgcagcatcagctactgttcagcccttcctactgctccatcttgatatattcccagatgctgttcagacgcttaatgatgcacttcgtctgttctctactcctgaatctttggaaggatacagaacagctgcgggaaagg

SEQ ID NO: 24750 - DNA, 2034 bp, Zea Mays
cagtcggcaccggcgccacgtgccgttcggtcattggaccagccaacggcagacccagtcagcatcgcagagaggccccattttctcagccgaaacgaggcctagcccaccacagctgttgtagagactcgtggctccgaaggggcgtatgggcctcaggagtttccaagagcccatcaccaaattgccagccccgcgtcctcccctcgcggcctcacctgtcaccaagtcaccctcccatgcactgcaaagaccacacagacagacaaagccacatgcggcgactcgcgcgctcatccgctccccaattttggctcccccccacgaacctcccccgcccccctctctctctccatgactccacctccaggccaccccgagtccgctcccctcacggcctcaccctacactgctacggggaccctcgcacccgctgatcgccgttgcaatgcagctcgccagcgagcaccccgcctgcgggcgcgcgagcgccgagggggaggccttcgttccgcgcagcggggcccagggcctgcgccgccgcaccggcgcggccccgctcgactactcgagcccccgcagcggccgcgcgggcgacgggaagcgcaccaccttccgggaggacgtcgggcacgccgccgccgagacgtacctcgtcacgggcctcgccttcaccctgctcggatacctcggggttagttatcggtggatatcgcagcttattgcactccttgtttatgcagttctactcatgcctggtttcataaaagttgggtactactatttcttttcaagacatgttattagaagtgtaatctatggagaacaaccaagaaatagagatattatgcaggttggatttgtacatacccaaagataatagcaaatcaagtccagttgtggcattcgtaactggtggagcttggatcattggaaatttccctcaaggaacaataagcgacatggtcagtgatgcttctgaggcgatatcattcatttgtaacaatgttgttagctttggaggggatcctaataaaatctacttgatgggccaatcagcaggagcacatatcgcggcctgcgctctcttagagcaagcaattaaggaatctaagggagagaatacctattggaatgtggctcaaataaaagcatattttggtttatctggaggatacaatatccaaaatttggtcgatcactttcatgagcgtggtctttatcgttcaatatttctcagcataatggagggagaggaatcactgccacattactcacctgaaattgtcgccaaaaaattaagtgcagaaaccatatctctactacctcagattgtactattgcatggaacagcagattactccataccatcatctgccagcgaaacttttgctgatgtccttaaacaagctggtggaaaagtagagttacaattgtataaagggaaaacacatactgatgtatttttacaggatccactaaggggcggcagggacaaactggttgaagatgttttatctgtcattcatgttgatgatgcaagtgcgcgtgagagggacgcttcggcacctacccctgagcgcctggtttatgaatggcaaattaaattggcccgccaaattagtcccttctaaacaggtctgtacacagaaaggatttgttccaagacttcaacaagcatgtgttgcaacgtgataaactacgtggggtacatgatattttttgggattttcactgggtcaagcaaacgcagcttcaatctttgtttgcagggcgccagttgccaatgatggcagaagatttgccactgatggaagaaataagatttttgaggggtctctaggctgtaggcagtgctctactatactacacctgtttaatttccttggtttctttttacaaaatatatgaaatcctgatacaattctgtaaatagaatacgaagttgtttcatcatcgtaaaaaaacgtgggcaattcatgtgggaaatgttaaaagtgagattatttgttgctgccaatgaagctagacgtg

SEQ ID NO: 24751 - DNA, 796 bp, Zea Mays
gcgtgcgctggctgcttttggccaccgatacgctgcgtcggcgctccaaagttccaggaaatcaaaatgccatagtttcacgggatagacggatcagcttggtctggggatgtcgtcaggttcctgtgcttttttcccaatatctttgcttccgccagatcctagatccagtgtctttcgtcggctggctttgtttgcgccgctgaagaacaacaatagtcagccaatatctagtccaaagtccaagcgccgccttaagtttagttggttcaccatgcagcgtggatggacggtcaatttcttcgtccgtcgcccaaccggcagcaacacatacgcgatgatttgattggttccttgtgtcctaaatgaaggcaggttgtctgaagatctggaatctccagtttcatccaagtcaggagaggctagagttccaaatcgtagttcgtgtgaaccagtgtgaaccagttgaatctcatcaatcttatcaagtcatctaataaaaaaaggttcgacgcgtcttagagttctacgatgcatccaagaattcagagaacgttgacaaatatatagatcagctgaccaacaatgaattgtcatcaccacccaaaaagatgaagcacacccaggttaacaaagccattccagattctacatgttccaagaatgacaacagttagaccatcctgaaatacatcaaggttgggcggcttccgaagtcattcagacctgcgtccgagcctacatcatcatttggtttgaatcgcggaacgatgtcgttcgtcactgcgttgttcta

SEQ ID NO: 24752 - DNA, 866 bp, Zea Mays
atgcagaccaaatttccttagtagcagataccataattccctcgagaaagaacagatcatgctagcagagaagcaggcggcactggagaagttagagtgggaggcaaatgtgtcgagtacaaaggtggaagagctccaagctgatgtagcttctatggatactgaagtttctgctctgatgaagctgttcaggaaaataacagagagtgacagagcccctccacccagggatagaaatgacgatttgtctttggaatgcgagccagttcaccttgatgacacgttagacgacattgaccttgagaagatggagaaggagatgtcagcctacgtctcggctttgtctgccgcgaaggagaaccctacagacgagttcatgagagcagtcgccgatgcaagattaagacttcaagccgttgtactctgaccaagactagagcgttgcgttgtactgtgtaaccaacaggagcaagcaagtcgatagtacgtttgctaatcgctgtgttttgccggtggcccccctcagggccttttctgtgttctttctcctaccttgcatctgatcggcggccgctagtgacagtgagctagcttgatgtaacctgtaacgctatgaaccgtggtgtacctgactgaacctccgtaatagtagatggtatcgtgtacggtgtaccttttttttagcaacaagatggtgcggcctgtcttgacggctgaaagttcttgttttgttgtttagcaacaagataattcactatcttgcttttctgtttgtttgttaccccataaaccgaatcaggaatttcaaggatcatttgattccagttctgcggaattacccaattttgtcaaagttttaatataaa

SEQ ID NO: 24753 - DNA, 1855 bp, Zea Mays
tcttttctccccttcccaccccatccctcactgcgagtggcctggtgcgcgagccgcgcgagaggaaaagaggcagagcgagccttccgcctcctcccccccttcgcgagagagaaaggagtgggggaggaaaaaaaatcttagggctttctcgtcgatcctctccgcgattaccccaccgattcgtccaatccaatgcagcgcggccccgcggtatcaaatcccccggcggcggccgccaccggcgcctccgagaacgtgagcagaaatattggacactctggcccatcttgcagtgcacctgcatatcagttgtttcgccctgttactcgttctatgacccgtgggtctgatcctatcgtggcttcacctggtttcaaggcaggaggatctgatagcgcaagcacacaaagaagtatttcatatgcttcttttagcgctcaattagttgcctcacgactgactgccactcgtacccggacccctctaaaagtgacttcatctggttggaagcctcttactcaacctgttgctctgaacgaagagaggaaatgtgcaaaccttacaatcaaccctactgctaagcgttccagagttacttcctccagagctgtcaaagattcaatcaacaattcagcttcaaaagccaactcaagtgttcccagtgacaaaaagtacagaaatgaagataatgtgagcctgggcgatcagtcagatggggccgtcatgccatctcccacaaagaagctgcaaatatgcaaaggcccttcagatgcaccttcaattaggaaatcaactatcagaatcctgggtgttaagggagctgctctaccacccacagggaaatctcaagttgaaactcggaaatgctttgctaatgctacagcagaagtgatttctgctagtacaaacgagatcagtgagccagataatgcagctgccccattgcttgcacagcagttgccaccagacactgcaaagaactccactgtcatcatgcatacccatgaaacaagtaaagtcaatcagttggctgctacatggccaagggcgaactttcaaactgattacaacaagaagccttccaatgtacccataatggctaaccagcccagtgggttcgctggtgcgactgctcccttggtgacaccaaagatggaaatcggaaacatgaaggacagttccaatcctctctcaaatcctgcttacgcaagggcgcttgtaataaagcagcaagagcagctccttcagcaatataaattgggcagttcaccgcagcgacagcatcatggacagcatctctacatcaaagggccagctctgtttgagaatgatgacccgccaccggtcaagccgctgggaacaaggtgccagctctgcaagcttgatgttgctttccggacacaaggggatgctggccgtgatgccaatgctccaccagtcattgcagttttggcatgccaccatgtgttccacagcaggtgcattgaatctgtttacgggctcgctgagcctgctgagtgccttgcctgcctggagtccggtgcagcgcactgattgctaaccagatacaccaggtcaagagtctgaagtgctccatttctgtgggcctttagatggtgtaagtaggctaccattggagttcaatagggagctgaattatgggacatgtcacatgtctgatatatatgtttatttatttctcctgtcgtggtcataggtaaaatctgcagtctattgacgctgccattttgaataaacctggtgtctgcgctggttggcttggtgttgactgatgacttgtgtgagccccgccacacaagtcgtccaggaagacaagcaacaaaggatgatc

SEQ ID NO: 24754 - DNA, 2119 bp, Zea Mays
aaaaaaataatgggcgcgcgcagcaagatcgatatgtctgagacgctgacacggccattagcctcaagcaccgcggttgtttatgcttggggagtactagaagctgatcggcgcgcggttcttcaacaaggggtacctggcgacggtggggcggcggcagcagcagcaggaggtgaacccggcgagcacgcgggacacggacgggcacggcacgcacacgctgtccacggcggcggggcggctcgtcccgggggccaacctcttcggctacggcaacggcacggccaagggcggggccccagcggcgcacgccgccgcgtacaaggtgtgctggcgccccgtgaacggcagcgagtgcttcgacgccgacatcatcgcggcgttcgacgccgccatccacgacggggtgcacgtgctctccgtgtccctgggcggctcgcccgccgactacttccgcgacggcctcgccatcgggtcgttccacgccgccaggcacggcgtcaccgtcgtctgctcggccggcaactccgggcccggcgccggcaccgtgtccaacaccgcgccgtggctgctcaccgtgggcgcgagcaccatggacagggagttccccgcgtacctggtcctcgacaacaacaagcggatcaaaggacaaagtctctcgcggacccgccttcctgccaacaagtactaccagctgatcagctcagaagaagcaaagggagccaatgcaacagtaacgcaagcgaagttgtgcatcggggggtcactggacaaggcgaaggtcaaagggaagatagtcgtgtgcgtccgtgggaagaacgcacgagtggagaaaggtgaggcggttcaccgggctggcggagctggcatggtgctggcgaacgatgaggctagcgggaacgaggtcatcgccgacgcacacgttctccctgccacgcacatcacctacgctgatggagttacgcttttggcctacctgaaagctacaaggttggcatccggctacatcaccgtcccgtacaccgcgctggacgcgaagcctgcgccgttcatggccgccttctcgtcgcagggccccaacaccgtcacgcctgagatcctcaagcctgatatcaccgcgccaggggtcagtatcctggcggcgttcaccggggaggcgggaccgaccgggctcgccttcgacgaccgccgtgtcctctttaacgccgagtccggcacctccatgtcgtgcccgcacgtcgccggcatcgccggactcctcaaggccgtccatcctgactggagccctgccgcgatcaagtcggcgatcatgacaaccgccagggtgcaggacaacatgaggaagccgatgagcaactcgtccttcctccgcgcgacgccgttcggctacggcgcggggcacgtgcagcccaaccgcgccgccgacccgggccttgtctacgacgccaacaccacggactacctcagcttcctctgcgcgctgggctacaactcctcggtgatcgccacgttcatggccggcgccggcgacggccacgaggtccacgcctgcccagcccgcctgaggccggaggacctcaactacccgtcagtcgcagtgccgcacctgtcccccaccggcggcgcgcacaccgtgacgaggagggtgaggaacgtcggccccggtggcgccacgtacgacgcgaaggtccacgagccgcgaggcgtggcggtggacgtgcggccaaggcggctcgagttcgccgcggcgggggaggagaagcagttcaccgtcacgttcagggccagggaagggttcttcctgccgggggagtacgtgtttggccggctggtgtggtcggacggacgcggcaggcaccgcgtgaggagccccttggtggcgagggtcgtgaacaccaagaagaagcacatttccatagcttgacgaactcgcttaggatctcatgcatggtgatgagctgagcagtgaagcctggccaaagaaggtttggcttcatgaacaatataatgatatactgacaaagtgacaacggaaacggatctgcagtggtctaaaagttcagagatttggttcattttctaacatgcggatgtggatttgaattctacaacgatccat

SEQ ID NO: 24755 - DNA, 1132 bp, Zea Mays
gcacatttctcttctggaacataagtagcgtgcaaacttcgaccgggaccggcgatatccgccatggccaccaccactgccgccgctcgctggagcttccccgcccgtctccagctcctcaccagccgccgcttttgcttccccgcctcctctgccgcgccgcccagttctgtagcggggttcagttgggccgacgccctccgcgtcgctggggacggcgggcgcggcgacgagtccgacctctccgggtacttccggaaggtcaagagctgcaaccgcggaatggataaaaaagggcagttcgtgaagttctctgtggaggatcaggtcgtggggtacatccacaagggatttatcgaacacatcagagactttcatgatgtttttaccattgtcatggatgacaatggcagcaacactgtggagcatgtgtctctccagtcatcactaaggactccagaagaccgaacacatgctattggaagtgtcattaaaagccttggagaattgattccaggtattcgaaatgagctctacccagtaacgtcatcttatggcatgcctgtgtacttctctctggaacgtgctgctgctccttactttggtataaaagcttatggagttcatatgaatgggtatgttgagaaggatggtcagaaatttctttggattggtaaacggagtgatgtgaagcaaacatatccaggaatgcttgatcatcttgttgcgggtggcctgccatacggaatgtcctgcaaagagaatatcatcaaggaatgtgaggaggaagctggaatcacaagatccatatcaacaaatgctacttctgttggagcggtttcttatatggatattgaaggctttagatacaaaagggatgttctcttctgctatgacctccaacttcctgctgattttgttcctaataatgaagatggtgaggttgatagcttcagactagtccctgttatacatgctgcaaacattataaggaggacagattttttcaagccgaactgcaaccttgtgatcatcgacttcctcttccgtcatgggtacataaacccagattctcgttgttacttagatctgctgcaaagcttgaggagtggtgatttgtaatatatgaaca

SEQ ID NO: 24756 - DNA, 3368 bp, Zea Mays
gatacactattaaatgtgcatttgagaatagcctaaagacaagtggtcgtgccagcagccacgtttttgcttggcgagcaagctggctatgccgccacatggcacgcgaggaggcactagtgccacgccagccatacctcgagcaagcaagtcatcagtgtcgaagagatggttaaggctgcgcttccaggtccatgaactccttcccgctggccctacttcgccatcacggggaaaagttcaggttgtaattaatgtgcacaaggcagcgctgcattttatggacggtataagacgataccacctatctcctgagcttatcgaagaaggattttgtatcagtccagatgaactggcagcaattactggaatccgtgaagactctacgatcctcaagtcacatggtggaatcagtggaatatctaggaaaatcaaggcatcattggatgatggcatcaaggaaactgaaatagcaaccagacagaagctgtatggcagcaacaagcacaccgagaaacctcctagaagcttctggacgtttgtctgggatgcgttgcatgacctgacgttgattattctaatcgtttgtgccgttgtttctctaatggttggccttgccactgagggatggccgaagggcatctatgacggccttggcataataaccagcattttgttggtggtgctggtcacagcatccagtgattacaaacagtcacggaagttcatggagctggactacgagaaaaagaagatatacgcccttgtcactagagataggaaaaccaaaagggtactgattcatgatctggttgtgggtgacatcttgcatctttcagtaggcgatgtggttcctgcagatggcctgttcatctctggctactgcctagtcatagatgaatctagcttatcaggcgagagcgaaccagttgatgtttctgaagaaaagcctttcgttcatgctggaagtaaggtggtagatgggactgccaagatgcttgtgactgctgttggtatgcgtactgaatggggcaaagtcatggatactctgagtgctgatggagtggatgaaacccctttacaagttaagctcaatggtgtggccacgatcattggacagatcgggctggcgtttgctatcctcacatttctagtgctcctagtgaggttcctggtggacaaaggaatgcatgttgggttgtcaaattggtcagcaaatgatgcgctgacaatagtgaactactttgctattgcagtgacaatcatcgttgtcgcagtgcccgagggtctaccactggctgtgactcttagcctcgcgtttgccatgcagaagttgatgaatgacaaagcgctagtgagacatctcgctgcgtgtgagaccatgggttcagcaagttgtatttgcactgataagactggaactttgacgactaaccacatgatcgttgacaaggtttggatgggcgatgtatccaagtctgtcaacagtgatacaaatatgaacgagctgaaggatgctactgcagaaagtgctgtggacttacttgttcagggaatatttgtgaacactgctgctgagatcgtgaagggagatgatggcagaagatctatcttaggcacaccaactgaagcagcgttgttggagtttggcttgggcttgcaaggagatctatacggtgagtacaataagatggcaagagtcaaaatagagcccttcaactcagttaagaaaaagatgtctgtggtaatacagttacctaatggaggcctccggtccttctgcaaaggtgcatcagaacttattctagggcagtgtgacagcttcctcaacagtgaaggaaatttagcaccactgtcagaaatgcaaaagcagaatgtcttagatataataaactcgtttggatctgaggcgttaagaacgctctgtatcgcgtttaaggatctgggtgaaattcctgacgaccaaacaataccagaggatggttacacactaatagcgctttttggcataaaggatccagtccgtcccggtgtgagggatgcagtgatgacctgcatggctgctggaattaaagttacaatggtgactggagacaacatcaatactgctaaagccattgccaaggaatgtgggatattaaccgaggatggaatcgcaatagaaggaagagagcttcacgataagagcatggatgaactgaaggagatcctgcctaaaattcaggtaatggcccggtccttgccgatggacaaatataaactggtgacaagcctaaaaagtatgtatcaagaggtggtggcagttactggtgatggaaccaatgatgccccagcattgagtgagtcagacataggtctggccatgggaattgccggcactgaggtcgcaaaagaaaatgccgatgttataataatggatgataatttcagtaccattgtaaatgttgctagatggggtcgtgcggtttacttgaacattcagaagtttgtgcagttccagcttacagttaatatagtggctctgatagtgaatttcatctcagcgtgtatcataggtactgcaccacttactgccgtccagttgctatgggtgaacatgatcatggatacattaggagccttggccttagcgacagagccgcctaacgatgaaatgatgaatagaccaccagtgagacgggggcatggttttatcactcaggtcatgtggagaaatattcttgggcaggctttatatcagctccttgtgcttggtactctcatgtttaatgggaagaggatccttaacatcgaaggcccaaatgctgatagaactatcaataccctcatattcaactcttttgtgttttgccaggttttcaacgagataaatagcagggaaatggaaaagatcaacgtgttcagagggatactgaaaaactgggtctttatcggtatattgacaacaaccatcatattccaagtaatcatagtagagtttcttggaacctttgcaaacaccgtaccattgagttgggagctatggttgctcagcgctattcttggctcggtcagtttggttatctctgttatcctcaagtgcattcccgtcgaatctaggaaaacggatattaagccccatggctatgagttgattcctgaagccccagaaacagtttaggccgattattcctgtcccacatgaattggatgagattagagaaaattataaaggattttgatttatttggaattgagagggaattaagtttggcttgtacataatttaaattaaacgacgcttattctaggatggcgtatctatgtcatgtgtgcacacaacaccaagctagtgagtagtgatggtgcctttgcgtgcgatattctcg

SEQ ID NO: 24757 - DNA, 1760 bp, Zea Mays
cccaaatttctcaacgtggatagtgagcacatttgactgaccgccatagcaaccagaggaacacaaagcggcgaccgacgagccaagcaagcagcagagcatggacgcgggagaggtgcggcactggaacgcggacgtcaacggcgtctccatccacgtcgccgagcggggccccgaggatgggcccgcggtgctcctaatccacggcttcccggagctctggctctcgtggcgccaccagatggccgcgctcgccgcccgcgggttccgcgcgctggctcccgatctccgcggctacggcgactcctccgtgccgtccgaccccgccgcctacaccatcttccacatcgttggcgacatcgtcgcgctccttgaccacctccaactcacaaaggtgttcgtggttgggcacgactggggcgcgatggtggcgtggcacctctgcctgttccggccggaccgggtgcgcgccgctgttgtcctggggatcccctacttcccccgcggccctcgcccgatgacggactcatttgccaagctcggcgatggattctacatcaatcagttccaggagccaggaagagccgagagggcatttgctcgctacgatgttgcgacggtcctaaagaagttctacgccttgaaaatcgacgagatgattgctcctcctggagtggagatcatagactttctccaggcaccttcttcgccgattccctggatgacagacgaagaactgggacggtacgccgagaagttcgagaagactggcttcacaggacccctcaactactaccgcatgcttgaaacaaactggagactgactgcaccttggagtggatcgaaaatcacagtgcctgcgaaattcatactcagcaagaacgacgtcggcctgcagtccttcggaaccgagaagtacgtcaagagtggcgctctgaaggagaacgttccagaccttgagatttcgatcatcgaggggcaccatttcgtccagcaggaagaggccgggacagtgaattcggaaatactctccttccttggcaagtttcccagcgagggaggatcagcgtgattgttatttattgtttgcagccagtcccggactcctgagaggaagatggcctccgaatgatccgagggtttatgattgaataaagtgagagctcagatcgatagccgtctgttggcttgcattaaaaaaataaagagcttgcatgtaaaactatttatgaacgaataaacttctgtcatatactcgcaagtctcaacattgtttacatgccagccaacgaacaactaagcagaagtgcagaacacatcatctgcagcgcacaaaagttttcttttacacaaccggggaaaacgcacagagaaaaaaaaaactgcacaagatgagccaattcatttacacagtccataaaaaggcgaacgggaacagttcagcctcgtcagcatacaggtgaagcgcacttctccgccgacggcgacgcacgcttgggcttgatggaccggaccttcacgtagcggcgcaccattccgatcaccctccgtcccgccggcacctgtccagcccgccgcgttgcctcgcctgctgcagctccttgtagttgtgcaaattcacgaacaccagcagcaggagtgttcccttccgtggtgcctccggtggcggcgccgtcgacggcctcgtcctcgatcagctcctgcagcgagaaacgacggtcctgacactcttcctccgtcgagggttctgacgcctcgtg

SEQ ID NO: 24758 - DNA, 679 bp, Zea Mays
ctcggccaggccaaaacggcccagctgaggcccatttgccgccgccgccagggggtttcctccccctctctgtgacgcgcgggccccacccaaggcgcctcgcctcctcgagcaaggccgcacgcaggcgcaccgtcactacgccgccgccgggctagctagggcgcctgggcgtccgcgcccaaattaatccgtcgtcgattcgtctccctgcgtgatggagcagtgatggcggccgtttctttctcccccattcctcctctcaccattgatgccgagaagaaacagccacgccattgatggcgcttgatggagccgtcggctacctctccctctctctagcgccctctcctctccctctcctcctctataaagggcaatcgagcctcctcccttcctccccctgccccaagctctccctcacctctcacagccacgtccacgccgaccactggagcgtcgcttcgtcgccgtccgcggaagctcgccggagccctcctcggtcgcgtcctccccgtgccgagcccctgcctcaacgaagcagcacccatgccgccattccccgtccgagcctcgccccgcgaagcccctgtcgatcgtgtcatctgttcgtcgcgagaagctgattgtgtggtagaagaaccgaattcgtttgaggacgacgcgcaagacacttttg

SEQ ID NO: 24759 - DNA, 2244 bp, Zea Mays
cgatagcggacgtctcatcctctaaatttagagtacaggactatttaggggaaacagaatgctgaaaccagaaagatggcacgcgtgttttgacagtgacgggaaggctatatgtttccgtaaagcccttaagttcattgtcttaggaggtgtggatccttctattcgagcggaagtttgggaatttcttattggctgctacaccttaagtactacagcggaatataggggaaaactaagagctgctcgaagggagaaatatcgttatttaattaagcaatgccagagcatgcatacaagcattggtacaggtgagcttgcatatgctgttggatcaaagctgatggatgtcaggaccttgcccaaagaaactgaaggtggagaagtcagcacaagtcagcaagctgaacatgaagtgccttgcagtttagcagaaaattcgaatttgatttatggttctggttgcacaacgcggccccataaaaggaaaatttgtagtaaatcagctgaaacagttggtttcaatcaacataatgataactctagaggttctggagattgtgatgtcattggtgaaccaaggtatgacagtgatgccttcatcgattttccttccctaactggtacaaacttggtcgcaaatggtgacggggatagcaatggagttgaagaaaatccttgcaatttcttggtctctgaacatagagtaaggccccatgatgaacacatgcacagcttccagatcaataataacatagatctcataatagagtcaaatacattctccaatgatatatttcgacctagcagtagtgactcagccatctttcactcagatgcgtacaagcatgatagatggttagacgatactggctatagtgaagaaattatagattccttgaggatatctgatgcaccagaatcagatttagttgatggaatgaaatcaaatggttcaatagctgacaaagatagagtctctgaatggctttggacactgcatcgaattggtatgtttatattcttaattcacacaattgcagtggtctcttgtgattgtattctagttagggataaaaaaaacttttgatgcagtggttgatgtggtgagaacagatagccaccttgatttctatggagaatcaaggaatatggctagaatgtctgatatacttgctgtttatgcatgggttgatccttccactggatactgtcaaggtatgagtgatctgctgtcaccttttgttgtcatatatgaggatgatgcagatgccttttggtgctttgagatgctactgagaaggatgcgtgaaaatttccagatggagggaccaacaggagttatgaagcaattgcaagcattgtggaagataatggaactgacagatgctgaattatttgaacatttttcggcaattggtgctgaaagccttcattttgcttttcggatgctgctagtcctttttcgtcgagagctgtcctttgaggaatcacttatcatgtgggagatgatgtgggctgctgattttgatgaagaagcagtcaggcatttagaagagaactgcctagaaccattgctagtagatctgagcaatggcttatcatctgaagtcaaagaagtgcatcggatcaacagttccacaagaagaaaacccagaaccaggaaatgccatagtagaaatggtgaaatctgtggagcttgccaccctggaatgaaatctagtacaagaaatcatctctgtggcttgtccggtgctacaatatgggcaagacctcagcagatgccacatccaagtgcaagtgtgctagcaaagggtggagattatgaacttcctatattctgtgtggcggctatcttgataattaaccgccagaagataataagagggactcactcaatagatgatgcgatcaagatgttcaatgataatgtgctcaaaataaatgtaaaaagatgtgtacgcttggcaatcaagctaaggaagaagtacttgtacaagtcattgaaaggtggctctagtgatgataaagaaagctgaagaacctgcacttcccttgtagaaaaaactagatatttctccatcatgcattgctatctaggtgtgctggatcagtattgacctgaagtatggtacatgtccaagatccggcattattcaggattgcaagatgaagctgtggaattaaagaaaagaaatcaagtccactgaatggttgtatttctggtggtgtcattgttttttt

SEQ ID NO: 24760 - DNA, 858 bp, Zea Mays
ggcttattaaaatgcttgcaggggatggagctgtctcatcccttcgattgtgctgttgcaacaagcggaattgataacacaataaagctttggacacccgatgcaaatgctacatctatggttgctggaccagaacttgatgtattaagtgccatagagaataaccagcggacgttatgtcggaagcgtcaaattgtactgccttttgaatttttggaacgagttcggatgcgagagttttcagaaagtttcgagtgtaaccagagctgatttactatcgctggagttgctgagcttcttcaggaaaagggtaatagttggaagaatgatatcatccaagctacaagcagcctatgtttgaagtagtgaaatcgcaaggccttgctacgaatagagtgtagacacacctggatagataagcaggtgtgctggtgctgaaactattacttgagatgtcaataaacattggaattatgttgtggtttggggtggtataatgattcatacgtgtgtaatgcagtgtggattcattccctttacagattgtagatataggtgaaattctgcagtaagtgaaaatcacaaatgtaaatgtgcggtattgtctctgcgtgccgcaggcaggtcatgctagtttgtggttgacgattggggcatatcttcccgtatggcttgttcaattatttctaatacatacggattcctaatacatggggattggaagattgggagggattttgatttactagggatttaaatccacccaattctcttaaacctttagtctttgtttgtttattttaattttatatggattgggtgaaattaagatgtattttgatttgttatggatttaaa

SEQ ID NO: 24761 - DNA, 519 bp, Zea Mays
aataatccaataattggcctactctgcacaatataatccaataagcggtaataatacaatactcctcctgccctccacaccccgcggctggactggacttggaggtctggactctggagagggcgccagacgcaagtggccaggccagtcgacccacaatcccactccccatttgattagaagctcctgtgcagctgcagcaccctgcataatctattttgttcttgccctagcccccacctagcgctcgcacgccatggcgtggccgtggtcaccgccgccgcggcaaaccgcgcgcttcgtcgtcgtcgtcgtcgtcgccgtcgttcttctcttcgctgctgccccgtggccccgtgcggccgcccaggccgggtaccacgtcgtgtcggtgtcagggacggggggccaactgtcggcgcggctggagctcaccggcgccggccagaaggcagagctcgggcccgacgttcgcaggctcagcctcaccgcgaggaaaatgatattctgaaggtggga

SEQ ID NO: 24762 - DNA, 3855 bp, Zea Mays
cttggagttcggatcaaaaagtttctgccgacctcagcggacccgagggccaacgaagcccaaagcccacagacgacgctacggcctcgccttccgtttctgcacgttccttctctggaagccgaggcccgctcgctcgaagcggctgttgcgccgctcaatttcaatccggaggctgaagccacgggggagaagggcgcatggtttccgcagcgcgcgctgcatcccttctggccttgttgcggcctccggagcgcggatcttgacatcggcgacgacaacggcgaggaggaggatcttctcacggcactgcgaccctgcgagatggacatcgtatgtgaagtgtgtggtgttgttggctacaggcaacttttaatacaatgtagcaattgcaaaaatgctgcaaggcacctatattgtttggacccggtaatttatgatgcctcagcaattgaatggttgtgtgacgattgtcctccaaaacataatgaagaaacacaaaaggcagtgggtgctgttgggcctaccatgaacacaatggagtgtctggacctctcaatgggaaaagatggctgctctttttcacagaattgtgttgaaggcttcacccaaggaacaaagtctgactttttttcttcaatcaatgatgttgagacatcatatccatttgttaagggtagttcttgtcctacactaccgaatatggagcaaaaagatggtgtattggaaaatgcggaacaacctcatcttttggagatggttaatcttgatggtacaagccattcacttgtggaccctccattagaaatcaaagaacaaggagcggaagctggcttatttgcttcagttgaagatgtcgagcaaacccatcccattttaactgatgaaactagtcctatatggtcaagtgaggagcaagtagacggttcttgtcctgcatcggaaagccgggagcaacctgttcctttcaaggtggttatactcggaccatggcatgatgtgccaaatagcatcctaagatcaaggcctccttcaaactactcacagtccatgcaaggatcagatctatatgttggaaatgtggatgtattggatctttctaaggagcagttggactcgaggttaaaacctgaagaacaaggagcggaggatggcttatttgcctcagtggaatatgttgagcaaacacatcccaattttactgaggagaaagtagatggttctattcctacaccagcaagttcggagcaacctgatcagttggaggtggttagaccatgggatgatgcgccgaatagtaccctaaggtcaaagcctccatcaaactactcacagccaatgcaaggatcagatctagatgttaggaatatggatgccttggatccatctaaggagtggttggactcaaggttattgtcaaatacggtagagccatcaagttcctcaaatggaggaggcacatctgttgagaaagacaacattgaaaaaacagaacgcttgtcaggcattgacaccgtcacccctggactggataatgtccagggatcaaatccctcagcagagccatcaagttcctcaactggagaaggaaactcagctgttgaaaaacacagtgctgaaatgacagaatgcttgttaggcatgggaattttgaaccctgcactgcataatgtccaggtattgagtccctcgacaccaaaagaatgcttggtttctagcgcagacaagtcagatgtagcaaataggtcagatgaaattaatcacagtctcgatgattttaaccaaagtaatcccaagccagtgctgaagggaagagtctccaaaatgatgtgcccaagacttgcgtttcaactgccaaaagtgttgcctgtatgcgaacatcacaaaagggagatgtcattgccttccaagcatgttagtccacggaaagcaacaaaaagtagctttagaaagcaatatgaaggaccaaacagacatgtttcacgtcatactgaacatcagaaaaccaaactcgttatgaaggacagaaatacaggtcctgctcatatgagaagttgtaggccaacaaagcaaattgattgtacttgctcaagtgcttccttggattcatctacaaagactaaggaagtaaatgatgcagaaccaagatgttctaaatctgtaaaaacttttgagaatgtcatggccaagaaaagaaaacgacctattctatcatatgatgaagatgccaaggccatgcagatggaagtgaggatgcgcaggagacacagggaaagtggtgtgatgaagctgcgaagatccacagaaaattctgatgaagcgatgtgtccaggaaattcaaataatcaacttaccaatgatcatacgaaggcaaggaagcagagaagggccaacaaagacaataaaacaccaccagtgaacgctagtgttccatgcacacagattgatgctgcacgattagcatcagatcagcaaagctttatttgcacgcgacccattgatagaccttactggactggaatcatgaagattggccaggaatatatttcattggttgcacacctgtcaaatcaagcatgcaagaaggtgcaggaattatcgatgtcattaccaccactaatgaaagtaacaaagcattcaaagttgaaagcctggccagggaggtggaaggcatcggaacctactgctgaatgcgttggcttgtatttcttctcagataatatgagggaactggatcaacttgtgcattatctcaatgatcatagcttagtcctaaaatatgtcgttggctttgccaagctgctgatctccccgtctgttttcctaccagagcaatgccaaacgttccaagggaaacgctatctgtggggagtgttcaagcgcaggatgaatacggggagaatacatcatgtgaatgcaaagtgacaccctagtccaataaatccatgttgtgaagggtatcgctagctcaaagagacaacagttcgccaagcactgttgatgcctttttgagctgagaccgacccctgtgatcataagcagccccgcgagaactctcccctacccaggctatcgggccttgtcattgtgcggacgtctgaggtcggagcacttcatttgtttgggagctggaaaaatgaaggtgcactggttggtttctctgaacttgtgaaagggttagcgaaggaccgtactgtaatgttcatggcctggaggaatgatgcagcaagtaggatcagaaatcagaactagccagcgacaatcacgctccagcttctgaaacgttgctgtagccttttgttgatgttcaggactgggagctagattgtcacgatttgacactgaggacgttactgtgcctgcaagcctaacctaagatgtatcaagcatcaagtgctgctgctgctgctatggaaggtcttagccaaaattaaattatgtttctaagctctgcatgcatcttaacctgcgctaataggttttcttgatggcctcaatgggagcagcaggaacctactactttttatgcgcataaactggcacttcgcatgatgtacttgttcataagttggtcaaaaagtcggttccgtggggtaaatccattaaaaaagggtaaattttagcggagggagcagctacagttggcggggaacttgctttagaaaaaagttttagtagcttatatgccttgggagggttacaattttgaagacacattactaattagtgaacgtttggtatatgaggatatttatactttttttcacatccgaaaatatgaaattcagatggatacgacaactcaaggttccgctgataaaatcactaaacaaataccacatctagaacatttac

SEQ ID NO: 24763 - DNA, 2273 bp, Zea Mays
cttgaaactaggattgggttaaaattggaaccgagtttagtgccatggatgaatgagtgtttcacattgttatcgcgtcaaaacggaaataagaggaggggattaagctaatgccttgtcatcactgggtggcaaactgtcgtattttcattgatgcggtgttttctttcccgtcaggtacttccagccgtgtgggcccggggcagtttggttggtggacgtgaagctacccacgcttccaccagccccaattggcgaggccacaccacaccacaccactcctccgtccagcctctccccctctcctctcctctcctcccaaaacaagagcagcgagacgcgcgcgcgcgcgccacgagctggtggaacctcgccgcctcccgcggcagatctcgcgccgagccctggtttcgacgcgagatccgcgcccgccgtccgccgctcgccgcctccgtcccggagcattaccaggattatacttccaccttgaagatggcgatcggattactagcgtttgagagccaccaggggctctggaacagcggatactattcacagttgtttggaattggaggagttctcatcactcttaccattcttatgttatccacgggctactttgggggaattggtgccccatttgctccatatttctggccgtatctaggacaagttccaaagaagagggaacgcaaaaggcctgtgagagtgtacatggatggatgctttgatctcatgcactacggccatgcaaatgcattgcggcaggccaaattgctgggcgatcagcttgtagttggagtggttagtgatgaggagattgtggcaaacaaaggtccacctgtcctttctatggaagagaggttgactcttgttagtggtctcaagtgggtcgatgaggtcgttcccaatgcaccctatgagataacagaagaattcatgaatactctcttcaacaagtacagcattgattacattattcatggagatgatccttgtcttctacctgatggcactgatgcatatgcgctagcgaagaaggtcgggcgttacaagcaaatcaagcgaacagaaggtgtctcgagcactgacatagttgggaggatattgctaacattcaggcagaaagatgctgacactgatttaagtgttgtcgttgctgagaagtctggagagaaatcaaatgatgaagtgaaaagtcagctatctcatttccttccaacttctcgccggatcatgcagttttcaaatgggcaggctccttcgccaggtgctcgtgttgtctatgtagatggcacatttgatcttttccacgctggccatgttgagttcctcaggagtgccagacaacttggtgactttcttcttgtgggtatctatgacgacgagtcgatcagggatagaagaggctgtcgtcctataatgcatctccatgagcgtactcttggtgttcttgcctgccgttatgttgatgaagtcattattggtgcaccatgggaagtttctaaggacatgatcactacgtttaacatttcattggttgtccatgggactgtagctgagggcaattcagctggtgaaattgatccttatgctgttccaaagagcatggggattttccagacaatcaggagcccaaaatctataacaacattgtcagtggcgacaagaatagttgacaatcatgaagcttacaagaagaggaacctgaaaaagaaggctagcgaagaccggtactacacacaaaagaaattcgtttctggagactagtgctgcacaaggagtgtatatttctgccagcagtccgaggaaatgcatgtgccaccctgtattgatgttattctacagcagagactggaacagataatcagcaatagaaaggtcacaatgatagtttgagcaatggtgtggatggaccaagctagggaagagagagagagagagagagggagaaaactgtcacattcttctgctgtcgcccttttaggaacgctcacatgacatgaggagttcacataaacgattctttttctttctgactttgttatccccgtatggggatttatatatatctgtagctgaaggccttcagcaaaccgttgttgtatacttgtgtgttgttacttaacagcgtgtgtagtgattagcactgcacactccctgattgtaccatggtatattgaatgtttatactgctggaagaaaaaaagggggaccttgtgatggtcagatgtttaatttatctggtgacagtcttgttccatgcaaaatca

SEQ ID NO: 24764 - DNA, 2065 bp, Zea Mays
ctcctcccgagtcccgaactctcgatccactcatccgctgagggcgtcggccttctggcccttctccccccggccgacctcgcccctccggcgctccgtccgcttcctgaactcgtctccctcacggacgttctcctccctccgctcgccgcgccgcaacccggagaggagaccgccgctcggtcgagcaccacctggggcccagcgtcctcgcgaccagctctagcgcggcgtccgccctctgcagccctggtgtccccgcgactggcttcggccggcacacaactccacactgtatgctgcaaccctactctgcctcgtcttcttccatcaccctaagcatgcgcgcaacccccactcaccaacgacgggcccggccgccgccgccgtcctgcctcgccacccgccaccttcgccggcgacgagcaccagcaggaattaatagagttccaaacctcggttctgcagtttctactaaaaaagcagggatgagtaaggatacatttattaatttggacgtctctcatcacagagcggttgcagtggtgaggttgctaagaatcgagaaggggaaagcatttgtagaccttttgaacgagaaagcaaatgattctggagataaagagataggatatgtgcagaggacactaggtttcagcacacgctatttggaggacagggatataagactggttaccgtcatagttgctggaacagtgcgctggaaacgctaccttgattatctaatcatgtcactatgcagtgaggagaaggttttcagggagatggagccactgcttctacagatattgagaattggctttttcgaaattctcaagcttgatgtacctgcttatgctgccgttgatgagaatgtaaggcttgctaaagtagctttaaggcctggtgctgggaatatggtgaatgcaattctgcgtaaacttgtattgctaaaggagacagactctcttcctcttccaaagatagaaggtgatgatcgtgcccaagctcgtgctctttctataatttattctcatcctgtttggatggtgagacgatggatacggtttcatggaaaagatgaagctctaagattgatgaattggaacaacagtgatcctcatttcagtctaagggtgaacacatcaaaaggctatactagggctgaccttgtaaaacgattggaaagtttacaggttcattatgaagaatcaattatggatgaatttgttcgcattcgggaagggatgcagcaagtcttaaaagctggattactgaaagatggcatttgtgctgtgcaagatgagagtgcaggtcttgtagtgtctgtggttgatccacaacccggggaaacgattgttgattgctgtgctgcacctggtggaaagactcttttcatggcatcacggttgtcaggagaagggaagatatgggctctggacataaacaaaggtcgtttgagaatactcatggacgcagcaaagttacacggtctagatgatatgatcactgacatccatgctgatcttcgactatatgctaaggaaaccacagttaaatatgacaaagtattgttggacgctccatgctctggtctgggagtgctttccaagagggcggacttacgctggaatagacaatttgaaaatttggaagagttgatgtgtttacaagacgagcttcttgattcggcatcaatgttggtaaagccaggtggtatactaatttacagtacgtgttcgattgaccctgaagaaaatgaagagaggattactgcttttgttcagaggcatccggaatttgctcttcagagtgtatgtggatatgttcctagagaatttatcacagatgaaggtttctattcctcaaatccaactaagcactctatggatggggcatttgctgcacgtcttgtccggtcaacgcactaagattataggagttgccacaaggccacaactaggtgtgaagttgaacaaggaatcacatgtattgccctaagtgcacccagtcattgcttcaatatctttatcttatatattcttgaactttgctgcaaaaaaaa

SEQ ID NO: 24765 - DNA, 1278 bp, Zea Mays
tgtagtatagggtttagcagacaagggaggggactgagaactgggaagccgacgctccgctcggcaaagcctgaggcggcgacgacgcttgatcgcagcccgactcacaccgctcggatcatcattgatcgggaatcagggaggtcaaggggttttggttttataacttttacatccactgaagaagcctcagctgcaatgacttccatggatggcaaggaacttcaaggacgaaatataagggtgaaccatgccaatgaacgcgctggtgggatacgcgggggtggtggattcggagctggtggtggttatggtggtggaggtggatatcctactggtgggtatggcggtggtggatatagttctggtggtggtggaggatatagttctggtggtggaggaggatatagttctgggggttatgctgccaatggttacggtgttggatctggcagtggctatggtggcacctacagcaatgcatcaggtggtggatattcaggcagtgatggttacggcaatggagctgccagtggtggttatgctaacaacttgagcagcggatacaacagcaatggaaggtacaataccattggcagttctgatggaaacactggtgggtacaattcgtctcccaacccgtatggtgtaggcaactacaatactggaggttcgagttccagtggtggaaccttaggagagtttggtggtggaggttttggtggcaacaactttgctggaaatgttaccggggggttttctggcggtggggcaagctatggagctaacaagccgcaatacaatggcgacgacgacctgctgggcgaaggtttcttcgacaaggaagtggcagagtaaatgagggagcggcgtactcgcacctctcgcacggtgctgcggatcatttttttcccccaaactgcatcagatcggtcgtgctaaatggagcaaatagaactttgcctgagctcattaggatatagaacataatcctttgttcttttttattctgtttcagacaaggcacgtatgttattttatccactcagctagcgtagctttactacaactatattgtgagaagaaaaagttgttatatcaactatattgtgagaagaaagagtggttatatcttctcaacaagaaatgatgatagttcaggtgctaattttcttagcctttgtattcttacgtactagatagaaatgtccaaagtccaatgtcgttcccaataataaaaataaaaataaaactctagcatatgctggaatagctcat

SEQ ID NO: 24766 - DNA, 3488 bp, Zea Mays
aatcatttcactcatgattttagttctaaatagagagaacttgaattgaacacacacacacttctaatgtatcctgatcatgtatttttatatggaagtatgtaactatgttgtattcagttaattaagatacattttaaggccctgcatctacaattaaaatgcttatcaactgacttattgtataagttgctagagatatatctatggtccttaaaactgaacttcatctttcctccctgattcaataactgctaactaattctcttcccaacataatttttattatactcaatccggtatcctgtggattcaatttgcaggagtggggagttgaccctaccaaagagataccttcaagtgcagctacaaccaagtacactgatttcctacttgcaactgcggctggaaaagttgatggcacaaaaggttctgacaaaatggttactccatttgagaagactaaaattgctgcatacattgttggggccataactccatgcatgaggctttatgcatatctaggcaaagaactcatggctttccttaaacaagatgaaaatcatccatataagaaatggattaacacatatgcatccagtgattttgagaacaatgcactccaaatagaagaattgctggacaaactgagtgtatcattaactggtgaggaacttgagattattggcaagctctaccagcaagctatgaaactggaagtggagttcttttctgctaagcttgtagaccaacctgttgtagctccactttcaagatattgtgatccaaaatataaactcttgatcttctctgattttgatttgacatgcactgttgttgattcgtctgccattttggcggagatcgcaattttgtcattccaaaaggcaagtcaaagtgggattgataataacctcgaccgtgcaaaatcgggagaactgagaaatttgtggaacatgctctctaagcaatacatggaagagtatgaggaatgcatggaaagactacttcctccagaagaatcaaagtcactagattatgataaactgtataaaggcctggaggtgcttgctgagtttgagaaggctgcaaattctagggttgtcgactctggtgtcctgaggggaatgaatttagaagacatcaggaaagctggggagcggcttattcttcagggtggctgtaaaaatttctttcagaagattgtaaaaacaagggagatcctcaatttggatatccatattctttcctactgctggtgtgcagagcttataagatccgccttctcatcagccggctgtctagatggtttgaacatacatgcgaacgagttcgcctttgaggaatctgtttcaactggtgagattgacagaaagatccagtccccgctagacaaggttgagaagttcaagagcatcagaagcgacgcggacagcacggtgccattcctgtctgtttacatcggagactcggccggtgatttgctctgcttattggaggcagatatcggtatcgtcgttgggtcaagcacaagcttgcgtagagtgggcagacagttcggtgtttcctttgtcccgttgtttctcggtctagtggagaagcagaggcaactgatggatgaagatgcgtccgtgttcaagccgcggtctggagtcctttatacggtctctagctggtcagaaatacacgccttcgtgctgggaagcgatttcagctgatggatctgctgcttcttttctccatctttttccccttgagaagcaaaaaagcttttgccggttgattctgatgcatacgatgcgtgaatcctaatgtggtcattttatgaaagccacatgtcgattctggctaccactatgtatgaatgaatacctgtagtttgtggtgtggaatgggttaagtttgtgcccgtgaattgtgatcaatgtatcattgattcatccttgttccatttgggactaatttctgggtgttgctggcagcaactacagtatactggatgaatgatgaagtacaactcgtttttatttcagattctcagcaggaagcgtactagtactagccactagggcgaaatgcatgctactagatgtatgatgtgtcatatcggagtacaaatactgatgaactgccagcctggggttcggatgggtgcataatatatgatagaatatgaatgtggtctgttttcatatgctgtatcgtgttttagctagttgaaggtggcggcggcgcgggcgtcgacggcgaggatggtgctgaggttgagcgggtgcatgtactcctgtgggccgtccatgaactggctgacgatgatgcggttggccttctccgtggggtggaagttgtcccagaaggcgtagacgctgcggtccgggcagacgctggacgcggcggtgcagagccccacgccgttgtatggtccctggccgcagcacgcgaccttggaggtgacgaagccgtaggccgccgggtcggagatgaagtccatgtgcatccggtaggcgttgacggcgacgaagacgtcggcgccgagctccgcgttgacgcccttgatcatgtccaccagctgcgggttgtagagcgcggcggcgcgctgcagctcggcgtcgcactccccgtcgcggctgccccgcagcgccagctcggctggggcgcaccccagcgggcccgaccccgtgaccagcacccggcgcgcgcccagcgagtagagctgccgcagcaccttggcgtactcggacacgacgtagcgcacgtagtccggcagcgcgaactcgcgggaccgcgccgagaagggcaccaggtagtagttgttgatgaagtcgttgccgcccagggtgacgagcacgagcgctccgcggacgaggcgcgcggcggcgtcctcgccgacgaggcggctcaagcggtcctggtactgccggaagtagcgcagctgcttctggacgcggatgatgttggcgaactggacccccgtgtcgttgagcacgcccacgcccgccgacgcgaagttggcgcccaccagcagcttccgcccgtccaggtgcgggctcaggtacggcagcgccggctccgcgcccaggtactcgctgatgatgtccggcacgttcttgccgttggagaagcggcccgtcgcgcggtgcgtcgggtagtcgaggccgtacggcggcgagtcggcgcgcgccgtcgtggccaggtagttgttgttgccgctgtccaccagcgagtcgccgaagacgaagaaggcgcggggcggggtcggggtggccgtggctgggcgcacctgcagcagcaggaggacgaggaggaagcacgcagtggctgcgacgagcctgccacggctacctgctgctcctggaacggaaagcattctgctgctgcttcttcgccgctgctctgctcagctgctgctgcgggacgcctatataacaggaagaagataacggggagagtgggatgatcaatagtatacgggctgatggagctgctgc

SEQ ID NO: 24767 - DNA, 2774 bp, Zea Mays
tctcactccactccatgcacgacacgagcgccacgacccacggcacgagggtggcgcaccgcgtctccaaatccaaaaccaacgcgagcacgagtcggggacgagcagctccacaacaattcgtgcctgcctccctgcctcggcctcctccctcgtcctcccctcctccgccgcctcaaacccggccccctcgcgcgcgtgcgcggcgctcgaggcgacgaatccagccacctcctccgcacccatccccgccgccggtcgccgatattggaaggagctcggaaggctgggacgctgacccgaattttatggggagaggatgccagagctgcgaagcaatactcgtcaagcacgcttaaggtctaagaagcttgacgatctgcagccaggagagccgcttgcgaaaccggtgtcacctgctctgccgagcgcacggaagcgtgctcctacacgtgctgctaggggcagaaagggtgctgctgggagaggagtgcctcccgcaccaaagcctagaagaaagggggttgatattgtcgtcttagaagctgatcctgcttgtgaaaccccacttaaagctttcaagggactggaagttgctgctgctgcgcccaagaaccttcctttgaagcaggtagccgaagttggtgttccgaaaatgaatggtgaaagtggggagaagattgttggggctgaagatgaatcgacagctacacctgtcccagaaagggttcaagtaggtaattctccagagtacataactgacaggaagttaggtaaaggtggttttggtcaggtgtatgttggtcgaagggtttctggtggtgctgctcgcactggtcctgatgcatatgaggttgcattgaaattcgagcatcgtaacagtaaaggatgcaattatggccccccatatgagtggcaagtttataacactctcaatggttgctatggcataccatcggtccactacaagggtcgtcagggcgaatactatatacttgtaatggatatgcttggtcccagcctttgggatgtgtggaattcgatggggcaggcgatgactccaaatatggctgcttgcattgctgtagagagcatatcaattcttgagaagctccattctaaagggtttgtgcatggtgatgtgaaaccagagaattttctgcttggtcagcctggatcgcctgaagataagaagctttaccttatagatcttggtttagcatccaagtggagagagaataatggtcatcatgttgattatgatcaacggcctgatatctttaggggaacaattagatatgcgagtgtccatgctcatttggggcgcactggtagtaggagggatgatttagagtcactggcatacacccttattttcctgataagaggaagattaccttggcaaggctaccagggagataccaagagtttccttgtttgcaagaagaaaatggctacttctccggagatgctttgttgttattgtccagctccattcaaacagtttcttgagattgtcacaaatatgaaatttgacgaagagccaaattatgccaagcttatctctctttttgatggtttgattgaagcgcctgcttcgagacaaatcagaattgatggggctctcaaggttggacagaaacgtggaagattggttgcagatctagaagaagatgaacaacctaaaaagaaggttagattagggagcccagcggctcaatggatttcagtttataatgctaggcggcccatgaagcagaggtaccattacaatgtggctgactcgaggctaagccaacatatagaaaagggcaacgatgatgggctttacattagcagcgtggcttcctcggcaaacctttgggcactcatcatggacgcaggaactggtttctgttctcaggtttatgagctctcaccagttttcctccacaaggactggataatggagcagtgggagaaaagctactacataacagcaattgctggatcatccaacgggagctcattggttgtcatgtccaaaggaactccttacacccaacaatcatacaaggttagcgagtcgttcccttacaagtggatcaataagaagtggaaagaagggttccatgtgacatccatggccaccgctgggaatcgctggggcgtagtcatgtcaaggaattcagggttctctactcaggttgtagagttggatttcctgtaccccagcgagggcatccaccggcgctgggagagcggctacaggataacttccacggcagccaccaacgaccaagccgctttcatcctgagcatgccgaaacggaagccgatggacgagacacaggaaacgctgcggacctccgccttccccagctcacacgtcaaggagaaatgggccaagaacctctacatcgcttcgatttgcttcgggcggaccgtgtgctgatcgcgcgcgcctgggaaatggaagtcgaagcgagggccaccgatccggtacggtggcgcctcgcatcaagagatgcgagatggggcgtcaagtcgaaaccagttctaatgataggatcagtgtatctctgaagatacggtatgggttaccctaccgtatttgtaaagtaatgatgccggccgaacgacctttcctaacataaattgaattgattgaatatttagagctcagtcagtcaaggcccgattaagtaacatatgaacgtatgtctatattcattcattattattttaataaatatggatagaaaaaaaaagttggctaaaaagataaacaataa

SEQ ID NO: 24768 - DNA, 2876 bp, Zea Mays
cagattttatgggcattctggtccactgttacccattcgtttgcctgatccataccaaatggtagtagcgttttgcaatcgattacccattcttttgcctgatgcatagtagccattccccattcccacataggagtattttccaatccataacccacgtcttgaaccatcaaaacgtttccctttcccgttccgactcccatccaaaatccattcaccgcctgccttttcttctcccgtccaccgtgtgcgggctgcggggagcgctctcctgccgctactaggcgaccgccgccgccgtcctacgtgctcgggtccttcctcggctatcaacacctaccagttatagggcgtacatgtgcacacgcatgtccttcaccgggtccgcccctgagtcttccgatcccaataagcaacctgcaaaaaagcagactcgacaatgggcagcgtggacacaccaagaggaggagaatttcttcaatgcactgcggcaagtagggaaaaacttcgacaagattacacaccgtgttcagagtaaaaacaaggatcaggtcaggcattactattatcgtcttgttcgacgcatgaagaagctattgggtcctaggttctcacttgatgcaaaaaactccaaggataccattgctgctatgcttcgctggtggtctctgcttgagaaatttagctgcagtgcatcaaagctgcacctgaagcctcggaggttcaaaacatttgtagaagcattgggaaaacaactgctgaaggacagaaataagtccaggaaaaagcattcacgagtggatatgtgcatatcttctccatctccagttatcagcaaggctcctggggatgagactcctcctgtaaagttcttgtcaatagattctcaaaatggtagcagagtagcatctcctaaagggacaattttcaagcggattgcagaaccaatttctaacaagtcaggaacaactaaaggggacctctctgccacaagaaccgtgaaacagaaaaggaaggcaggtggtgctgttgcatctgccgcatataaaaaatgggagagagcggccatggctggtgtttctttagttgctgatgcggctgaggagctcgagcgcaacacgattaacccaggcatgttatgtaatgttgatgcaagaacactgacttcatcatcagacagactttctactggtgatggcattagcacaaatcatatgaaggaaacagattcacaagcacctgtgaagctgaagctacagttatttccaataaacgaagctactcgaaaggcattggagaaggatgaccataatcctcatttagagctcacattaagctctaggaagaaaatatcatctgtgctagaacatctaaaccgaaaatgggagatggacaacaagagatactgttgcagtcgctgatgtgtttctttctgtgaatagcccttctgttttccgtttaaggtatggttggttttcccttgttgagcttggagcaggagtaagtgacatatctttaacacattttgaagattgcatgagaccggaagtcatccaagtcaaatcaccatcaggagataaggcttgtgtgcaaaaggatggtactttgctcagtaattgcactcatgagtcatatccttgcagttcaatgttattgcatatgacaccatccagtacaggcaagaactctgagcttccggatcagccggctaatgtgccccactctcggtttggcagccaaaagcaagtgcaggttcctgtaacccaagcttttgaggatgatcagggaatgaattgtgtggcaatatctgaagtagagtgggcagatacccttacagatatcagtgttgagcacttactgacagaagcatccaaagatttagattgcgtggggactagtgtaaaagatcctttgtttcttgagaatccatgcagctatgactcgtttgatgctgttgttgcccttcatgcttctcgttatcaagcatcagaacagccagcccatgctccccattcaaacatatggggagcagaagaaacatgtgatgagttcagttttaatttgtcagcctccaggaagcaagaagggtcaaacacttctagcagctctcctgatactgacaatgaagttcatccttcaaattcagaaggatttcgaggttttcttcaggacttgactggacgagagactgatgctgataatccttgtaatgatgacgccaaagacgaagaggagttttatgctaaatcaccacctcgaaatgacaaaactaatgagttgaaggatcaacctttagctgacatatattggcctgattcactcggaccactggacttggacataccggccgtgagatatcaaaccgatgacatactgataggggacagtcaaagtagttggaattggaaccgcctgatggcaaatagcctcgatgcatttcgaaacctgtcattcttctcggataagaatgactcgattccgtcgatcatgtagaactggggatgttacggtttctacgacttgctgtgttggttaggaaggaacctccaattctgcatttcgctgaagaatatccaacagatgcggatttgatgcatacgtgaggtgctcgtgctgttgtaagataacataacggatgtgctaaccactccatgtaattgtgttgtccttgtacataaagcacatacaagcacttggatacaagtaaagcttctggggttcgtgtataagatcagtttgcctaatgtccatcaaatgattgtgcacttcttttttccggtttacatctaaaatagtatgcccacatgggttatcccaagtcctgggttcgattcctatcgggagcgaattttcaggcttggttaaaaaaatcccct

SEQ ID NO: 24769 - DNA, 451 bp, Zea Mays
gtaagctgctggaatagccttaaggacttcatgcttatttgatgaggagtgtttggagcaagaaaagtcccgtcagtctcctattcagagctttgcacttaggcttcttgagtataacattaatgcatctgaatttctgccattagccgaagcaccatcaactcctgacaggctaaatgattttggcattttgaaagtacctgatcaactttcagaagcaaatctcttttatggcgtagcacccggtgcaatgcaggcatacagggagtctatggagcgtctccttatttataataacaagatgccagctggtcattcaggtcctggaagtccatggtcaagttttgaggatcaggctcttgttgtccttgtccatgatatgggtgaaaactgggaattggttagcgatgcccttaacagcatcatccaattgaagggctttggatcttaa

SEQ ID NO: 24770 - DNA, 2463 bp, Zea Mays
attacaatgagttgccactagatatacgcgaagcctctcccacctcatctgcctcgcgtgcggcggcggcgactccacctggcttgcgtcctcccgttttccagccagcaagccagactcctcccctctccgaagactccgatcgtccggattcatccagatccgggcgttctgagtcctgccgaggctctagatcgcgtcgcgcacgatgccacgcgacctgtcgcggtcgcggtctccgccgcgccgacgttggcggtcgccgtctcccgcgcggtaccgcggccggagggggcgcagggaccgaagccccagtcccatccgtagcaggtccccctatcgctcctcgtataggtgaccacacctcccgttacacgcagaaatctggcgagtcttcgttttattttttgggggtttgtactgtaaaaaaaagaagtgaggcgatgctgaccgccttcattgaaattttgtactattgcttgcttgatggaaacggggcttggtgctcttatgattatttgatctatcaactgtttgttggtgttactgttagaggtagccagcgcggtagtatattgtgctatgtcatatctgcatgaactatggtttatgaatgtgcaaatttcataatacttcggagcgatcaagatttctgatttccaaaggaagaaaaatgcttcggattcttttgcattacagagttagaataaaaatacttcgatgcagcatggaatatatcagcagatgaagcttagatatagttatgccatgttttgcactacttgcctgtacagactaacaagagttgctttcgtaaaacgcatggaatctacaaagcttttactctgtgctgtattgctgtggaatgctccacccctgtaacagtgtctaaggtaactgcttttgcccatgttttagggcttcaggagctaatggtaattccttgtctattgttgtgatgactcattgactctaattttattcttacggtgctcatctttgtcttgcagaaggaggagccctttgccttccccaagaaggcacaagagccgttctccgtctcctaggaggcgcaagagtccgtctccatcacaaaagcgttacagaagaaagagaagtccgagtgtcactagctctccagtcgctgcatctcagagttcccaccttgggttggcagagaataagaatgttattgatacacaaaggctagaagaagaaaagaaaagggaacatgcctcagtagaattgatgaaagaaataaaagaagggtatgtgtgaaatattaccagtatcatttcataaattttacagcagtttgtattaactattgtgcacgtcaccttggaaaccattaattttttttaaaaaaaaatcatgaatgcttcttgagatgtttggtgtagttgtcagagctgtcttactgagtcatcaggtcatgggttcgaagcaacttctccacatttatgtgggaaggctcgcctcggcttatcccttcacagacgctactcatgtgggagcctccagcagctttaccgaagggagctactgctatagttccacttgttatatttgatgatgcaattggtgatcatttatctactcttgatcagttttgataattcgtttttggatctggaacgaactagaggcgccaaaaggaagttgaactgagactattagagaaggagacggcaaaaagagttgaacaagctattaggaggaaggttgaggagagtctaaattgtgatgaaatcaaacatgaaatacatcgtcgaattgaggaaggacgaaagaggatacatgaggaggtagcaatccagattgagaaggaaaaggatgcagctttaaatgaagccaagctgaaagtggaacaagaaaaaaagaagcgggaggagctagagaaaaaacttgaagaagaacgaaagaaagctgaagaggcgttgatgaaagaagcgttggaacagcagcagaaagagctagagcggtaccaggagttggagaggcttcagaaagaaagagaggaggccatgaaacggaaaaaaatggaggaagagcagcagaggcaaaaccagatgaagctgctgggcaagaacaagtcgcggcctaagctgtcgtttgcttttgggatgaagtagcgttcgattcaccgaacgaaattagtgctttagtatactgtaaccgtgtagtgtagtacctctgtatgaaactgcccatttctaactctggcagacaaattgcgatgtcataaatgctcctgatctgcttcgtaagttgccggctcttggtggatgtggtttcatctgcttcttgctgttcagttggcgttgccttgcgagaagactgccagagaagaatccggttggtttgatcttgcatgtcaccaagatactatctccgtttgtgttgccccctagttcagcctgttcatatttgaactaaaacgtgataaataaaaaaaacgga

SEQ ID NO: 24771 - DNA, 2605 bp, Zea Mays
cttggcagccctacgcgcggcttcgcggagtcgcgaggcggctcggctctacacctacgcgtgcgcggcctcgcctcttccctcgcacgactcgccgcgaggagtttccccttcctccgcgtgcatccccgcgagagctcgaaaacctagccgccaaatccatggctcgccgcgaccacgacgacgacgacgaggaagaggtcgaggaggaggcatacgacttggacgaggaggaggatgacgaggatgaggaagacgactacgaggaggaggcgaggcgcgggaaggcctcccgcggcggtggcaagggtggcggcgggcggaagcggtcacgcgaagacaacttcatcgacgactcggccatcgaggacgaggacgaggacgacgacgacgacggcgggggccggccgaggaagaagggcggcggcggggtgcgagggttcttcgacgaggaggcccaggtcgacgaggatgaggaagaagaggacgaaggcgagggagaggacgattttattaatgatgctggggccgaccttcctgatgaggatgttgttaggggctcaagacgtcattctattcctatgagagatgaggaagaggatattgatgagattgagagacaagtgcgggagagatacgcacgatccactcatattgagtacggtgaggaagctgcagaagtggaacagcaagctctgctgccgtccgtgaaggatcccaaactatggatggtcaaatgtgcgattggacatgagagagaaactgctatttgtctgatgcaaaagttcatcgatcggtcagaccttcagataaagtcagtcgtggcattggatcatcttaaaaattatatttatgttgaagctgaaaaggaggcccatgtcaaagaggcttgcaaaggtctaagaaacatttatgcttcagcaaaaataacattagtgccgataaaagaaatggcagatgtcctctccgttgagagcaaatctgttgatctttcaagggattcttgggttcgaatgaaattgggcatatataaaggcgaccttgctaaggttgttgatgttgataatgtacgtcaaagagtagacgtgaagctgatccctagaatagatctacaagctttggctagtaaacttgaaggggagtctgtaaagaagaaagcatttgtcccaccaccacgattcttcaatatcgatgaggcgagggagatgcatattcgtgtggaacggaggcgagataaagaatctggggagtactttgagtgggttgataatttgaagttcaaagatggtttcttgtacaaatctgtctccactaaatcgatccacacaaacaatattcaaccgaattttgacgaacttgagaagtttaagaagcctggtgatgacatgaatggcgacatggctagcttgtccactctgtttgcaaacaggaaaaaaggacactttatgaagggtgatgccgtcattgttattaaaggcgatttgaaaaatctggagggttgggttgagaaagtagaggatgaaaccgttcacatcaggccaaaaatatctgatctcccgaaaacattggccttcaatgaaaaagagctttgcaaatatttcaagcctggtgaccatgtcaaggtgatctcaggagttcaagaaggcgctactggcatggttgttaaagtggaagggcatgtcttgatcattttgtctgacacaactaaagaacatatccgtgtgtttgctgatcatgtcgttgaaagctctgaaattaccacaggaatcaccagaatcgggataattgggaagatggaaatcctgctacttggggtagcagtccagcttaccagccaggaaccccacaagctcggccatacgaagcccccacacctggatcagggtgggcaaacactccaggagttagtttcaatgatgctcctactcccagggataactatgcaaatgccccaagtccatacgtgccttccacgcctgttggccaaccaatgacgccaaactcagcctcatatcttccaggcacacctggtggtcaaccaatgaccccaggcaatgctggaatggatatgatgtcgccgataataggtggtgagggtgaagctacatggctgctgccggatgttttggtcaatgtgttgagcggaggtgatgacggtcctggtgtggttagggaggtactcggggatggatcttgccgagttgcacttgggtcttcgggcaacggtgacatggtgacggttcttccgaacgaggtcgaggtcatcaggccgaagaagagtgacaagatcaagatactgaatggtagtttccgtgggcacacaggaaaacttataggtatagatggttctgacggaatagtgaggcttgacgacacatacgaagttaagatattagatatggtgattttggccaaactggcgacttgaaatggatgtatattttgttttgtaacgtgtccaccatagaacatattttgtaacaatgccctcgtttgcaataaagctttttgttgcttacgactacaatagttttgcacacttgtgcttttgcccaagggccgctcgtttttagaccttcagttgctgactggtcgtatatatcat

SEQ ID NO: 24772 - DNA, 2425 bp, Zea Mays
atggaggagagcgacgcggcggagggggtggcggtgcagctgatcgacggcgagggcgagttcgcggccgagggggcggagcggttcatggcggccgccggcgtcgccgggtgcgggctctcctacgccgtcgtctccatcatggggccacagagcagcggaaagagtaccttgttgaatcaattatttggtaccaattttagggagatggatgcattcagaggaaggagtcaaactactaaaggtatctggatagcacgctgtgttggtgttgagccttgtactgttgtattggatcttgagggtaccgatggaagagagagaggagaggatgacactgcatttgagaagcaaagttcgttatttgctcttgcaatttcagatatagttctaattaacatgtggtgccatgatattggccgtgagcaagctgccaataaaccactcctaaagacagtatttcagactccacttgaacatctagaaccagttctaagggaggatatacaaaagatatggaactctgttgccaagccagaggcacacaaagacacccctatcaatgaattcttcaatgtgcaagttactgcattgtccagttttgaggaaaaagaggaccagtttagggaacaggttcaacaacttaggcagagattttcaaattcaattgcaccaggaggtcttgcaggtgatagaagaggagtagttcctgcttcaggttttttgtttagttcacaacagatttggaaagttatccgagagaacaaggatcttgatcttcctgctcacaaggtaatggttgctacagttcgatgtgatgaaattgcaaacgagaagtttggatgcataacctcagacacagaatggttggatgtggagagtgctgtccaatctggtccagtacctggttttggaaaaaaacttggcaatatcgtcgacgttcacttgcaagagtatgacaaagaagctgtctattttgatgaagctgtaaggaaaggaaaacgacagcatttggagtccagaatactgaatcttgtccaacctgcattccagaaaatgttgactcatctgcgtgtgaaggctctagaaaaatttaaaactggtcttaattcatctttggagagtggaaaaggattcgcagtatctgctcgagacaatactgaatgctctctcaaagaatttgaacaaggctgtgcagtgtttagccatgacaaggattcaattccaagggtctggacaggaaaggaagatgttcgtgcaatagcaaaggaagctcgatctgcggctctcaaacttctgtctgtaatggcggccattcgctgggatgacgagccagataggattgaaagcatcctcacttcaacacttctggaaggctctgttgtatcaaagattgcaagtgctgcttctgctgatccacttgcttctaccacttgggaagagattgctccaaagcatacaatgattaccccgtctcagtgcaagtcactgtggaaacaatttaaagcagaaactgagttcacgattacacaagcagtatccacacagcaagctcacaggcgcggtaatagtaaactgcctcctccttgggcaatcgtggccattgctattcttggtttcaatgagatcatggtgcttattaggaatcccatttatctgttcttgctatttgtgggctacttgatggtcaaagctttggcgatgcagctagatgtcagcagagaattccagaatggagtggttcctggaataatctctgtgtcggtgaagctcctaccagcgatacagaacctggtgaacaaagtggcagccgagcagcaagctgagcaccagcagcagcacccgcaccctcaccctcacactcaggccccaggacccccacagccacagatgcagccgccgccgctgctcctgagcccgagaagccccatgagcgagctgcggaggctgcacatgccgcgcagcccgcgcagcccgcgcaaggtggcgtcgccggcgccatcctcgtcgtcgtcatcgtctgccgtgtcgtcccctaggcacgttggcgaggaccagaagccaagaccaggggcagtcggggcgcctgagaacgaggccaccgtcgccgactcgatagtgtgatccacgcaccagccatcgtggcgcgcgtttgactgctataggtacaaggatatcaaggcagaaataatgcaggaccctcttctgccgtgcaatcctttagtttttgcaaggagagggaggggataatgcatagatggacaattgctacctggcaccatttttcagcatatgtatagaaaggagctacccatttgaaactgaaagtcgtaggcattgtttaattaagtgcgctagaaataccccagccgcattcagctctttttatatatatgctaacaccgtaatctaatgtttaaacgct

SEQ ID NO: 24773 - DNA, 2186 bp, Zea Mays
agcagaccgcaggaatttgtgtggtccgcgcctcacttccacgacgctccagcggcatccgccacttcgtcgtcgtcgtcgcacggattggcattggctgccccccggccctgttcctcgtcctcctcatcaattcccgtctctcagtcctcccaataatggtggcgtggtgagaaatccttccgtccggccgtcgtcttagaagatgaactgttcctcttgctgcgccgctgccactccatcttctccggcgcttctcgccaggccgcgggggggtttagctgctagctgctccacgacgacagcaaatcagaaggtgcttttcctgggctcaaaacagtttccacggatcacgtatagccgtgcgtcgtcacggttgtcgcggagagaggtaatagcttttgccgggcaacaaccttgggacatcggcagatttgtcaagacgctgtatttcttcaacgggcctccaaaccttctcaagattgtagaatctatcatcagcagtttcactggacctgcttctagtgaagtgccaaagaaaatggaaacgtcggatgtggtgctggttactggagccaccggtggtgttgggcgacgggtggtggacgtcctgcagaagaagggagtacctgttcgagtattggctagaaatgtagacaaggcaaggagcatgttggggccggatgtacctctgatcataggagatgttacgaaggaagatacacttgatcctaagctattcaaagggataaaaaaagtagtcaatgcagtctctgtcatagtggggccaaaggaaggtgatacgccagacaggcagaagtacaaacaaggcatcaaatttttcgaacctgagatcaagggaccttcacctgaaatggttgagtacatcggaatgcaaaacttgattaatgccataaagagtagtgttggactgagtgaagggaaactgctatttggtttcaaaggcaacttatctggagagattgtgtggggagctcttgatgacgttgtgatgggtggtgttagtgaaagtacattccaaatcttgccaacaggaagtgaaagtagtggaccaactgggttgttcaaagggactgtatctacttcaaataatggtgggtttactagtataaggacaaagaattttactgtgccagaggacctgtcagcatatgatggtattgagttacgagttaatggtgatgggcgacggtataaactcattatacggactagctatgaatgggatactgttggctatacagcaagttttaacacaactaaggggggatggcaaagtgttaaagtacctttctcttctctgaaacctgtattccgtgctcgtactgtgactgatgctccacccttcgatgcaagcaacattacttcactacaactcatgtttagcaaatttgaatacgatggaatactcaacccaacatttactgaaggtccgtttgagcttcctttttcgagtattagagcatacatcaatgagccgatcactccaaggttcgttcatgtgagttctgcgggagttacaagacctgaaagaccgggggagaggatttaattcgggaaagcggtattccgtacactattgtaaggccatgtgcattaactgaggaaccagctggagccgatctcatgtttgaccagggggacaacatcacaggaaagatatcaagggaagaagttgcccgtatttgtgtagcagctctggcaagcccagatgctgtgggcaaaactttcgaggtcaagagcactgttccattcagcgaaccgtatgtgattgaccctgcaaatcctcctcctgaaaaggactatgaagtatatttcaaagaactcaaagaaggcatcacgggtaaagaggcgttagaggcaacacctgctcaagtttgaagatgtcgttgaattaagaatttcgtctgttttcttaaattctgacacagtaacccccactctgaatgtctaaagtcatctagaaacatagatgacactaatgctaaattttgtagctgaagatcagaccaataaatattcccaagaacacattactgttaggttgggggatcattaaactcgagctaagacacaaatatgtagatgaaattagtgctgctgttcatgccttcgttggagttagccattacaggacacaagaatttagtaagaggtttggtaaa

SEQ ID NO: 24774 - DNA, 3428 bp, Zea Mays
atgacccacccacccacagccacacaggccgagctgaagggagggggactgcctgcgggctgcggcttccggcgcaagatgccatgtggactccggatgactcgaaagtccatccatctcctctctatctctctatctatctatttcacgcctccacggctccacggctgctgccagcctgactagtgaggtgattgccgcagcggcggtcggccagagcgcgtgtgctcctccccagcataatcccaccaccatcgcgcacccgcccacctcaagcgagcggccccaattcccagccaccgcaagtggcttaaccctcgctcccgcacccccactcttccaccgcacgcacccgcgcgagcgagtgcggcagatcgcggccggccgctgggtccggtgcagttccgggctgcggcgccgggccacagttgatgcggacgatccgaggaggacgggacgggatggcggcttcggcggcgcctgggtcggctgggaggcaggcgcgcggagtcgcggcagcggcgaccggaaacgcggtatttaagagtggccctctcttcatatcatcgaaaggaattggatggaaaacgtggaaaaaacgctggttcatcctcacacgaacatcactggttttcttcaagagtgatcctagtacgttaccacagagaagtgaagtgaaccttacattgggaggaattgaccttaataattctgggagtgtagtagtcagggaagacaaaaggctactgactgtcctttttccagatggccgtgatggccgtgccttcaccttgaaggcagaaagttctgaagatttgtttgagtggaaaacagcgctggaagaagctcttgcacaagctccaaatgcagctcttgtgatggggcataatggaatatttcgcaatgacacaacagatgtatatgaaggggctattccgaattggggaaagaagagacctatcaaatcaatagttgttggcaggccaatactgcttgcactggaagatatagatggcagtccttcttttctggaaaaagctttgtgtttccttgagaaacatggaatgaaggtggaaggaattttgcgtcaagctgcagatgtggaggaggttgacaggagattgcaagaatatgagcaaggaaggacagaatttgcaccagaagaggatgctcatgttgttggtgactgtgtaaagcatgttctccgtgagcttccatcttctcctgttccagcttcgtgctgtacagcattattggaagctttccgtctggaaaccaaggaatctcagatcaaatccatgcgtgcagcaatatctgaaacatttcctgagcctaataggcggctgctacagagacttttgaaaatgatgcataccattgcttctcatactgccgagaatagaatgactccatcagcagttgctgcatgtatggccccgctcttgttgcgtccccttcttgctggtgaatgcgagatggaagatgacttagacatgaatggtgacagtgctgctcagcttattgccgctgcaaatgctgctaacagtgctcaaggcattgtaactactctattagaggaatacaagagtatattcaatgatgagcactttaggtgctccttatcacctgattctcaaacaggagatagtggaagtgaagaatcaactgatgacgaaactgtggataccaagggtaatggatttcatgatgcggaaaatgatgtagatcaagaattagatgatgccgagcgaatgctgagtggaaaattcactgaaaccagtgcaagtgcttgtgctgacctctatgaccacaaggaagttaatggcaatagttcagacactgagctctttgttgaggatcacacatttgaatcaaatgtagatttaaatgatgctcccctaagtcgtttaacagaaaatggaaagggtccatcaaatctgatgtccgctcatgaaactccattatcagtgggagagattcttctgtctttggatgctggaattccattaccttgtcgtgcagctgaatattctagcaaacccaatggaactcagcagcatgtgaagcgtactaacttatggggatggagcaatgtgagaaagggccaacgatcggagttagttgatccatcaggtgaagaagagcttgctattcaacgacttgaggtaatgaagaatgacttgcagatcaggattgcaaaggaggctagaggcaatgcaatcctacaggcaagtttggaaagaagaaaacaagcactacacgagcgtcgtgtggctctggaacaggatgtgtcaaggttgcaagagcagctacaggctgaaagggatcttagagctgcactggaggttgggctaagcatgtcttcttcacaattttctagctcactctccatggactcgaagacaaagtcagagcttgaggaaattgctctcgcagaagctgatgttgcaagattaaaacagaaggttgcagagctgcatttccaactcaatcaacagcgccagcaccagtatggctcttccgtagatgcaaatgatcatcctcaacaccttctaaatcatctctcgcagaacattgtccaaacaggatttgataggagcgttgctttctgtaatcaagagaagcaaagaaatgaggagagcctgccgagcacatcccactggagaagcatcaaacagcatgtgctatctcatggttcttcaaggcctttctcccgaaagcattcctcggacacctccttgagtgattctacaagtgtgcctgcagagggcgggccaatgttggtgaacatccctagaacaacgaaacagggtgtcgaatatgggagaccgccgtctgtgtcgtcatccactctggttgaactaacaaccaggctagatttcttcaaagaacggcggtcacaattgatggaacagctccacagcctcgatttagggcatggatccacgtcccatggtttcccatacaaaccttcatctccctggaacagcccaaagtaaagtaggggatgatcatttgctgcagtacgacgtctctgtatattcttggtatagaatctcctttatgtttcactccatctttgtagagcctggtagtgagaatgtatatcccttgccttcacttgttttgctagtgcttgcagcggatctttttttagcatgattttgttttactgtatatgtaatgagttgaggagattgtgacacggcttttatatgttttagcaattttgttctattgtgtatgtaatgagttaaggggattgtgacacggtttttatatgttttcgcaatatatagatgcgtcttttttcttggggatatatagtccactgcaggtggagctactgttgtcatttcgaaaacaatgtggctgatccttgtaggcagctaattctctcccccaaatggattggaggaaacgagtgg

SEQ ID NO: 24775 - DNA, 311 bp, Zea Mays
atgcatctattaggggattgtgaagcacgaggaagtaatcataccacgttttttgggcgtcagtggtactaaccacggcagacagcggatcgtcggcaccgacccaacatcgatgacgaattgcctccaccccgagctaccacacgcccggtgaggcatttcgcaagactccatgagtcacagcgaattactgcgatcactcttcaaggtcaagcggcaatagaaggcgacattgaccacggcggcttggattcccccggaataatggcggtgaggctacgggttcacggtgagggaagggaggacgcagg

SEQ ID NO: 24776 - DNA, 124 bp, Zea Mays
tacatctcctgcgttgtgattggagtgggttataatcagtgttctttgtgaaggacagttgtgatataggacatttaatatctgcacaacagtatctgtttttcccgtaccaggaggaccaaca

SEQ ID NO: 24777 - DNA, 2941 bp, Zea Mays
cagttatttacatgcttttaagtattgaatcatgttacatttccctgtttgagtgatagcatacagaaaatttgctacctatggttgtgtgcttttatgaagaatacctgttttcaagaaatctagtgccaccttgcctggtccttgctctacttatggtgcacttgttcttgttttgttatgtactgtaggcaaaagattatgggagatgcatagcagcaaaggtccctgagattgaacataatatgtgttccaaggagtttctagcactcagagcatgcatgcagactgtggttaagaacaaggcttgaggctccatatttataggaagtttgatactaatctcttttggtaattgctgcggatttttgtcatcttaaaaagtagaacctcattttcttggctaaacaatcagtagagcctaagcacgcaagagacaaagaaaatgttgggcaatcagatacaagggggcttgggcacatctggggcactgtctcatgcttatgttcagcatcctccgctgcgatgtgacataccagacactcagggtctgttctatgatgatgcaaataagttccttatagctccaactgctgatcggatattgtactggaaaacaattctacctactccatctggacctccaaactctgatccagttaatgaaggacctgtcttgtcagttcgatattcgctggatcataaagttattgggattcaacgatccagacatgaaattgagtttagaaatagggaaacaggggagacttgtagcaaaaagtgcagagctgattcagaaactgtacttggctttttctggacagattgcccaacatgtgatgttatacttgtaaaaacaagtggtcttgatcttcttgcctacgagcctcagccccatgcttttcacttggtggaatcgaagaagttcaatgtgagctggtatctttacacacatgaaagtaggctgattctacttgcttctggaatgcaatgcacgatgtttactggctatcagttttctgctggtgggattgtcaaaataccgaagtttgagatgatgatgtctaaaagtgaagcaaacaacaagcctgttctagctgcagatgatgtttacattgtaacagtctatggtaggatttattgcttgcagcttgacagagttagtatgtcattgaatctatatcgcttttaccgtgatgctgttgtacaacagtgtactctgccaacatactcaagcagaattgcagttagtgccgttgacaacataattatggttcaccaaatagatgcaaaagtagtcatgctttacgatgtgtccctggattcttatgccccagtttctgcaccacttccactgctattgagaggactgcccatcaatagtagacaagtatctcagactgcggatagccagtctagtgcatacggtggaaccatctatggagaaggttggaacttcctcattccagacctcatctgtgatgctgagaatgggctcttatggaagctccatttagatctggcggctattgctgctagtagttctgatgctccttcaattttggaattccttcagagacgaaagtctgacccaagcatggttaagactctatgcctagctatagttcggacaatcatcctggaaaggaggtcagtgcccacagttgctaaggcgatggatgttgtccttgattcctacacgcgtttgatgaaaatgggaggggcttttcctggggttaggcgaatacatgagcaaaatcagcagtcaggtagtcagcctattgatggctcccatgtggtttctcaggaatccagtcctggaacaacagttagtcctgctgtgaacccagaccacggaagtgaggctgtggatatatatgtgcagtcaaatccaggagttgagcatacaatagacaggggattactaaatataaacatatcttctgattctgtggacaatacatctgatgctgtcgacaaacgacagcaagctgtaggcgaagctagccgaccattgtcttcaggcacaatgacgcaacatggacaacatgctggaaccgtggcaatttctccaattgagatgttccagtctgtctttacacttgttgaagatgaaatgatgggtgatcctgcatatcttattgctgtcatcatagagtttctacggagtgtctcaaaggctgggcttaaggctcctcacaacctttatgtgatgacggcgacactactagctcgtagcaaccgttacgctgaaatagcattgtttgtgtcaaacaagattcttgagccgtgtaaagaactggcaatgcaacttatggagctgggtctgcagcacccgccaacgaggaagctgggcatggacatgctgagggagcgaggcctgcatcacgactacgtgactgcgatgctgcaagatgggtactacttggaggccctgcgctatgccagaaaatacaaggtgatcaccgtgcagcctgccctatttctggagaaagccctggcgaagaacagcgcccacaacctggctgcagtgctgagcttcttctgcgagttcactccgagcttcaaggccacatcggactttgtcagataccggcatattctgtctgaaatggtttgaacagctttccgttgtgcaaacttgttgtcccgaaatgacttggcacgtcctctgtaacaagcaacgtcacctcggagggtacttttatttaattcttttggtccctcttgcagaaaataatattttattgttgtgaataaaaaaacgttgcaattaccgatgaaaaacaagtctggcttgaggctaagatgatcgcttcccgctcgccgaccatgcagctagccatctcgtcacttatgctactcctagctatggatggccaaataggtgttaaatgggcatacactaaatacggtatttctagtagtgcttcggtatagc

SEQ ID NO: 24778 - DNA, 2768 bp, Zea Mays
cgcaccctgatcccgcacaccagtcctgctcatggctccccgaaaccgtcgccccagcctccctcccctccccggctcccccgatttcagctgcccccgaactccgtcccctgttgtccctacctcgattctgccgccgcaaacgccgatgtgagtcgtccgatcccacccgcaaacgccgctccccgcctcgaggctcgccggaacggacgcctggataccgcggccgcaacccaccgccgcgcagggaggttgcgcccgcactaaaatggagcacagggaggctttgccccccacaactcggaggacgtgtgcaggccggagggcatgggggaactcgtgttgaggtctatgcatcaacatcttcttcaaggctataagaatgttggggggttgtacaactccatagcttggtgatcacggtggaggactacaacagctcccgcagaaggcctgccagcttgttcgccatggacctcaaccacaacaagctcgatctcttctactgactgctggtgtgcatcagcaccgtcaaccttcatgcatcccctagttcatgtaccggtactttggccgcggcagagtcgacatctgagatatatgaggccttggaattgaggaatggtggatctgattattttgtcaagggtgttcttaagatattgctaaaggaggtgctcgcagggaggaggacctcaacgtggtgggcatactttgcagggtgcagagatactgtccaaggaaggaatcagtgctgaggtaattccttttgtaaacgttatagtttcactgatcagtgcacgcacccagttacaagtcggattccacgtgcccacgccgtccgcgcaagtttgcatcaaagcgctggggaggatggaatggcagatttgcattaaaccagcgacaccacttcataaccagcaggcaggcaacacactccttcagatcggtgggatgttcgaaaaagataagcccttgtaacctttgtatgcatagtaggcaatccttgtgtagtagaacccagggatgaacattacaatgcccaacatcatgaagaaaattcctgatacaacataaagggccataagtttaggtaaagggagtgaaaatattcatgcataagcactgcatttcatttgaataagtacttaactaaaactgctatatgaaagggttcaaaatgcatcagtacttgaaaggtgaatcagcatccatgcaaattatcaagcctgtgcgagcaaatcacaacttgttctaatcaacaagcagtttagtgcaaatcacaacttgttcttaatattcccctatcataggcttctagcgtggagtatgaaaatatgtgatatatattgtggtggtattgttttctgatgaaatgaatattattaccccataagtggacacaggccagttgaaccaatacgaacccgatcaactacatcgatgcatcaccaacccaagcatcccaatccaaacaacttgtaatttgaaactagaggtacattatagtaccccttttctttttagggaactagactattaaggaacaccttttctctagtggggtacaagactaatataatcagtttgtgtgacccgcctgaaaactatgttctgttatcagtattttgtgccgtcacaattcagttagcagcatgcatgttcaattgttggtgtctttgttaagtttgagtagaaaagctcaatctagcatgctcttcgctctgttttactttccatgattcgttgattatctatgcagtttctgcacgattactatgagtatgtgctttcatatattgtttactcgatgacttgaatagtttacaacgtatgattattgcttaggaccctgcactactaaatcaggggactcgcttgagtcagaaaaacttaggaaccaagttttctctctaagttactgacttcattttctactgtttatagattgcgaactgaatttaaatcaaatacttcagtattggtctctagagaggaagctctgccaaccattactaataactgagaaggatttggcaatcgcttatctttgactcaataccttatgacctcggaaaggtttgaacccgtcagggactaaagatgccaaaggttgaagaagggtcacgagcaaagagggcatttactatcctttgcaatcttcaccgttggaaggattatgataactgcaatttcatttcttcttggatatgagctccacaagaggatgagacccctctcttcgccatatgtataggacctaccttcttgacatgacctatgcatccaaaagttctgagatgacccacttgtggtttactgccatgccatgcctcatatggagttttcccttgcacacttcttggcaatattatatatgaggaggtacctagaccatctaatcagattcgtacactaattgatgctattggctatgttattccttggctaattacacatgtgaagcaagctagaagctcatcttgtacccgcaacaagttgatacctgcagcacgtggacaaagctagatggcgtggacaaagctagatgggaagcctagtataattgcaaagtgaatcagttagattctagtagttactaaaatttttaagtgatatttgtatgatattgccactttggctttgcttctttgtgaacacaattggcagttactgaacatgtttgctatcgagttagttagcttcttgatattttgccaaggccaaaagcaatattattgagggtttataatttgattttttaacat

SEQ ID NO: 24779 - DNA, 740 bp, Zea Mays
ctgcctgcctgccgtcccagtataagcggcgagacagtcggggaggtgcgggcggtggccgacatgcaccagaggaaggcggagatggcgcggcagtccgacgcattcgtcgccctgcctggagggtatggcacgctggaggagctgctggaggtcatcacgtgggcgcagctgggcatccaccacaagccggtcgggctgctgaacgtggacggctactacaactcgctgctgaccttcatcgacaaggccgtggaggagggcttcatcaaccccagcgcccgccgcatcatcgtgctcgcgcccaccgcgcaggagctcatggacaagctcgaggagtacgagccttaccacgacagggtggcgtccacgctcaactgggagaccacgatggaccacctggcctactgacgcccacgctgccagagccgccagcaggcgactgggacgacatctctgatccatcgatgccattcaggaaacaagcttttagcttgccgtcagattggggcttttgtttcgtttttaactgcatgcagatcggttttatttggagtgccggagggagagagaaaaaaaaaacaggttgattattcggttcgcgtagcaggagtacgtagtacgtgcttgttttgtgtatatggtgccttgtgtttgcttcccaccaacggggatgattgatggcttgcagtgttgtctctgtaccagttcaaaaaaaaaaaacccgaccggtttcccct

SEQ ID NO: 24780 - DNA, 1527 bp, Zea Mays
ggtaacgtatgctttagagtcatcactgcggacagcctgagtccaccccccgtccctttccctctcctacctccacctccacgacaacaagcaaatccccatccagttccaaaccctaactcaaatgctcgctttgactgcctcagcctcatccgcttcgtcccatccttatcgccacgcctccgcgcacactcgtcgcccccgcctacgtgcggtcctcgcgatggcgggctccgacgacccccgtgcagcgcccgccagatcggtcgccgtcgtcggcgccggggtcagcgggctcgcggcggcgtacaggctcagacagagcggcgtgaacgtaacggtgttcgaagcggccgacagggcgggaggaaagatacggaccaattccgagggcgggtttgtctgggatgaaggagctaacaccatgacagaaggtgaatgggaggccagtagactgattgatgatcttggtctacaagacaaacagcacctaactcccaacacaagcgttacattgtcaaagatggagcaccagcactggtaaaagggctttgatgtaatcatgcatgtctctcttttcgtcatgtattctgcctcacttttgaatatcctgccttttggtctcataagattccttcggatcccatttcgctaatgaaaagcagtgttctttcgacaaaatcaaaggtatgttcagccattgagtacaaactgccgagtgccgactaacaaaatgtcataacattgctagtatcaatgcctaccatcatcaattgaagtagtttgttagttactttaaggtaactacttgataaattcttatattcctccatttatttttccttcaagctatgtgtttatgatctgcggtgattatgtcattttattctaaaaaaaactcgacctgcggagggtaagacaacccctggacattatattaagaagaccttctcaagtgggttgagaaaaccctcaaacccctgctccacccatacacagcggcaccgtagcccatgtgagaatgacagcgattggggccatgcattagacctgtgctttggcgtgggacggacgaggggatttcccccgaacccctgccgtagcccatgtgagaatgaccgcaactagggccggacattagacttgtgctttagcgtggaacagatgaggagatttccccccgaacctctgccacacccatacacaacggcactgtagcccatatgagaatgaccgcgaccagagccggacattagacatgttctttggcgtgggacagacgagtggaatttttaaccttagattgaaattcactctcacagggagttgaactcaggacatgagggtgctactcagaccacgtaaccaactcagttagaggccttcgtatgtcattatgttttaactgaattatgttttatctgtggctctttgaagattgcgttattttttgaaccatttctctacaagaaagctaacacaagaaactctggaaaagtgtctgaggagcacttgagtgagaggttg

SEQ ID NO: 24781 - DNA, 160 bp, Zea Mays
ttagaaaaacatttcctgaattcctagtttcttctaagccttaagttttgtgtagctgtccctgacctgaactagcagtggcacactccctgccttgtaggagtaatggggaaataagccagtgacgcatttccttttccattatctagcctagagtttt

SEQ ID NO: 24782 - DNA, 1988 bp, Zea Mays
caggcgctgaggcgcagacgagccgagccaagccgcgagacgggacacacacgagcgcacgtcccgaggccaactcgagagcgtggagagtcgagagcccaccacccgcgacctaacccggtgacctctctcccctcccaggctctcccacccacctttctcctctccttcattcctccccgtcccgcgtcgcgtcccacgccgccgcacctccgcggcagcgctactcctcgccgtgacgtcggggaggcctcgctcgggggagggctgcctgcctgcctggctgggtgtcagtcggccgtagaggaggaggggggcggaggagcttgatctggggcacctgccccccctcccctgcgccgtcgggatgtacatgccgccgccgccgcccaccggcggcgccggcgagcagcctaggctttaccaggtctggcggggaagcaacgaattcttcttgcagggaagattcatatttgggcctgatgtgagatctgtgtttctcactatgatcctcatcatcgcaccagtggttgtcttctgtctgtttgttgcaaggcatctcataaatgatttccccgatagctggggaatctcagtgatggtagtagtggttgtcttcactatttatgatttgacgttgcttctttgtacctctggtagagatcctggtataataccccggaattctcatcctcctgaacctgaatccattgatgggatcaacgacacgggtgttcagactccacaacaatttcgtttgcctcgcacaaaggaagtacttgtaaatgggatcagtgtacgggtcaaatactgtgatacttgcatgctgtaccgaccacctcgatgctcacactgttccatttgcaataactgtgtggaacggtttgatcatcactgtccatgggtcggccagtgcataggactgcgtaattatcggttcttctatatgtttgtattctcgacgacattgctctgcctctatgtatttgccttctgttgggtgtatgtgatcaagattagagctgctgagcaatcgtcagtttggaaggccttgctgaagacaccagcatcagttgctctgattatctactgttttctctgtgtatggtttgtgggtggtttatctgtcttccatttatacctgatgagcactaaccagacaacatatgagaatttcagatatcgctatgatcggcgcgataacccatataacaaaggtgttctgaacaattttctagagatattctgcactgctatccccccttcgaagaacaatttccgggcaagggtgacagcggggcaagggctgcagcaaacgcgctcacagtccaggggtttcatgagccccagcatgggcaagcccattggagatcttgaaatggacaggaagccagtagcaccttgggacgagccaaggacggcggctgatatcagggacttggaagcagggcttggggtcatgttcgatgagaaagagggcagggtagctcatgcatccccagatctgagcagagaccttccagcagagttcgtggaaggccgatctggtatgcactcgaggcagtcaagctgggttcagagaggagacgcaatcgaagcgtcggcggtgcaaatggctaatgcgcgcaccacggaagctagcaacaatgttgcctggagcggtacacattaacccaaaaaatgataaaaagaaaaggaggaactatggtgtgttggcgatgtctccaagtgaacccccgtgtgtttgttgccacgtgtgctgctccgggttccaacggatgctgtgcttggtttgccacaccagcgctgcgtgctttgggtactcgcaagtggcatctgggcaccccgctcccatgcaaacttgttcttggtgtaagcctggaaatctgctctgtatggttggcattgttgtatttgcagatgtggacatggtacttgctagtgtagaagaatgacattgctgagaaattggcttggaactttttgca

SEQ ID NO: 24783 - DNA, 1661 bp, Zea Mays
cccgccaatcaaactgaatgctctcgagctgatgctgctggagcagctccattatcaaagacactgttagacctcaaggattcctgctggagatttttaaggccacatacaatccgaggaactgctttaggatccatagcattggttgcgagagccttgatagagaattcccatctgataaactggtggttgatattcaaagcattctatggacttggggcattgatatttggcaatggttacatagttgggattaatcagatctatgatgttgctattgacaagtttttcaattgttatatcaaactttggacctttcattacctctctatactgccttggcctatttcttggcactatatattctgttcctccattcagactgaagagatatccggttgctgcttttcttatcattgcaacggttcgtggtttccttctcaactttggcgtgtactatgctactagggctgcactaggtcttacattccaatggagctcccctgttgctttcattacatgcttcgtgacactatttgctttggtcattgctataaccaaagatctccctgatgttgaaggagatcgcaagtatcaaatatcaactttggcaacaaagcttggtgtcagaaatattgcattccttggatctggtttattattagcaaactatattgctgctattgctgtagcttttaccatgcctcaggatttcaggtgcactgtaatggttcctgtgcatgctgtccttgctggtggtttaattttccagacatgggttctggagcaagcgaagtacagaaaggatgctatttcgcagtactatcggttcatctggaatctcttctatgctgaatatatcttcttcccgttaatatagagaggtgagtttcctgattagcattcagcatccatgaccccttgcttctgacatttgtctgcacaaaaaaatgtcagatcctgtagttcatcttgatcttgggctacagcctaattcatggtgaaaagagggagaagttggcaaagtgaggtctgttgtgcatattttcaacggaaacaatggagtagcaatattgctatgctagggttctgaagttgtaggagcttttctaagcttttacgatgttgaaggcgttgttggagctgtggaagctgttttcctttttttccttttgtatcaacagtgtcgcgttctgtacggtcttacttggaagtgctttgacctttgagcacatgagttgaagcttgagatctggtcccgaacaggtggcggtggaacggccaagacaagcttgtttcatgccactcgaggtcgaggctaaaccactacggcgtgctcttccatgaaacgcagaaaactaaggaaatggctatatatatggtgcaatacgttgtatattttctgagtttcagctcgtatatatagtaggaacctcaacttttaccccatcgattggaagactgaaacttcttgcatgcgtatgtatgcctgtgggtatgtaaaaaccttggcccgcacaaagctacatgttacagaactttcagctcgatggatcggtgaaaaaagtgtcctattttgcgacctggttttcctgcagcttcgtccctcgtagcatgtgacagcaacgcggcaaaggatgaacagcgtgacggcgaagaag

SEQ ID NO: 24784 - DNA, 3227 bp, Zea Mays
atgctgcgtgcggcggcggctgccgccgccatattcccggcgcgggtcgccgctgcgccggctgctgcggcggcggaggaacttaggtatccgctgctcagggttattgggacgctgaggggcagccgcggctcggtgctgctggggaggagggtgcgtttctgctccaactcctccgcgagcgactccgaagtggcggcggcagatgcggaggcgaatgccgaggatgcgaccgttgcggaggaggaggcgggcagcaaggcgtcttccgccatcgtgccgaccagcaccaatatcgacgactgcctctctgttatagcgttacctcttccacatcggccactctttcctggattttacatgccgatctatgtaaaggaccaaaagctgttgcaagccctaatagaaaatcgcaaaagatcagctccgtatgctggtgcctttctcgtgaaagatgaagaaggtactgaccctaacattgtgactggttcagattcagagaaaagcattggtgatctcaaagggaaagacttgctgaagcgtcttcatgaagttgggacgcttgctcagattacaagcattcaaggggatcaggtagttctacttggtcacagacgtttacagataactgagatggtcgaagaggatccactcacagttaaagttgatcatctaaaggaaaagccctacaacaaggatgatgatgttataaaagctacctcattcgaagttatatcaactttaagggaagttctaaggacaagttccctttggaaggatcatgtgcaaacctacacacagcacattggtgacttcaactaccaacggctagcagattttggtgctgctatctctggtgccaacaagttgctttgccaggaggtgcttgaggaattagatgtatacaagcgtctgaagttcactcttgagttagtaaaaaaggagatggagattagtaagctacagcaatccatagcaaaagcaattgaagaaaagattagtggagatcagcgacgttatttgttgaatgaacaacttaaggcaatcaagaaggagctcggtttggagactgatgataaaacagcattatctgcaaaatttagggaacgtatagaatcaaagaaggacagatgtccttctcatgttttacaagtcattgaagaagagcttaccaagcttcagcttttagaagccagctctagtgagttcagtgtaactcgtaattatttggactggctgacagtattgccatggggaaattatagtgatgaaaactttgatgtccaccgtgctcagaaaattctcgatgaagaccattatggtttgagtgacgtgaaagagaggatactggaattcatagcagttgggaagttaagagggacttcacaaggcaagatcatatgtctttctgggccaccaggagttgggaaaactagtattggtcgttcaattgcacgtgcactgaaccgccagttctacaggttttctgttggaggtttggctgatgtggctgaaatcaagggccatcggcgcacgtatgttggtgcgatgccagggaagatggtgcagtgtcttaaatcagttggaacagcaaatcctctagtattgatagatgagattgacaagcttgggaagggtcattctggggatccagctagtgcattgttggaactccttgatcctgagcagaatgttaatttcttagatcactaccttgatgttcctattgacctatccaaggttgaagttacagatgctgcccttcttgctcttattgaaaattattgtcgagaagctggagtgaggaaccttcaaaagcatattgagaaaatttaccgtaagattgctctccagcttgttcgccaaggagtatcgaatgagccagaccaggagtctctcggtgtcactgtaaatgaggaatctaatagtggtgatagcatcacagcaaaagatgagattgtgaaggatcctgctgtagaagatgcttcagtcgccaacaatgttacaaatcctgcctctgaggaagctaatgaagtaaatttgacaactgaagcaccaaaagaagacagcacatctaagggcaacaagaaaacagatggagtagcagaagatgcagcagacaaggcaactgagaaggttgtggtagattcatcaaaccttggtgattttgttgggaaacctgtgttccaggctgagcgtatatatgagcagactcctgttggagtggtcatgggtttagcttggactgctatgggtggttctactttgtacatcgaaacaacaaaagtggaggaaagggaagggaaaggtgaccttgtgctgacaggacagcttggagatgtaatgaaagagagtgctcagattgcgcacacagttggcagaactgtattactggagaaagagccagataatcatttttttgcaaactcgaaggtgcacttgcatgttccagcagggtccaccccaaaggatggccctagtgctggatgcaccatgataacgtctatgctgtcgttagctatgggaaagcctgtcaagaaggacctcgcaatgacgggtgaagtaacattaactggaagaatcctcccaattggcggggtgaaagagaagacgattgcggcaaggagaagtgcgataaagacgctcatatttccggcagcgaataaaagggactttgacgagcttgcttctaatgtgaaggaaggactggaagttcattttgttgacacatacagtgaaatatatgatttggctttccagagtgacgccgggactgagatgatttagctttacattacaggattgagattttttccccttctctagatctggttacaggctaaataccaaagaagtttgtcagcagaggcagaccattgtaaccaagatgagtggagttaattgatatttacgagaaagaaaaataatatttctttttttggccccaatataacatcattgaatctaagagatttatttggctaggctgtacgtaactagtgtgctaggtggtggtattggccttttatattgttgggacttgggagtgtgggaaaaacagtactggtgcaccatctgttatttattttaagtgttttccaaaggcagcaaggtcatatacctcatatcataatttagccacaaatggcctgaatattttgtattttggtcatttttttttcgaaaaaatcacatttagacccctaaaccacttaattctgtttttg

SEQ ID NO: 24785 - DNA, 1336 bp, Zea Mays
atggcggtgaccacttaagcgtggtggcttctgagttttgcctcgatttcgattctttctttttcccccacgtgcgccgccgcgaccttcctcgatcccatctcccaacgcccccgcctcgcctcgggatcccgccgccgctccatctgcctttgctcccccacccgcaggcagcgagcgacagcgacggcgagggatggccaaggccaggtcgttggcgaagcagaagcaggcgcagcaatcaaacggcggcggcggccacgcgctgtcctccaagctcgcccggtacctcgacccggaggcctccttggacaaggaccaactgctggacgcggtgcactggatccgccaggcggtggggctcatatgcggcctgctctggggagccgtccccctcgtcggcgccgtctggatcgcactgtcagttcctacctccccctaaccctccgtccctcccatcttctcgtcctccctcggccttgccttgtagatctgtagctcccccttcgcgcgcataagcgagatcgagctctttcttatacggtgtacatatacatgcgtaccctttgtaatttgttacaagatagataccagatcgagtttacggctgctcagggacgttgcgtcatggcgtggtcactgttaaattgatagcgcttgtgcgattggaatccatgagactggccggtttctcaattttgttggttggctaagggagtcagggagacagggacaatttcacaactgctacgagcggtcagatctgttgttagacccttgtgtttacttgtgagtttggggtctgatactccgattagctagttagtggtctgattagctgcacactagctgaattttccagttactacctctgtaaaacagtgcatttactttgccttttcttttgtcaacacccaaaatcctaattcctgctcaatggtactactgggtcacaattgtgtcaatatgtagctgcttacttcaacgatacagttttggcgggtcttctttgatgagtgtatcctatcgtgctctagagtctagactatcttcgggccataatgtaaatacatggttttctataatgagtcttggttgggactgagtgtacaatactttaaggtggccttagcaaacaggaaaaggcttgcagagtagaacaatttggatgattttctgctaagttttagatgaatgctaagcacacaacgtgctgcttgcaatataaaacgattttgttgccatgacctaaatgccgtaatccgttgctaaaactatgatgacttgtgggtttgatctttatttgagctcagcgtgtgaggctgtgagctcttac

SEQ ID NO: 24786 - DNA, 138 bp, Zea Mays
ttcttcttgtaatacttcttcttttccttcctctttcccctcttgtcgtcacccctgtcactatcacttgacataggacatttagctataaagtgatcgagcttaccacatttgtagcacacccttttagaacggggc

SEQ ID NO: 24787 - DNA, 1547 bp, Zea Mays
cgacaacaagtcctaaccctagccccggtagccgccaccgccaggctctacgactacggcccggccgtccaccgctcggccgtccaccggtccaccgctctacgcgacggctccatcgctcggctgctccaggctccagcgccctccaggctccagcagatcccggaagcaccgaccacggtccacggcgagtcggcgagcagacagcacaggcgcacaacagtgacggcgagcagacagcacaggcgcacagcctccgcgcatccgcggtccgcgtccggccgtgcagccgcgcagtatactggcttcctaaaggatcaatgtcggctatctctgatcagaagaaacgcaccttggaagcccttcagcaacagtatactgctgcaaaagctaagaaattgcaagatgaacaggttaagagtcagaagaagagcaattttaatacccctaagcctaaatgtgatgcaccaaggggaagcaaaggtccagaaatcactcctcgacgaacatatgcccaaccttctcataaaggtgtagcattttctagttctaattgtcaacaaaagccttccacgtcctcagaaaggtggagatgctgggaaaattacaaagggtgccaaaaagttgaaactggaaaaagggatccttttggataattatgttcagaggggttctagattagtggattcccaagcaagatctttgttgattcattcaaagcgatcaaaaaggcacatgtctctaaaacaacataagaaatgtggttcatttgatttagatggtacattccacaagtacgacctctataagccaatgcatgagatgtggaaggactatatcagagagcttatggatctgagcccgaaaaagaaatttactgagaaccttctttcagcagatcttcatggggcccttctaataggtgatccatatgctggcttactttattcaactttcttttaatccaatcatgcttatatgtctttgaggtatccagtggcagaatgcaaagctgcttcatataaaggtgtaaacggcatcatgattcgggatactgcagagacgtttggaattatatccgaggacaaccgcttccgagttgtaccaaaagctggttcagtgttcgtacttcaagcagatcgctggaagttcacactgattggcgacaagctctcgcccagggagaagttgaaggaggatcagcgtcaacaacgtgcacaatcgctaatcagatagtttccaatgtgccagctgttctctcaaaatttttgctccacgaaatacttgcttttgtttagctgttttaccctttttagtttgcctctaacattgaaggtagataatgggtgtctgtttttgcaactattgattttattttacacagcaagatgtaactgcaacggccacgccgtcattgtttaactgtcattcatgctctccatgataaatatatagagttaataggaatgggaatgaggttgacctactaatttgtcactacagaatctgccttcagcggtccactaaaactttagtattgtacatat

SEQ ID NO: 24788 - DNA, 2943 bp, Zea Mays
attattccgctcgtttctcaggagtcaggacctcgccccggccccaatcccttctccttcgtgcagctgcgcgccagatcgacttcaccgtcgcaactcgtgctgacggtccggccagcatcgcctcctgctcgcgacctcgcccagctccctccaccctccggtgagacgcagatctcctgctcgtggcctcgcccagctccctccaccctccggtgagacacagatcttggtgcgacggggcactacggaggcagggtagtgcggttgtgcgtgtgttggtggcctggttctagcaaccgagatggatagaagttgggtgcatgctagactattttctcatgaatatataaatggcgtcaaagaatttatgagcttcattcatgggaaatttggagaggatgaagaaatcttatgtccatgtagtagatgccttaatcaaaagtaccaacatcaagctcttgtggagaggcatatattgatgaatggcatggaaagtacatatactcgatggattcatcatggagagaaccttgatgtatatggtttgttaaatgagtcaggtatgactgaggacaacagctatgatgatggtaatttgaatgggttgttacaagacttagacagcgcagagaaagataagcaagacaatgaaaatgagaatgatccagaacctaatgacaaggattcattttttaaatcggtgatgaaagaggctaagcgtcaactttatccaggttgtacgaaattttcgaagttgtcatttgtggtaaaacttcttgatatgaagtcattgtataggatatgcaactctgcattttctgcaatattaaaactgttaggtgatgctttcccagaatgcaatacactccccaaatcatattatgaagcaaagagcattttaaagaaattaggtcttggatatgaatcaatacatgtgtgctataataattgtgtgctcttcagaaaagaatatagcaagcttgacaattgccctatttgtggtctctcaagatgggttgatgttgaaggaaagaagattccacagaaagtgttacgccattttccgttgatacctaggctacagaggatgtttgtgaacaaagaaacagcagaacaagcacagtggcacaagctgaagggaaatcctaaggaaaatgaaatgagtcacccagctgatggtgaggcatggcaagattttgatagaaaatatccaaattttgcaaaagatgccagaaaccttagacttggcttagcaactgatgggtttaaccccttttcggaaaaaaacactaaatacagcatgtggcctgtacttgttgtgccatacaacctttcaccttgggcgtgcatggaggagtcaaatttcatgatggctttacttattcctggtcctacatcacctggaaaggacttcgatatttttttagagcctcttatagaagatttacttgagctttggacaggtgtacctacttacgatgctctaactggacaaaaatttaacctacgtgctgcagttttatggtgcatccacgattatccagctttgggcactctttcagggcgtaaaacaaaaggtttttttgcatgtattcattgtgacaagcaacctctttcatacagcctaaggagcaaaattggttattttgggcattttcgtttccttccggtgggacatcgcttgcgcaaaaataatgaatttgttggtcttcatgaaagcaatgatcccccaggtaaattctctatggaagagttgatggctgaattggagagagtcaaacatgttaggcctgggaagcaacaaggaagtaggaaaaggaaacgttctaatttggacaaggatcatgtggtaatttggagtcggatggttagtttatggaagttaccatattggaagaatttgaaactgagacataatcttgatatcatgcacattgagaaaaacatatgtgaaaacttgattgggactattctcaatatacccgggaagacaaaggatacaattaaagctaggtttgatctgaaagatatgggtattagaaaggagttgcattttagagggaatgtagattcatgtgagatgccttatgcaagatataccttgcccacagaatataagaaggccttttgtgattttttgcgggaggtgaagtttccagatggatttgcatccaacatatcaagatgtttaaatgctgagggaaccaaattacaagggcttaaaacacatgattgtcacattcttttgcaaagaatattaccagttgccatgagaggatttttggacaaggatatttatgaagcactagcggatctggggaaattttttagggaattgtgcagcagaactcttaaaaaggatgtgttggctgaaatgaggaaagaaattccaataattttggtgaagcttgagaaaatatttcccccagctttctttgatgtgatggtgcatctagctgtgcatctacctgatgaggcattattgcgaggtcctgtgcattatggttggatgtacccaattgaaaggcgattgtatactttgaagcgctatgtgaggaacagggcacgaccggaaggctcaatcgctgaggcatatattgcggacgagtgcttgacattttgctctaaatacatggatgatgtcgaaacaaaatttaatcgggaaccaagaaataaagggttttctaatgaggaagcctataccgttgatgtttttgggcatggagttaattttacctctgcgcctgaactagtgtatgatgatagtgccattgatcaaatggtatggtatgttctgaacaattgtagtcaggttgacaaatatatgagaatgttcagagatgaattagagagagatggcatgcctaacattgaaagaacattgcgacaaggattccagacttggttcagaacccatatcctcagaatgcggaatataaa

SEQ ID NO: 24789 - DNA, 2623 bp, Zea Mays
tacgcacggacgacatcgaggaaccctagactagagcacattgcacgggcgacggcgcgccaccggtgactggcgtcccctcctcggtcctcactccccagcatggcgacgccctgccgcagcagaaacgatcaaccgatcggaaaacattaatttgtattcgatttgaaagcgcacccggcacctgctccgttcctgcgctgcttggcttccggtctgtgtcaaagcttgcatctcacgcgagtcgcacaaggacgaaccctatacagctccaggaggtcggtgccctagccacctaggccaccttcctggagaccgggcggcgacgacggggacgaacgaccgcgatgggcttcgagcgtgtggagctgcggtgtcccagggagctggacccacggccgagctggacgctcggcgatgtgctcgctgagcttgacgcgctggatgccacccgccgcgctgcgccacccacgcccctgaagcagccgccggattgggctaacggtggtggtgagaaggcctttgtgatgcgggttgatgacgacgacgaagacgacacagaagatgaagacgatggtacaagtggtgggaagtcccgggctctggtggccaaaggagcaaggttctcgtgtaatgatcttgcatcaagtgattcagaggatgaattagatggtcaggttgccccataccacttaatggagaaaagggacctagcgaagagcattcttcttgagctggaacacgagcatcatctaaaagttcaagaagaagttagaagtaagctagcttcattggaggtatgccaccaaaatgaaattcggagaacgatctctgcatttgcccgacttcagaaatatgcagaatcaagaaaggagatagacagaagacttgatgtacacttccagagaagaataagtactcgataaacacttatctatggtccaaagggatcatgaacaaaaatcccagattgttgaacgccgaataagagatgatgcagctcttgaagaagctaaaagaaaagagcaagctgtcaaggaagaaaagttaaggcaggaaagagcccagcaagaagcagaggctagacagaaggaagctgcaaaattagcagctgaagcacgaaaaacagcatttgaggctgctaaaaaggaagcagcagaaaaggaagcagcagaaaaggaggctgctaaattgagagatgcagcagcttctcaacctagtccgaattcccagaataatactgcagaaggcattaaagtttttggcgataaatacgcactagaagcagagtcacggaggcatgcattagtacagaatcaagtgccagaaaacattcatcacagcaaggaattcagcaaatatgaccgacaaattgccaaatccataagtaaacttatgccaactactgacagtgtcagaacaagggctagtgagcttgttaaagctttaaatggacaggattgtccccgtccaatctcttgttgtctatttgctaacaagattatttccattgtcaagagtagaaatacaaaggacaagacctttggaaatttggcctttgcgtgtggatatgtcatgctattagttacaaatcaggtaccagacgcaatggattatcttttagctgagttcaacagagtttgcatatacacggttccaaagcatatgcatgctttgaatgcacaagcacgaaatagagattattacagactgataggttaccaggaagaaaatggacagctcgagagcactgaaagttatctaacatacgtcgttgcatatgttaaactctacgcagcaatgattcagacggaaatcaaaggtgttcgtcatcctcatggtttagctgagggatggaagtggcttgccatgttcctcaattctctcccagctactacagccactgcatgtgcccttcacgctttcctcaagatggctggttttgcacttcacaagaaatatgggtcacagttcatgaaaatcctggatgtaatatcacggtgctttttaccagctttgaaggaacaaggcaacaagatgcaggctgaggctgtcaacaatctacagaattacctgaacgacaagatctacctggaggaaccagaagggcagtacctcgtccagcaactactatccaaggagttgttcatgtaaagatcaaaacaccagatcggtatgagacatcgtgtgtgatcgtctgaagggcggtacctcgtccaagctaccactatcgcaagaggggcctcatgtagagatgaaagcaccagatcgatatggagctgttcgtgtttcagaaacacgatcgagcctttcaaatctcacgaacattatttatgggacagtcccccagatcatttcccccctctgcacgggatcctgacgatgtatttgtttatgtgacttgtatccggccaaggacaggtatgataggttgaggttttatgtttgttgtagttgtacatgtactactagaatcgtgaccagaacaaaataatactcgaccacttcggcgtgggcccagcggtggccaaagtcaaggtcaacttgacacgcgacactttgtctactctgtttgcaatgaaatctaatgtttgtgcttcaaacaaaatagttttaatataaa

SEQ ID NO: 24790 - DNA, 1072 bp, Zea Mays
gtctgtcttcacttcatgtatctttgtttagagaccttgccttgttggggcaggggacttgggacgacagagaggggagggcggagttggtgagcgtgctcgggatcagcgggtgacctcagagtcctttcttcctcttggaggaggagggctgcggcctgagcaggagacggagacatgggtagcttcgttaaactggcgaggagggcggtggagacggacgcgccggtcatggtcaagatacaagaactgcttcgaggggccaaggatgtcatgtcgcttgcgcagggagttgtttactggcaacctcctgagtcagcaatggctaaggtcgaaaaaataattagggaaccaacgctcagtaaatatggctctgatgatggtcttcccgagcttcgagaagcactttttgaaaagttacgcagagagaataagcttactaagtcatcagttatggtcactgctggtgcaaatcaagcttttgtgaacttggtcctcactctttgtgatgccggtgattctgttgtcatgtttgcaccatattatttcaatgcctacatgtcattccagatgacaggtgttactgacatattagttggtggttctgatcccaagacacttcatcctgatgttgattggttggagaaggttctgaaagaaaatgaccctatccctaaacttgttaccgttgtgaatccgggtaacccctctggagcttttattcccaggcctatgcttgagaggatttcagatctgtgcaaaaacgctggtgcatggcttgtggttgacaatacctatgagtaagtcaatactgtaaagcaataatttttcaaaagcagtaatatagtatttcgtggtacctgttagaaagaactgagaagagccgtgaattacggttgtagtagggacagatcatataagccattagaactctactccctcctcttgaaacagtatcaaaatgaaagccactctggtggcgtacacaggtaggagttctaggatacatcttagctgtttccacaaggacaggaaagccagaagattgtgcccataggaggctcagaaagtt

SEQ ID NO: 24791 - DNA, 1617 bp, Zea Mays
ctttcgagttgctgtgggagaagcaattgttgtacatgaggatgcagcaagagctatgggaaggaaacgcttatgaacaatagatacctggtcgtcctaatttcatgaagctacgacgaagagcaagctggcaagtttgaacgagaagctggacatcctagagcggaagctggaggtgcttgaagtccaagtgggcagcgcgacgaccaacccttccgtcttcaactaggaatcgcgggtttatatgtataaataaatagataaatgtaggtatgaatgttgcttgtaccaacgaattctggtcgctatcaatcatgtaatgtaatggattttgttattattattgtggtatgtgtaaagatgtgcagaattgaaaagataataatagtagaatggagattgggtgggggaagaaaagaaaaaaaggcaagtggtcctggtgctgtatcgccttgccaccacacaacaataactatctttcctccctttggtttggttggtttctttctctcctctctcctctcctctcctctccccgtggccacaccacagccgccggaagctcctcctcctcctcctccttctccatgagagagatctagcaaagcatagcctccttcctgctggcgggatctccttttgattcgtaacttataacgaaagaggaggaggcacagcaccttgtcaaatgatgaactctcagaagctgcagctgcccgttcaggatctgatgagtctgagagggagatcattcatcatcagcaaggttgctgcccatcccagttccagcaggaggcggcgtcctcgtggcctcgttgccgcggccggcagtgacgacgacgaatgcgcttcagctggtggtgagtccgagtcgtcgtcgtcgggcgggaaagacgatggcggcggcggcttgtcccgagaggatctggaacgcctggtcgggagtgacgaagatgccaagttcaatgggttggatcttgcaaacctcatcaggaagaagtacggtagatcgtacgatgtgacgctgataaagaaagagttcatggggaggaatctgctggccatgaatgtgatgtggaagtacagggagcaaagatcgttcccgctgagcgaggaggagtacctgctgcggctggacgatgtcgccaacacgctcaagtgctggggagccgtggcgcacgtgcgcaacacgctggagaagctcaaggagaggccgcgcatcggcaaggccgtcagcatcttcatcgacatggaccagaccggaggccgctccaacgaatggatttacaagtagcttcccactccatcgatcatgtatatgcatccatcgcccccatgaacaaacacattcatcaggtgtatggagaatgaatgtgggtaccaatttcatctccaacaatcaagcacatcgcaaagatcataccatcacatgatcttattgattcttagatcgcacctaagcatgtctcttgatattctcacatatgacaccatgcatgtatacaacgagctccttcatcaatactagttaagtattgcaatacgtccaagccgcatcaccaccatggctcatattgctcacactagtgtattatggactaatcatctctttatctg

SEQ ID NO: 24792 - DNA, 1975 bp, Zea Mays
cgcgattccccaccccgcgcccgcagcccccccccccgtcctcccggccgcagccgagcacagccgccgcgcccacaaatcacgcgactcccgcttccatgtcctcgcgtcctccattgcagccgcatacatagcgtcgccccttccatcgatggcagccagccgcgcccgcaaatcacgcgactcccccttccatggcgtcgcccccttccatccatggcaggtccgcgcccctacgccccaaatcacgcggatggaaggtatgcgcctcctctccctattgctcagtgtaggcagtccccaaatccgcgcgtccgcgccacctcctactctgcgctccccgttccatgtcacgcgcacctgctcccgcaccggagaacccaccgcaagccgacctcgtcctgagatggcggtggcgctgtgcttcccaggggtcgcgagggagtctctctctggacgcgcccgtcgccgcctccaagctcaggagggagcggcgcccggcccccgcgagcgtgaacccggggccacaatgcttgaggcggaggaggggcctggcggttcgctgccagacggggtccaccgcagcgcccttcctcaggacggaggagccccccgcggctgcggcgggggcaaggaatgcccaggcggggttcaccttcgtcatgaagttcggcggctcgtcgctcgcgtcagccgagcggatgcgggaggtggccggcctcatccttagcttcctcgacgagatgcctgtcgccgtcctctccgccatggggaagaccaccaataacctcctcctaggaccttccatttctagctctcagcgcctgagtcagggtgctcgattctttcgcttactagctaacaaggctagatgcgcgtgtgcctgattcgttgtctgtgtaggccgaagagaaggcggtgagctgcggcggaggaggggcatctgaaatccctgagctcgctgtcatcagggagctacatcttaggacaattgatgagctcggtttagataagtcgattgtttcaggggtagcgtaggaggtgttgtggcggcattatctaggaagcggtctgtggacatgaggcagatcaacccgaaggtgcctaaggaggaggctgtcaccatctccggtcgactcgtccagatcctctccgaccatgggcccctcaccatcggcaacacctagaacaacacgaaggtacccaatcaaccagtcagtcaggcagagtggcaaaagctggggagcgatgcaggcgtcagagcagcaacaacggaggactctgccagtgtagatgagaaggaaacacgcaaagagcatcaaaagcaagttcaacgatcttatgtcaacccatccacctctgaatgaggcatattcagatgtgtgtgtattcagagctcaatatgttacatcgaccttcccaacccgccggcagagcttaagaagctcaagcacaagaagtgcctcgtccagtccccccaactccttcatggatgtcaagtgccaacgatgcttcagcatgtccaattcgcttgtggcataggaatctcatcctagattcaatagaggggctgcaatgccggcatcgccatagctggaaatcgagcactgacggacaccgggcgccgagatgggccgtcttgtccaccgccgcaagaaccgcatgcgttggagccatccttacacctgctcctacttccgcgccagcaacccaacacgccgacgacacgagctcctccttataaaagtgacatctttattgtatagataacgaatggttatagttatttattcttgtgtccaagtggtattggatttttttagcttggggttaaagaaaagacagtcatgtactttgcatcttttttgtatttatgttttatgctaaattgtggaataacactatattagttgttagcaaagaatttctgagatattaaggttgatgataatatatgttgttatttcatttaatc

SEQ ID NO: 24793 - DNA, 1908 bp, Zea Mays
gcacaagcaaaggcgggggagagagctccgtgcagtcaccgtcgtgttcggaacgagcgagagagcgggagacgagtcgcggcgcctctgctgtgctgtcttcttctccccctctgctctgcttcggctcctcacgcggcctcgccgagacccgcagaacagggggttcagacttcttggtgagagcgatatgagtgtcccaggtcaatgctcatcccagccacaatttatcaccagcgttgggaggagtaaccgctccaatggccccggcactcctcttatcgaaagcatagatgttgatcaaattgttattccagagaaaaacagttggaagaacttattctcatacatagggcctggatttctcgtctcaattgcatatattgatcctggaaactttgagacggatctacaggctggagcacagtacaaatatgagcttctttggatcatacttgttgcatcctgtgctgctcttattattcaatcacttgcagccaggctaggggttgtgacagggaaacatcttgcagagcattgcagggctgagtatcccaaggtcacaaattttgtcttatggattcttgcagaacttgctgttgttgcatgtgacattcctgaagtaattggaactgcttttgctctaaacatgctgttcagaatcccagtatggtgtggtgttctaataactggactcagcactctaatgctcttattgctgcagcaatatggggtccgtaagctagaatttctgattgcatttctggtgttcttaatagcaacatgtttcttagttgaacttgggtattctaaaccaaatgctccagaagttgttaggggcctttttgttcctgaacttaaaggaaatggagctacaggccttgctatctcattacttggtgctatggtgatgccgcacaatctttttctgcactcagcattagtattgtcaagaaaagtgccacggtctgttcatgggattaaggaggcctgcagattctatacgattgaaagtgcatttgcccttacagttgcttttctcatcaacatatctatcatatctgtcagtggttctgtctgtggttcaggtaatttaaacccagaagatcaagcaaattgcagtgatctggacctaaataaggcttcatttttgttaaagaatgtccttggaaactggagctcaaagttgtttgcagttgctttgttggcatctggtcagagttctacaattacggggacatatgctggacaatatgtcatgcaggtttttggaacttataccttatttcagttctagttcgcaagttgaatggcaggttgttttatgatgcatattactcgaggcatttgatgttgatcagaagtaatcaagcatttgcttgcttgcaacattagtttgtttagctgttagatatgaaaagtacagaaaataaattagtacataactcttagatttgcaatgaacaagcttgggcttatgagtttcagtgccaacctccaaggttctcttggtcagctagattgcagagaaaaaggacagatacgggatcttcggatgaaaccctggatacgcaatcttgtcacgaggtccttggctatcctgccaagtttgatcgtgtcaattattggtggttcttcagcagctggccagttgattatcattgcatcgatgatactgtcatttgaactcccttttgctttagttccactccttaaattcaccagcagcaaaacaaagatggggcagcatacaaattcaatattcactgctgtgctgacatggatgatcggctcgtttattgttgtcatcaacacctactttctgataacaagctttgtgaaattgctcgtccagagcgggctgaccaccatttctcaagtattttccgattctcggttcaaatctgc

SEQ ID NO: 24794 - DNA, 3176 bp, Zea Mays
agccaagttttctctatctaatccagaaaatatcaaaaatacccctcccacccgcagccctaacaaaccggtccccttcgacctcctcctccgccgccggcgtcgaccgcgaccgccacctctcctcgtacgctacagtaggggcaggggcggcgattggtggctcttcctcctcctatgctgtgactcgaggagtatggcggatggggctattgtggtagccatttgccagtacggcggagagttcacttctggccccagtggtaatctgatatacagaggtggagaagcacatgccgttgatgttactcatgattcatcgctggagagcttcaaggatgagctgtccaaggtgttccatgttgatgtcactgacatgtcactcaagtactttcttcccaataatatgaaaacactcatcacaatatcatgtgaccgggatttgcaaaggatggttggttttactgcaaatgctgcgcatgtggatgtttttctgataagtagacaggagaacaggagtactataacacattctggagctacatctggctctgttgctagtggcgacaaaaggaaaagaccaacacccaaaaacaaggtaatcagaagcagcaaaccagctaccagtgctgcttgcaatgcacttcaagctatcacagataatgtgagacaaccaatttcagttattactgaaaatgaagacaacagggtttttcagttggaatttgggaatgacatcacatttaccaccacagctggaggtgcttccttcacatcagatattctcgatcagcaaaagcttgttcttgttgataatatccccaaggaagcagttagtttgtttgatgatgcattcaatccatatgttagttctgagatcatgcatgagccgcctcaggaacctaacaatcctattgtgttgtgggatgacattatcaaaggagttggtcaagaatttgataacgtgaaagatttccgtgctcagttgtgcaagtatgctattgggaaaggatttgtgtaccggttcataaaaaatgaaactactcgtgtcactgtaaaatgtggtgcagaaggaggctgcacctggcggttgcatgcatctgaatcatctcgtaacaagaaatttattatcaagagattgacagatgaacatacttgtggtggaggaagtggagagggtcagcgtcgagcaacacgacagtggttgactactatcattaaggagaagctgcatgataacccaaagttcaagccaaaggaacttgtaaaggaattatttgaagaatacggagttacactaacatattcacaggtctggcgaggcaaagaagtagcagagaaagagctgtatcatgctgtcagagagactcgcgatcagttaccttggtattgtcagaggctcgaggagacgaacccaggaagtataagtgtgctgtctccagtgttggatatgaaaacccgtcgtttttttgttgcattgcatgcttgtttgcatggctttataaatgggtgcaggcccctcttatttttggacaaggtcccactaaaagcaacgaatgagtacaagttgcttgtggccgctgctgttgatgcagatgatggtgtctttccgttggcatttaatgtggttgaagatgaaaattatgatagctggggttggttcttaatgcatctgaaaatagctctccaaactcacaactacccttgcaatggcatgacattcttgtccaacggacaaatgggtctggatgctgctgtttctcacgtgtttgaggatggcgaacatgccttctgtttgcatcatatcattgaggaattcaaaggagagctgaggaagggaccatggtcacaacaaattagggaggggatggttgaagatttcactcgtgcagcccaagcatgcagcatcgaggattttaatgcatccatcgagagcataaggaatatatccagtgaagctgctgactggatcatagcgagcaagccagagcattggtcagatgccattttccgaggcttccggtatgatcatttctccttgaacattgttgatgctttcgataactggataccagccaagaaggagagttccatagtgctgatggtagactcgctgagaattaagattaaggaagtaatagaatcaaggcttgaagcttgcaaggtgtggcaagggcctttaacacctaccatggaatacaaagtgcaggatgagatgctgaaggctggtaaaatgactgtgctgtgttcctccgatactgtatttgaagtgaggggcaacgcagttttcgtggttaatattggaaactgggaatgcacgtgccggcggtggcagctctccggcctcccctgcatgcatgccattgctgtgttcaacaggcttgggcgctgtttctatgactactgcccgaagttctttagaatagaaagctaccatctgacatactcgggaataatcttcccaatacctgacttggatagcgttgatttcagtgctggggcaaatctactcccactgcctcccaagcggcgcacgtcagataaaccgaggaggaagcggtctaaccccaacaagataagcactctcacacgactctgtagcaggtgcaaacaaacaggacacaacaaggcaacatgtgaagttcagttctagtggaaggcaacctcagaattaattcagcgtcaaaggtctcaagtttaggtatattgcagagaacatggtttcttttctcagagaacaagatctcaagttttttttaggctagtcagtttgactttttgatccatgcatcacacgaagatacgactaatgaattaaggatagttagaaggtttattcactcctgatgaatgctgtacttgtccataggatcttggtgaccactggtagaagccacggtacaaaccaccgtaagcagctgccacaactcttgtgtcaatttaactagtgtgggtgctcccttggataaagaccctaacgtggagttggcaatctgacaaaattaaaaagcacaggcaacttgctttgctttgttcagaacaccaaatattcattttcaaggtttaggattttgaaatttattttttcatttttaaaatgacttctgatgttatggtctaaactaaagttattaaatatgatctataactttgcagttgtcacattttatgtttga

SEQ ID NO: 24795 - DNA, 1691 bp, Zea Mays
cttcttcccggactcccagactcctcccaaaaccctcgcatcctctcccacgcatgtcacaatcgccatgaccgacagaaaccccgccgccgcctcaagcaagcgtcactgtgacctctccctcgacgatcccacgccgtcggccaagctccagcggtgctccgagccgtcagaaccaacgccggcggggaaaccgaacggcggcgcggcgacgggagaggagagcgagatgatggccggcgcacggaaccctagggcgcagaggtacctggtcgccgtggagtacattggcacccgcttctccggctcacagaagcagcccaaccagcgcaccgtcactggggtcctcgaggaggcatttcaccgatttattgggcagccagtttcaataatcttttctagccgaacggatgcaggtgttcatgctttatcaaatgtttgtcatgttgatgttgagcggataagtaaaaggaagcctggcgaagttgtctgtacacaaaactcattttttttcttaacactgattaccgaccaggccttgtctacatctcttgacactctaaacttatttctttttttgatctttgcatgataagtatatttgtgacagttgttgttatgcctgatttaaatcttctaggttttccaaaataaaattctacaagcaatagaattaccttttctcctgaccttgcctctaaatcatctattttgtccgttccaaatcataattcactttagctttgccttaagtcatatttaaccaagtttaaataaaaatgcaccaacatctacaacatcaattagtttcattaaatttctatatgaaatgtcttgatagttcacaaaatgttgatgtcgttgaagacctggcggctggcgccactgctgaaacaagtcgctgtagtctgggcgtctggattgatgtattttggtgggagagttgtttggtaggttttgaactgtttgttgtgagtgttgttagtagttgagagtgattgttggtagttaaactatcacaatgttgattgtaagctggtaacatcagcagtggatatttgactattggtaagctttctaataaagctgggtgaatgcttttgatctaaaaaatgtcttgatagtgcacttgattggactttaagattttaatatgtttttattcctaaaaacttgttcagttagaggcatttgacttagaaccaaactaaagtgtcctataatttgtaaaagaggaaataaataaaaatatgttttctagaacagcgcctcttataactcctgctgctgatttgcttttccctttttacagttaacacctcatgagcctggagttgtaaaacgtgctgtgaaccactttctactgaagagtgaaggtgacataatggtgactgatgtctgctgtgttgcaccagattttcatgctagatacaaatctctagagcgcacgtagatatcactatcgcttgcttgctggacctgaatcaacatctgtttttgagaaaaactctgtttggcatatatctgaagatttggatattcagtcaatgaagaaagcatgcagcatacttgttgggcatcatgatttcagttcatttcgagcggctggatgtcagcctggtgggacggggcagaatattctgttagtgctgaagcgcgcagggaattaaactccttcattaccttcggca

SEQ ID NO: 24796 - DNA, 2317 bp, Zea Mays
acacatagccggaagcaaaaccaagggaagggctaaacctcccttggcacaagccctcaaccacctccaccaccacctttaaaagaaggtgctaaagggctgtcctgcagagaaaaagagaggagtgccccccacaaacctttccttgcattccactgaaatcttcctatctgcaaccatgcagttgctcaattctggcctcagctgaagcccaaccatccattgttatataagtcgctgcagcctttgcaatttcccactccttcagccaccatcggtcattgaaggagcttcgtgccaccagagaaggtgttcgccgtgcataatcacagactatatacattccacagacctgtaaagctctgtgaatttggagctcccacaggttctgcattggcgttgagatggggaggcattcttgctgctacaagcaaaagttgagaaaggggctctggtcccccgaggaggatgagaaactcatgaaccacataacaaagcatggccatggctgctggagttctattcccaaactcgctgggctccaaaggtgcggaaagagttgtaggctgaggtggataaactatctgaggccagacctcaagagaggggcattctcccaagacgaagaagacctcatcattgagctgcacgctgtccttggaaacaggtggtctcaaattgcagctcagctgccagggaggactgataatgagatcaagaatctatggaactcgtgcatcaagaagaagctcaggcagaaaggcattgatcccaacacccacaagccccttactgaggctgatcgcagcggagcagctcccaccatcagcaccgagagaacctcagggtccagcgaaatcaacccatcaagcgctggtgctctgggaaacttgagccacctcctcagcgagacggctcaatcatcaatgctgatgcccgtgtatgacaagaatcgcgctgaaactccaaacttggcacgccctaaggtgccaccaaaggagttgttcctggagcagcttactgctggacacgagagtccatcaacctgccgctcatcaggccaaactctctatttccctttccaacagcctttaggctacaacagtgagagtggcagtggcgatggggcgaatatgaattcactctggttcaaccagagtgacttcaactgcagcacaatttctacagtgatgccgccagcttcaccatcggccctctctacatcaatggggctgaatcttccacctgataattctcgacatggaggaactggcattggaagtactgcagtagattcattctactgggatggtactaatcctagcagcagtagcagtactgggagcagaggaagcaacagtatgggatttgaaccacagagcacgagctcaattctggagaacagtgtcttccaatggacagacatcggacaagaaaaagatacaagagctcacctggtagaggaacttaagtggcctgacttgctccatggaacctttgccgagacgaccacagccatgcagaaccagagccagacgctctatgatgacgtgatcaaggcagagagccaattcagcatggaagggatatgtgcttcttggttccagaatcagcagccacagcaacagcttcaggcaacaccagacatgtatgacaaggacttgcaaagaatgcaactgtcttttgagaatatctaggcattatgttccacatggaacagagcagatcagcagaagcagaaatttgtaattttcagagattcgtgggcagaactatgctgaattgcttacatagatacattaagttgatacagaaatcatcctccacagctgctcctcagttgaagacctggcaatatcaaggaaaggacagccctggcattagaagtggcagcagaatgcatacaaaagcaagaaaattggtggagctcggaagtctcaaaatcaaaaagatggcgtgtgagatctacaacaagactcgtggttggaggccagttgacagacgaatccgatgaaatgaaacatgttttgttatctggttattttggttcaataactgtgcggtcgttctacttcttctcccttgtagcgcctagctacaggaaaaactatgagatagaaatgctgcttgctgctttggtgtgatctgtgtgaactttgatgttggtcagctctgtgttactttttgtgttgctactagtagtttggtttggtcagggtttggtcctttttagctgatagttgtgtgttttgtcagctttaaaattctgggtgctcatgtggtattgtaagaacttatgtctctttctatttcgtaa

SEQ ID NO: 24797 - DNA, 2554 bp, Zea Mays
cgctgtttccctccccctcccgcccgtcctctctcttccccatctccttctcctccgttccctcacccgctgccgtgcgcggagcgggtgtgaggctgcagtgcctgggtggagctcgcgtggtccctgcagcggccgcaatgcctgccccacgcgcctgaccatgcattccaggctgctcaagaggctcgcgaagaggatcatgtgacggcaccttgccgtcgtttcgaccatcgcgcgcctgcgggacggggaagcatgcggaggatggatggcttcatctcgtcgtcgttggcgctcgtcgtgctggcgcttcatcttagcgtggatggctgctcggcggtcaaccttgaagggtcgatactgctcaaattccagtcaagagtggaggaggatccgtatggcgccatggtaggctggagcccgcgcgacagcgatccctgcagttggaacggcgtgcgctgcgttgatggcagagttgtaacgttaaacctgaaggatctctcattaagaggcaccctaggtccagagctaggaactcttagccatctgagggctcttgtactctccaataacttattcagtggatcaatacctaaggaattgagtgctcttacaatgttggagatactggatttaagcaacaacaacttgagtggggaagttccacaagagattgcagaaatgcaatcacttaggcagttattgctttccaataactgctttcagtggcctctgacccaacattcctatgggaactacgatcaggaaaatgatttcaatatttatgataatcttgggaggggtaatatgaatcgaagagctgagaatgggttggaatctggttcttcttcacaagagaacaaaaaggacactagcaacctttctggtaatccaactcaacttccttcacaacacgaaccaagaaatacagcatcacaccttacccagcgcaggttacttcaagatagcaatcttgctgcaccttctcctgcaaatgcccttgttccagctgctgttcctgttccttccactggaactggttcgttttcagcatttagtcccaacaatgcacctgtaccagctgtaaattcaccaagtagtccaccgatggtccccagaactacctccgaagaagatcaagaaacaaggtccatcaaatggctttatgtcattgtactgccactggtcgcacttcttatgtttggcatcgcatgtatgcttttgctatgccgcaccaagtcagggacaacaataggtccatggaagacagggctcagtggccagctccaaaaggcatttgtaacaggagtaccaaagttgcaacgctctgagctggaaggtgcgtgtgaggatttcagtaatattgtggcaagctacccacaatacactgtctacaagggaaccttatcaagtggtgtggagatagctgttgtatcaaccatgattatctctagcaaagattggtcaaaacattcggaagggcgattcaggaagaagatagactcactgtcgcgaatcaatcataagaattatatcaatctgcttggatactgtgaggaggaagagcctttcatgcggatgatggtgatggaatatgctcccaatggaacgctatatgaacacctccatgtcgagggatttgatcctattgattggaatggtaggatgagggtaattatgggagtcgcatactgcacgctacacatgcatgagctcagccctcctataacacatccagacataaagtcaagtgctatattgctatctgaggatggagctgcaaagatagtagacatgagcgtttggcatgaagtatattccagagaaaacgtgcccaacgatgacgacttagttgatcacccggaacgagtagctgcggatccagctgggaacatctacagttttggtctactcatgctggagatcatctcaggaaagcctccatattccaaagaaaagggttcgcttttgaacttggctttggagtgcattagggataaccgaaacatgtcttgtttgcttgatcctaacttgaaggatcacaaagaaaaggacctagaaatcatatgtgatttgctctatgaatgcatccaaagcgatccgaagaagagaccaaccatgagggaggtcaccactagattgcgagaagtactgtcaatttcgcctgaggctgcaacgccccggttatctccactctggtgggcagagcttgagatcctttcagttgaagcaagctagcgaaaatgttctttgtttgcagcaacgaggtacttgtgcatattgtaatgcaaccctgtacatccctgttgtatgttttcatcttgtgttgtaactttggtgtctgcgtgctacaattttccctccccagtgaattcagttgcctggtatgttttctcatttgttcctcgctttccctatgtatactaaacatacatggtgtgaaagtagaaaataaaaaacgcttcatgccgtccaagggctgaatgtaatcagcaaatgtatagtgttccatagttttctttgattcaataactagtaattagtgttttgg

SEQ ID NO: 24798 - DNA, 3227 bp, Zea Mays
gtcccactcctcccgtctctattccccaattggccctcgcctccattaccttccccgtccccctcgtacatttcgacatcccctcccccccgactctcccgtcccgctcccgccgctaccagcgattccaatccgccctcccttccgccgctcaccgccgcggccccgccgcaagcgtttcgcctcgatatctccaccccgccttgctcgagccacgctcccaccgtccaggcgtccgctgcggaggtgtcggtggcccatctgaacaggctctcctcgtcggggcttttttgcttcggagggagaggcttcctgttcggcgcgccgtgagaagagcaccggccatgtcgcagactaactgggaggcggacaagatgctggatgtttacatatatgactattttatgaagagaaatttgcaggcaactgcaaaggccttccaagcagaaggaaaggtctcttcagatccagttgccattgatgcacccggtggctttcttttcgagtggtggtcggttttctgggatatattcatagcaagaactaacgagaagcattcagatgttgcagcctcatatattgagactcagctcatgaaggccagggagcaacagcagccacaaacacctcaacagaggcagcagcaaccacagcatatacaaatgcaacaaatgctgttacaaagagctgtgcatcagcagcaacagcagcaacagcagcagcagcaacaacaacaacaacaacaacaacaacctcagcagcagcagcagctgcaacagcagcgcagagatggttctcatcttctcaatggttctgcgaatggaatttctggaaacaatcctttaatgcgacaaaaccaaagtactgcaaatgttatggcaacaaaaatgtatgaggaaaggttaaaggtaccttcccagagagactctttcgaagaggcatcattgaagcaaagatacggagagaacgctgggcaactacttgattcaaatgaagcatcattgttgaaagcagcttcaagtgcacaatcctcagggcaaattttgcatggaactgttggtggcttatcaggcactctgcaacaagttcaggccaggagcccccaacttcctgggcctgctcagggtatcaagacagagattaatcacgttctgactcccagaggtgcaggcccagaagggtcatttataggtgtccaaggatctaatcaagctgggaacaatttgactctgaaaggatggccactcacgggacttgagcaacttaggtcaggaattcttcagcagaagtcatttatacagaatcaacagcaattgcaccagcaaatccagatgctgactccacagcagcagcagcagcttatgctgcaggctcagcaaaatatgtcttcaccaacatctagtgacgtcgacaacagaagattgaggatgatgctaaatagaaatgctgttcttggccgggatggacagacaaatagtggtagtgatattattccaaatattggctctcctagtcaaagtggcggagatatagatatgcttataaagtagaagaaacttgctcagcagcagcaactattacaacagcaaagcaatagccaacagctcccacagcaacatcagcttcagcaacctgctgtctctagccagcaatctcaaagttcaaatcaacatcttcaacaagaaaaactaggaattggaagtatgcctgttgatgggggcataccaaactcatttgggggagctgaacagacagcgaaaaagagaaagaagccaggctcatcctctggtagagccaatagttcaggcacagccaatactgctggtccctctccaagttctgcaccctcgacaccttccactcatacaccaggagatgcaatgtctgtgccacagctgcagcagaatggcggttcagctaaacccatggtaatgtttggctctgatggaactgggagcttgacatctccagcaaacccattggatgacatggatcctagggacaacttggggcgatgcatggatgctagcaaaggttttggtttttctgaggttgccaaagcacgtgcaagtgcagccaaagttgtctgttgccacttctcagctgatggtaagctgcttgctactggtggtcatgataaaaaggttactttgtggtgtacagattctctgaagcctaaatccttcctggaagagcactcgtttcttatcactgatgttagatttagcccaagcatgtcgcgccttgcaacatcctccttcgacaaaactgtgcgggtttgggatgcagataacactgactattcactccgaactttcacgggccattcagcatctgtcatgtcacttgattttcatccaaacaaagaggatatgatatgctcctgtgatggtgatggggaagtgcgcagctggagcataaataatggtagctgtttgacatgtgttaaggtgtttaaggcaggtgctactcagatgagatttcaacctcgtaagggaaagtatctagcagctgcctcagagaaagcaatctacatacttgatggggagacacaacatgcttgtagaagccccttgcaggggcacaataagaatattcaatcgctttgttgggactctgctggtgaatatctggcttctgtcagtgaagactcagtcagaatatggtcattcagttctggacgtgatggtgaatttgtgcacgaattgaatcgcagtggaaatcagttccactcatgtgttttccacccaacttatcaatccttgttagtgattggttgttacgagtccttggaactttgggacataagggagaagaacaccatgaccttcaacaatgcgcatgacggtttggttgcagccctggcagcatccagtgcaacagggaaggttgcctcagtaagccatgataggactctcaagctctggaaatgacttgtatgaaacccatgttggacttctgtattctggctgttagatgatagacaaacaagactttgccaaaaatgaccacatgacgaaaaggttgctgacaagatactctggagccgcgtgggctcaagaactaacagtgttttgttttgtggtcgttgtatgctgttcagtatgccactgaagcttgtaacttgtaactcgtaatagaaactttggttgaagaaagattgtacctcggacaagtggcaaatatttattctctaaaatattctgcattttgttttttgaccttgt

SEQ ID NO: 24799 - DNA, 1014 bp, Zea Mays
acctgttaccccaactctagtcgtcggaaccccaaccgagttccccagtactccgcagtccgcacggccgcatccgtcaagatccgcgaagagcaacgaggcgaggcgaggggagggaaaacaagtgagtgagagagagagagagaggagggaaaatgctgcgccacgccgcccgccgcctcgtttcccgcgccgtcgctccgcccaccgcgcgccgggcgctcgccacggcggaggtgcccgcggaggccgtcgaggactccacgttcgtcgaggcctggaaaaaggtcgcccccaacatcgagcccccagcgacgcccctctccctcatgcagccgcgcccgcccacgccagctaccatccctaccaagctcaccgtcaacttcgtcctcccctacaagtccgagatcgccaacaaggaggttgacatggtaattgtaccagctacaactggtcagatgggtgttttgccaggccatgttgccacaattgcagagctcaagcctggtgttctctcagtacatgaaggaaacgatatcgacccagcattggttcagaagggtctcgctgaattcactgccaagcttggttcggcctctactgacctggagaaggctgaggcccagatcggagtcgatgttcacagtgccctcaatgctgcattgaccggttaattggtggcattttaaattgtcttgtctttttcatctacagttttagagtgagtttaagtttgcaaactcatgggcatgggatggagggaatgatcctaaataaattatactccatctaaaacatggacatatgtttcttgtttcctgaatcctgcatggatttctttttgtactggtaaacattttaactctgagctcaagacctggagctgctttctgcccccgttgagtttgggccatggatcagatgaaattgatgtttgtccgtaggttatgttaattgttaaatgttattatgtctatttttaagagaaatataaagtactgctcgggttactgc

SEQ ID NO: 24800 - DNA, 3136 bp, Zea Mays
tgcagtctactccagcctcaccgcctcaggtcggtcctacacggtcccgttctgcctggtgcctgcaacctgccttttcttcttccgtcgccacccagcgtgctctctctccctctttctctctctctcgtggcggcgcctgggcagccgtcgctgccgcctgcgctaggtgccaggtcttcttcgggcccttcgccggcgacgagtaccaccaggttgtacatgtatacacccatgtgctttactgggtcggaccctactcatcctccacactaaggccatctccatagactgcactgtttagactccactgtttagagagtggagatagggagtgagatagagagtggaatagggaggatgctggagatagcctaaggttgccactgagtgtgtgcatgattcagaggcaatgtcatcacaaactggaggtggcaaagagagtgacgccggccctgggcaacacaggcagatgcaaagtttggcaagacaagggtctttatacaaccttaccctcgatgaggtgcagaaccatttgggggagccattgcttagcatgaattttgatgagctcctgaagagcgtgtttcctgatggtgtagattcagatggtgctgtcacaggcaagcctgatcggacctcgagcctgcagcgacaggggagcatcctgatgcctccgcagttgagcaagaagactgttgacgaggtgtggaagggcatccagggtggaccagagaccagtactgtggtggatggtctgcagaggcgagagaggcatccaacacttggggagatgacacttgaggacttcttggtcaaagctggggttgttactgaaggacttgtgaaggattcagctgattttccaagcaatatggatacagctggcagcagtgttgttgtggctgctgcttctagtttgaaccctggagcacagtggttgcaacagtaccagcagcaagttttggggtcccagcaattgagtttggcaggttcatacatggctagtcagttgcgccctcagccattgtctattgctacaggtgctactttggattcaatttactctgatgaccagattacttcgccatcatttggtgcactttcggaccctcagacacctgggcgcaagcgtggtgccttaggggaggtagtggataaggtggttgaaagaaggcagaagaggatgataaagaatagggaatcagctgcgcgatcaagagcgagaaagcaggcttatactaatgaacttgaaaacaaggtattccgtctagaagaggagaataagaggctaaagaaacagcaggtactttgtctcgtgttgtcatgaactcataatatttttcttttttctcattctttcttttgtgtggagggtattcaacaaaaagtcttgatattgaaaggtcaattctagcaaaactgttattcctcagatagttaagcaattggtcgatgctagctacttattcatttcgcagttcccttttcacttcttactatggctcaacagttatgtacttgtgtcatgtctagggctgacaatgggctataaattttgcactgtaagatttaaggatcgaatcgggttagaatcgggctctatttctagtcatttttgaactataattttttagggccttgacattttgtgaagaaccatttggatcacgatccattaccacccctagtcatgtcctgctacctggtaacagatactctgagtactatatatgtacttatattagcgataactgcaatcgattctagagttccatacaattatgatactttgagattcttatatctattacggtattaccaccatcaaaccatcacctttggttaaatatattttcttccagtcctagaagaatgaacttgaattatgtcagccagccttttactgtcgttttggacctgaatttaccaccatcctggaaggaccacgtttgttgtgttcagattgcttggtcttgaatttgaagcagcaaccaaagggaatgtagagcagggaaaggaagttattttccctcttattgagatttgtaaggggtacaactcatcgattcagagaacttactggatattggaaaatgtctgtgttttgcttcataagttactagttcagcgccattagatttgctttgactgaaatacagagctattgttgagcatcggatacataggtttatcatgtgaaactttgtaccagtggtgtttacactatttagctgatttcagcatggtgggatcaaggtttgttatttcgcaatgctacgaccttacagtccgtttctttttagcccattgcaatgggagtatgttgctcccttctgttgtggtgatgcacaaaattttggcagcatgaagtaattgagctacatgctgctcttcctgttgacagtgggtaaacagtagcatggtgctaaaatgcaatgggttacgggtctaataaacattttatgacgttattatgttcaggttgacagccttgctaacattgcctttttgttggggtccttcacttcaccttactttcaggagttggatgagatactgagctctgctcctcccccagaacccaaatatcaactcaggagaacgggttcggctgccttttgagtttcggcgctgacaatgctcatagtgatttttgtacattatacaaggattctactttatatggtttccttccttttgtattagaaacatttgatagattgagggtatagctttttcccggcccggtaggtcagtgtatgtaggtcgctagcaagctgtagcatgtcctggcggatcatttccttggtgtctgtcagtgtgtacatcttctagacacatgtctaagtctgagagcttccttatacgagaaggtattcaggtatgtgttgcgcaggtgtctcctgctgttctgtttcaacggtgcaggctattttttgtgaggtcatcattttgatcacacatttgtgaggtcagaatattgcaagcgctcctcttaacgtctgtgtcaaatcgttcacaggatctatgtatcttaacttcttaacacaagattataatcttgtgactaacgtatattttgtagagctaatttaagttaggtcataataatgattattgtttgggagatcaa

SEQ ID NO: 24801 - DNA, 729 bp, Zea Mays
aaccgatgctgtgtgggaaaggttaacacagggggaaactaatacactggttctacatatccgacgctgtcaggcaaatggtgatggagtttttgttgattgtaactttgtgcctacagattctaagattcaatcagtactgggggacatctcttttgaaccacatgaaactgtggtgtcaatggagtatctacttggccttgtccttgctcttcttggaggaagtgtgaaaatgcaggactattctgatgaaagaaaaagtcagatattggatgtggtgaagagtctggccggagggtttgatatggatgttatcttcaccagaacggatggttttacaatgactcaagagtggttgcttctggattgcttagatctcaaccttcgacatggttggattgctgctagggatttgttgaccggacccgaagtatcatttgaaagtcttacattggcttctaatgaacctggttttccacatgcggaggagatcaagaattttctaaggggacctcaacttactcccattggcttggtttcgctgcaagaagactttgttgagaatgttccgtgcattctgttctggaacaagcattaccatactatagttatggtgaaaactcaacttttgatgtattttattactttaggagatatgttagctgccttctatttttcctttttgacccattttggtcttatgcagatcaatggagtattaaattctct

SEQ ID NO: 24802 - DNA, 3196 bp, Zea Mays
gtctccttgtttgaggaagtggggagaggcggaatcttttgttggatcatggcagttccaatgcggccggtgggcttcgcccccccgtgacatggtctcttgttgctgacactacctggacttttcttctgcttatgacaaagacgaactgataagctggcattcgtagatcggtttcttgggagatacacatacagaagctttagggtcggctcgtagaatctctcagacaccgtcgttttgcatccgagaacttggtcacttctaagtgcattttcctttgctgcaaaaggtgctgaataaactgtctgcacaagtcagtggtccttgaactacagggacctgatctgcagattcttccattgggtactgtttcatatttgaccactttgtaaattatatgggaataaaagttgagggtgagacctatattccaggatactttgacatggaagattctagtgtaaattataatggcaatgtgctgccgtatcacaaggagaacaaaccaagtgtgtttcttactgagaagttcacaataatagcttcaaatggacgagtacattacgacaaggaaatgataaagcggacaatgcttgtacatgaagctacattccggaaacaggtatatgaacttcaccagctttacaaaattcagaaggaactaatggcacggttccaaatagaagagatcaatggttgtcctagttatgctggtttattgcagccaagatcctctccatcacaggcactgcttgatgatgttaaaggaatgcgaaaaactgtgaatcctatttctggacatgatcctaagcagtcatgcatcgatttgataaatgaaagtagttcacaatatagtgtgagtggaactcctttgaggcataacaatgttaggcctcaaaagaaaatgattgacctgcaggttccagcagatgtatacactgacaatgatgatgatgtggagatattagaagtgaggccttccaaaagattgcctggggctaatgggtctgttcttttaggaaatgtcaacctcagccttcaaaatagtgagggctattcacatatgaagagttggagtactgatatacaagcacatcacagctcaactgcgcatatactgaataaaccagttgaagattcatctagtatgaatagatctaattttcttggtgtgggaatatctgctctgcagaaccatcattatgcatcacagggagtaaacttgaaccccataagcttggaagcaaaactaaaggaacaatgtgctggtaaagcatctggttcaaggttctttggaacaaatgaggaaataaggaacaacaatccatttcaacacagaaaggatgactccaactctagcatggcattgtacaaacaaaattgcattggttcctcaatggggaattacgctcccaatgctagcaccttcaatcactccattctttctccgcttggcttcaaccatgcactgaatcttccatggcaaagcaacaacacgagctacttgactaagagtcattgtggtgctgctgaaacattcattcctaaggatgccctttccaatggtatctcagtggattctactccaaaggcgccctatcatcattcactaaagattcacggaggtgccggatatcaaaaacctcctgcactacatgataacctgaaggatatagatctgaatgacacaccagttgatgtcgctgccacttgggaacagggaagcgagaaatcagtggttgatatctcttggctcagcaagaaaccagtaagcctgatggaatcacaagtcccatcaagttatgcaaaggaccactcccagattttgccaagccccacattatattcagaaagtagaactcccacaagagttcctgccttccctttcagtgttggtgctgaaaaagattctcggtgctcacccactctactatatgacctaaacaatggaccatcgattaagcatgaaactgacatggaaattcagtccctgtgcaaggaaagtgacacagatactaggaatctcattgacctgaatgaaaccttgccaataatcgacgatccagaaatagagtctcatgaatcaggtgaaattgttcctcatgaacccaatggcccttcacaggattctatcgctatagcagcagcagcagagacgttggtagaaatgtggaataatagtgatcggcctgcatatcaaccggacattttgcattggtttgctgacctagctatatccaaagataacacattgttggacaaggacagcgatgacgactttgaggctgcaacactgaagctgcgagaaacaaagagcaacgagtaccattcaacaccaagaaccacccaggaggataacactaactttggtcattgctctgcagcttcacttgtctcaaaacctcagagaggtagagggcgaggacgccgacagaggaaacactttcagagggacatcttgccaggccttgcgtcattgccaaagcacgaggtatcagaggatcttcgtgcgctcggaaggtccaagctagtcaccccgacgaaacgtggccgtaacaggcagcaaccgagagggaggcgtcgggcaagaagcgtggctgtcgccatggaggtagaggaaagcgaggtcagcccaccactgcaggcatcaccatctcctgtccctgctgacttggacgcagatgcattggcaataacaaggtggggaaggaccaccagacgttgtcgaaggccgagatgcccgccggtgaacaatgcatcgctgcgtgtagcttgagagagttttaggcatcttagctgatgagaattggtcagaattcagaaattcttttttttccatgactagttggagggaaaactcgaagtagtagattaaaagtaaccagtcacaattgtatatgcatctcagcattaatttggctccctgggacctggatcgaatcaaaacagtttgtacatctctttgaaatgaactctaatcctagagaaatgcacagaattagcatttctacgagtttgctagaattcagtttctcgtagtgcatcttattgttgatcaggccgacatgccactgatatcatgctcagtagccatgttggaccaacgggtttagttagttttgttactgttaatatcatgtgatcgttctttaatggtgtgtttggtttgtgtagtcactctatgctttatgag

SEQ ID NO: 24803 - DNA, 4107 bp, Zea Mays
cggccctccgcccccaaacctccccgtcgcggcgccctccccgccttcccattcccggccccgcccgcccacatctagtctcccacctcgccctcgcggcgccggtgtagcagccatgctagtctccgtcgccgccgacgactccggctggcaggagtccccgtcgcaggccgtcctcttcgccgacgagatcgctgccgtccgcgctgtcctgggcgggaccctctccgaggccagcatcattgccgcgctctcccagtgcggtggcaacgctgagcgcgccatcaacgcgatcctcgacgacgccgaggtcgtttccgcccccaagcgggccaaggtcgagctcgacgtcggtggtgttccggtgcaggtgccggtagctgtcaaggtgaaggccgaatccatcgacgtcggggccgtggcgccggcagctgtcaaggtgaaggccgagcccattgacggcgatgtcgtggggagccaacaatccgatggctcctccgcgaaggccaccgccaagatgaagagcgagccggccgaatggtccgccaagacacccgaccgattcgtccccgacgcgcgcagtgtaggtgcgcctgtggcggtggcgagcgccggcgccggcataagcatcgtcccgcggcagaataagaggccgaggcaggaggtggggaccatcgaactcactaccacgcacccggtgccgtacctcaactcgcggcccatccgggcgctgccacccatgccacccatgggcggggacggggaggtgtacgacccgaagcctatccagatggtgccgcccctggaaatccagatgcacgatccgaggaccaccctacctgcgccgtcacccatcgacatcgagatgtaccaacaaccgccgcggccgccgcccgtggacgtcgagatgtgcgagcagaggtcgcggccccggccccggcccctcagggcggttgtgcctgcctcggtgacggacatgaggatggtggtggcgccaccggacggcgagtttggcgacttccctgtggagcgcgactggatgctcgtcggcaagtcctatgtgcccgggctgtccaccaaccgtgggaggaggaggttggacgctggggagattgtccatttcgccttcccttcgtacgagaagatctatggcgggttaaagatgactgccaagaaggcggcggctctggcacagattgttcgcttttccaccaaacgagccggagagattgggaagctgtccccagagtggacgcaatgccttgtcccgcttgtcaactcgtccaaggtgaagattcaggggaagctcgtgttcccaacaatggagctgaggctgatgcaggagatattgctctatgttagcttctacatccacaaatctgtgctagccgaaatggacaactcaccctgtgacatgctcgatcatgcaaatgttgatttcactcccagtcctctccataaattgcttagtttgctcaacctaaagccatccaacaagaaagctgaagcaaattctaaggggtaacaataataatggtgatgattctactccggtgcttggccatacatttctcgagcaaggcgctgatgagcaggcgatttcagaggctgccttgaacaaacttgttggcactgctgaaacatttgacttagaggaagcagagcctcccactacccttgtctctgttctaaagccataccagaaacaagctctcttctggatgtctaaattggagaagggaattgatgctaatgaagagacaaaaactcttaatccgtgttggagtgcctacaatattgcagacaggagagctcctccagtctatgttaatctttttactggtcaagcaacaacacaatttccaagtatgactgagactgtaagaggagggatactagcagacgcaatgggtcttggcaaaactgtgatgaccattgctctgatactttccaatcctaggggggagttctctaactgtataaaaggagacacaaggtatctaggagatcgtgcgaccagaggatacacctcaacatcctctgtgagaggaggtacccttgttgtttgccctatgtcattattgggccaatggaaggatgagttggaggcacattcggcacaaggagctctttctgtgtttgtgcattatgctggtgataaaactagtagcctcatgctgatggctcaacatgatgtcgttttaacaacctatggtgtcctctcagctgcatgcaaaacggaatgcaacagcatttttcacaggatggattggtataggattgtgcttgatgaagctcacacaatcaaatctcctaaaactaaaagtgcccaagcagcttatagattaaagtcggaatgcagatggtgccttacaggcacaccattgcaaaataatttggaggacctctacagtcttctctgcttcctacatgttgaaccatggtgcaatgcaaaatggtggcagaggcttattcagaaaccttatgagaatggtgatgatagagggttgaaacttgttagagctattcttaggccactaatgctaaggaggaccaaggaaacaaaagacaagattggcaatcccatactggttctacctccagctcgtattgaagttgtagagtgcgaacaatctgaacatgaacgtgatttctatgaagcacttttcaggagatcaaaggttcagtttgacaaatttgtagcacaaggcagtgttctgaacaattacgctaatattctcgagttacttctccggctaaggcagtgctgcgatcacccttttctggttatcagccgagctgaccctaaaaagtatgctgacctcaaccagcttgcacagcaattccttgaaggggtgcagcagagttcgtctggaagacagaacgtagtgccttcactggcttatgtagaaggggtcgtcgaggaaattcgccagggtgctacgatggagtgccctatctgtctcgagtcagcttcggacgatccagtgctcacgccttgcgcacaccggatgtgtggcgaatgccttgtttctagctggaggactccagacggagggccatgcccactctgtagacgtcacatcagcaagtctgacctgatcatactgcctgctcagagtcgtttccaggtggatgccaagaacaactggaaggactcgtgcaaagtgaaaacgctcgtaacgatgctggagagccttcagaggaagcaggagaagagcatcgtgttcagccagtttacttccttcttcgatcttctggagatccgcttcacccagaagggtatcaagttcttgaggtttgatggcaagctgagccagaagcacaaagagaaagttctgaaggagttcagtgagagccaggacaagctggtgctaatgatgtcgctcaaggctggaggtgtagggctaaatctaactgctgcctccaacgtttttatgatggatccgtggtggaatccggctgtggaagagcaggctatcatgagaattcaccgcattgggcagaaaagagaggtccgagtcaaacgcttcatcgtcaagggtactgtcgaggagcggatgcagcaggtccagatgcgcaagcagaggatggtttctggggcgctcaccgacgaggagattcgtggcgctcgcattgagcatctcaagatgttgtttaaataaatgatcattgccgatgtgtatagctgacgctacgccgttgatactttggtagtgtcaagtaggttgtcgagggcatgtttggtaggagtaagatctgggtttagaccattgtagatggggatggccggatgggagtgggtggaaccttgcccttccgatatgacggtcttcctttctaacgtgaatcagactggcatagagaatgggcattttggaaaacatgactacgataaatcacttttctcttgagtcttggattgcaggtgttaatctgtcatgttgttcttgttttactccctaccctttctgtatgctgtgccttttgttctctccttcagacttcccaggaatactgattctagtatgtccactaaggtatcttttgatcttgaaacatcatccttcgtggctgttgatggcatataatagaaaagcttttggg

SEQ ID NO: 24804 - DNA, 3153 bp, Zea Mays
cctggcctgcccagcaaccaattcatacatttaatttaataaagtgggggcaaaaaatcatttcttttttggagggaggaggcacgcattattccatatttggtgctgttgttagtgggtgctgctatagccaagcacagcttcagctccagcttcttgtcccctcccagcccttttccatatcactcgaggtcaaggaggagagggagggagctcagactcttgcctgcctggtgctctgcagaggagagagaggaggaagaggaggaaagggagctatagattagctccttttttttctttctttctggagctgttattttatccggggaaggatctggttttgtcccccgtattgggaggatttattatctttctccttcttccccctcccctcgaccctctcagcctcaccaggatcagctttgttgctgcggaggcaatccctgtcgcctgctccctccccatgagagtaccacgccacgcacacccttcaggaacgccgtaagctgaagctttcagtcggctgctgaaacctcgttcatcagtcagtctccaaggcggttcgatcgtggtggccatcatcagccgagcggccagagctgcacgatggctacctactactcgagccagggcagtgaaagggagccgtcgcagaacatgtactccagagaccccggcaatggcaccgcgtcctaccctcctctgccgtcggctctggggaacttgctctacttgaacagcccggcttctggcgggccgtacacggatttcggcggcgtccagcaggactgcatcgagatgcctgaacctggacatccttcggtgatgtcccatgactcgtctgccagggagatcgagcccgacatgctggggcagcagcggcgctcgttcggcctagccagaggcatgaaggacgaggtgctgatgcgcatgatggatggatcaggatcacatagcagcgcagccgatgccatccatgacgacgccccgaatggcatacagctcgatttcggcgttctgggcagccacggcccgccggcgcagggcggccaaggctccttgtctctgagcctcaacacgcacatcatggcgcctgccttgccgtactggcctgtcgtcaaggcagacatgctgtcgccgcactcctacgaccatggctgcggcggcggcagcggcggccttggctcggagccgtcgcgggcgatccggaactcgaggtatctgaaggcggcacaggagctgcttgacgaggtcgtcaacgtctggaacagcatcaagcagaaggcccagaaagagcaggtggaggcagggaagacggaagggaaggagaacgagggaggagggcccaagagtgagggtccgcaggagtctggcgccaacgctgcaccggagctttctactgccgagaagcaggagcttcagaacaagatggcgaagctgatggcgatgctggacgaggtggaccggaagtacaagcactactaccaccaaatgcagagcgtggtctcgtccttcgacatggtagcgggggctggagccgccaagccatacaccgcggtggctctgcagacgatctcgcgccacttccggtgcctcaaggacgccatcaacgaccagatcagcgtcatcaggaagaagctcggggaggaggagagctcgtccggcagggagggcaggctgacccgtctccgctacatcgaccagcagctcaggcagcagcgggcgttccagcagtacggcatgatcccgcagaacgcttggcggccacagaggggccttcctgagaactccgtcaccattcttcgtgcttggctcttcgagcacttccttcacccgtaccctaaggattctgaaaagctgatgctggcaaggcaaacaggcctgacgaggaatttcgaactggttcatcaacgcccgcgtccgcctctggaaacccatgatcgaggacatgtacaaggaagagaccggagacatcgagcaagactccaactcctcctccgacaacgcgccagcaggaagcaaggccaagacggcgtcttcgcgagacaaggaggaccacctggcgagaagctgctgcacgccgcgggccgtctgcgagagcagcagccagctgagcgagccaccaggaggagccagcatgagggccatgagcgtcgccgccgccgccgctggagcgcccatggggttattccagaacgagcctggccacgaccacgaccacgacgacagcttcatgagcctgatgctcaaggagcagcgaccgaacgacggcggcggcggcctcctcctccaccacagcgccgtggcgcagcaccaggacgagaacgcccggttcatggcgtaccacctggcggagctgggcaggtacggcaacggcaacgtgtcgctcaccctggggctgcagcgctccagcagcagcctctcggttccgcacgctcagcagagcttccccggtgtcggaatcggtgtcggagacgacgacatctacaatgccaccgccgctcctctcggtgtcagcgtggcgtcgccggactacgagtccatgagccagatggatcagcggcaacggttcgagcagtcgccccttctccatgattttgtggcgtgattgttcgtttgcctatactcactctccgttccaaatcgcaagacgtttttttttttggcttttctaaatccatggcctttgctatactaaatataagatatgtgtttagatatacccaaaacgttttataatttggaacggaagagagtacctcagatgattatatatgtgttacatatgtgcctgaaaggagcattgggttgtagtagcctgtagtttttcaattgtatacagattggtggtatactggtatagcaggaaatgtaatgtagcgtaggtgggttggggtgataggggtgaaaaggaaaagggaaaggatcttgtaaagatgaaacacactatactatacgtgtaaaagcttgtgatttggccaccatactgttgttatgtgatgacattcgaacggggcctagccagtttagaccagtaatcaagttttaaaagcatttctacgagttcatcgcaatcaggtgtgcgaatgacatctaaaccatgtccagaacaacagctcctatgaacatacacactgctccttcgtgtca

SEQ ID NO: 24805 - DNA, 2644 bp, Zea Mays
acagaaaaactacacagagtgaaatttcggaagcacgcagacccggtcggatccaccggcccgcggaacggatcgaggccaccggcatcctccgcttgcgtcgcattgcggcgccgagctcgaaacccctggatcggttgcagctttcccactgcccccgcccgataacgcggcggtagggtggtggcctgtcgatctcgcggcgggagccggctaactacctgccgttttgtggatttgtgtgcgtgcttgattttggtgcgtgtggtggcgtggagtcgccggcgggggggggggggagctagggttttggtttgggctttcgggatgacgcgccgggtgcggcggcggacgtgcagggaacgggagggtagggtggtgcggggcgcgtggtgtgttgtttcggcgaggccggaaggcgaggacgatgcggcagcggtggaggtggactggagggcgctgccggacgacacggtgctgcagcttttcgcgcggctgaactaccgcgaccgcgccagcatggcctcagcgtgccgggcttggcgagcgctgggctcgtcatcctgcctgtggagcacgctcgacctccgtgcacaccgctacgaccgggaggtggcgtcatcgcttgcctcgcggtgcgggagccttcgtcggttacgcctgcgcggccacgaggcagcagaggccgtcccggccctctgcgcgcatggtctccgcgaggtggtggccgatggctgccgcggcctcacggatgccacgctcgctgtcctcgccgcgcggcatgaggacctccagagcctccagatcgggcccgatcctctcgagcgcatatccagtgacgccctccgccacgtcgctctttgttgctcccaactccgccgcctgcgcctctcgggtctccgtgaagctgacgcggatgccgtcggagcgctcgcccgctgctgccccctcctcgaggacgtggctttcctcgattgcggcaccgtggatgagaccgctcttgctggtatccactctctccgcttcctctctgtagcaggatgccggaacctgaaatgggctactgcatccacctcctggactcagctttcctcccttattgcccttgacgtctcccgcacggatgtttcaccaagtgctgtttcacggctcatttcccatgccaaaaccctcaagcttatatgcacgctgaactgtatttctgttgaggaggaacagcttcataatcctgctgtttttagtaactctaagggcaaggtcgtgctaacgattaacagtgacatctttagatcttttgagaccatgtttccaattgtggatgctaaagagcacggggttttccatcagtgtaactggagtcacaaagacaagatagctggtgatataacaacatggctcgagtggatcctgtcacagtcacttctccgaattgcagagtccaacccacaaggcatggatggtttttggctgcagaagggcaccacactgctgcttagactattgaagagtttgcaggaggatgtgcaggagcgggcagccactgcacttgctacgtttgtagttatggatgacgagactgcaaatgtggatcctgcaaggtcggaggcggtgatgcagaatgggggcatccgaatgttgctggaccttgcaaggtgctcaagggagagcgcacagtctgaagcagcaaaagctattgccaacttgtcagtgaataccaaggttgccaaggcagttgcagatgaaggcggcattacaatactcactgatttagccaagtcgatgaataggcttgttgctgaagaggctgctggtggcctttggaatctctctgtaggcgaggaccacaaggcgtctattgcagtatctggtggtatcaaggccctggtagatctaatatttcgttggcctgctggaaccgatggagttcttgaacgtgctgctggtgcgcttgcaaacctggctgccgacgacaagtgtagcttggaagttgcaaaggctggtggtgtccatgctttggttacacttgctcgatcatgtaaacttgatggcgccctagaacaggctgcaagaggtctagctaacttagctgcacatggggacaacaatgacaacaatgctgctgtaggtcaggaagctggggctctggaggcactagtgcaactaacaggttctcaaaacgagggtgtaagacaagaagctgctggtgctttgtggaacctgtcatttgatgacagaaaccgtgaagccattgctgcagtgggtggcgttgaagctttggttgccctagtgcaacaatgtttgaatgcttcagaaggccttcaggagagagctgctggtgcattatggggattatctgtttcagaagctaatagcattgcaattgggcagggtggtggggttgcacctttgctcacattggcacgctcagaggttgaagatgttcatgagacagctgcaggggcactatggaatcttgctttttattctggtaatgctctccgcatagtcgaagaaggtggggtgcctgttcttgtaaaaatttgctcatcatcagggtccaagatggcacgcttcatgtctgcactagcactagcatatatgtttgatggaagttcttagttgagcaaggcctacaagcagccgg

SEQ ID NO: 24806 - DNA, 2005 bp, Zea Mays
ttgcttcagtctatttcagcatacctatgtggtcatctccatgcaaaagttagtaagcagctttggaggtatcatgaaatcagaacaacagaagatcacaagtcaagcttttgggaatgggaacttggagactggaaggactccagattgatgaggattttagcaatagatggtggtgcagtctcattcatagaccacacattgaaacatgcactccaaacttccatcttgatcacatatccaacagattcaagaagtatgaatatgttggattcagaaaagtggtcgatgagaaatgatataaatgtccttattttctctcatcaatttataagtaatgtgagtgctagaatctttgactctcattgtgagtttaagattgtcgaggagatacctctgcagcttgttaccagtacttctgctcacagacctttgttccatgccaaatggaatgctgaaaattacagaagttcatccgccactcgctactggttgcaggtgtttgttcttgattctcatggtgtaaaaatttcaagtgagcagagaccattttcagttgagggtaagatggcaattcccacaagtccatggaccaactatctgctctttgaagtccagtgggaaggcatgtatcaagttcttctgtggagtaatttggccttcaccattgtattgttgttcatccccaaactattgtatcactttgttaggagaagttcatcatatcaaaggtgggctgtgtcaattccgtcctcctctatccagcagagaaaaccttacttttggttggtttggtttttaatggagggcacaaggagtaaacctttctggttttctatggtaacatatgtgctctggctaattgaaatgccatggttttggggccatgcaacgtctgaaaatggagaaatcgctcaaatgtacttatctggatggagcgtgccaattcatgatgggggcttgacgggcaacaaactgagcaacccagatgtgcttgtcatcacactaccgttcctctatctggtgcttgtcccagtaatagtccttacatatggtctgtttgcagaaaaggctactgtgtttttgcagcacagaagaagagtagtatactctcttgactcaacaaatgtgcatgccgagtcaccaagattgctgccagttgctccaagggcttcactaatgaaattcgccgacaagatggtgtccatggtgatccaattttgtggtagctggacaagaagggctcttctacttgcatgcttgatcaccgcagcaatacatttgaagctctgttccaaactaatgtcagcatatggaactgtaccagtagcattgtcacccccattgacatggataccattgttgctattaggtggtgctgcctattgtacagttctccatgcagattagcgctcagtactctgcaatcctgaagtgtagtacttatttgcattggaggattagggctcataactgtgaattcctgaagtgaacgtagttgcgtttcgggtgcgtgctgctgctgtgcattaaatcctggaactgtggaacatgtcacctttcgatggttaactgcatgggtgctggctaaccaaagataaagtagaaacagtttaatggttgagacttgagagtgcaaactgcagagtagaacatctggatggatggaccaaaactggtagcggtggctcgtcgttgtgtctaaccctcgccgcagcaagaggagatggaacagtggcttggacagagaggttgttgatcggatggctgtgaggggagtgatgggggtagggacgtagggtgagagggaaaccatggcggctaggtattttttgtgctgagtaggctgttgtgtttgtgtacaggggatattttcccaagtggaccactctattggtgtgtgggcctctcggccagaatttcggtctgcatggttattttcacgagtgggtcattttgttggtggagcgtattttggttagaaattctaacggcttcgggctag

SEQ ID NO: 24807 - DNA, 2196 bp, Zea Mays
gcccaaaattttcgtaggctgtccaccgcaccaccaccctgcgcgccgagcgcaccccgatccagatccacccatcctccctccggtctccggcgggcgccctcctccacgtcctcacgcgcctccggacgccagtgcgcgcgcagtgagcatcaacatcaacccgcctcttctctcgtcggaccggcgcgcgccaggtggcggcggaggcggcaggcatgaagcgggtgtcgtcgcacgtctcgctcgcctccgaggcggagatcaacctcgacctgtcgcgcctcgtcatcgacaagcccaggttcacgctggagcggaagcgctccttcgacgagcagtcgtggagcgagctctcccaccgccagaacgacggcttcgacagcgtgcttcagtcgccggcattcccgtccggcggcttcgactcgcccttctccgtcggcacgcacttcggcggcccgcacccgctcgtcaacgaggcctgggaggcgctcaggaaatcggtcgtctacttccgggaacagcccgtcggcaccattgctgccgtcgatcatgcgtcggaggaagtgctcaactatgatcaggtttttgtgagggatttcgttccgagcgcattggcttttctaatgaacaatgagactgacatagtgaagaattttctcttgaaaactcttcaccttcagagctctgagaaaatggtagaccgattcaagcttggagcaggagcgatgccagcaagtttcaaggtggaccgtaataaaaacagaaacactgaaaccttagtcgctgattttggtgagagtgcaatcggtagggtggcaccggttgactctggattttggtggatcattctccttcgggcatatacaaagtacaccggagatgttagtttgtcagaatcacctgaatgccagaagtgcatgaggttgatactgaatctctgcttatctgaaggatttgatacttttccaactctgctctgcacagatggctgctcaatgattgatcgtcgaatgggtatatatggttatcccattgagattcaagccctattctatatggcattaagatgtgctctccaaatgctcaagccagagggcgaagggaaggatttcatagagaagatagggcaacgactacatgcactaacctaccacatgaggaattacttctggctagattttcaccagctgaataacatatacagatacaaaacagaagagctactttcttggcaacgtcagccctgctatgatggatttccggtggtttgcccttggcaattgcattgccattgtatcatctctagccaccccagaacagtcagttgctataatggatctgatcgaggaaaagtgggatgagctagttggtgagatgcctctgaagatatgctatcctgctctcgagaatcatgagtggagaattattactggatgtgaccccaaaaacacccggtggagttaccacaatggaggatcttggccagttcttctgtggctgctgacagcagcctgcataaagactggtcggccacaaatggcaaaacgtgccattgagctcgcagagtcaaggctgctcaaggacggctggcccgagtattacgatggcaagctaggaagattcgttggcaagcaggccaggaagttccagacctggtccattgccggttacctcgtcgcccgcatgatgctggaggacccatcgacactgatgatgatctccatggaggaggaccgccctgtgaagccgaccatgcggcggtcagcatcatggaatgcctgaatgcgtggatagttgtttctgaaccaaggaaattcagaatcagctgttatacggatttgtgatttgtttggaccacaagagtgcagcctgcagcgttggtgtgatttgttgggaccacaaagttcaacattgattatagttggactctgtcaattaggacagagtttgtataccatagaggatcataggagttgcacaagattttgccatgcccttttggtttgtttcagaacaatactcaggatactgttcagttgaaaccttgattttggaataacaaatcactgtttatgcatacatttctcttcggctttaaaggtatctcagataattctggaatgccactttcttttttttaaagaaataacaaatcactgtttacacgcagcagaacatgtggattggtactat

SEQ ID NO: 24808 - DNA, 2052 bp, Zea Mays
ttcaatatcactcacctcacctgggattgggacctctcgattccaatgctggagtagaactactctgtctgaggctgtcatccttggattccagcactacattgtgatgctgggcacatccgtcatcataccaagtgctcttgttccccagatgggaggaggaaacgaggagaaggccagggtgattcagacgctgctgttcgttgccggcatcaacaccctatgccagtcattctttgggactcgcctcccagcggtgatgggtggatcctacaccatcgtcgcacccaccatttccatcatcatggccggccgttacagcaacgaagcagaccctcgtgagaaattcttgcggaccatgcgaggaacacaaggcgctctcatcatcgcgtcgacaattcagatcgtgcttggtttcagtggcctttggcgcaatgtcgttaaattgctgagcccattgtctgctgtacctttggtttcgctagctggatttgggctatatgagctaggttttccaggggttgctaagtgtgtggaaattgggcttccggaaatcatcctaatgctcatattttctcagtacttacctcatgctgtccatgcggcaaagcctgtgttcgaccggttttctgtgattttcacaattgcgattgtatggctgtatgcgtacattctcacggttagcggtgcctacaagagtgcccgaacaaagacacaactccattgccgtgttgaccgctctgggcttgttggtggagctccttgtgtcccatatcctttccaatggggggccccaacatttgatgctggtgaatcatttgcaatgatggtggccgcatttgttgctcttgttgagtcatctggggccttcattgctgtgtcaagatatgcaagcgcgactatgatacctccttcagttcttggtcgtggcattggttggcagggcatcggtactttactgggtgcgttttttgggacagctaatggaactgcagtgtcagttgagaatgctggtctgcttgctttgacacatgttggcagccggagagtagtccagatatctgcaggcttcatgatcttcttctctgtccttgggaaattcggggcgatctttgcttcaatcccactgccgatattcgctgccctgtattgcattctctttgcatacattggtgcttgtggcctgagcttccttcagttctgcaacctgaacagcttcaggaccaagttcatcatggggttctccttgttcatgggcctgtcagtaccccaatacttcaacgagtacacgtccgtggctggctatggccccgtgcacaccggcgcccgatggttcaacgacatgatcaacgtgcccttctcgtcgaagccgttcgtggctgtgctggtggccttcttactggacaacacgatccaggtgcgtgacagcggcgtgaggagggacaggggctaccactggtgggacaagttccggagcttcaagacggacagccgcagcgaggagttctactcgctgcccttcaacctcaacaagtttttcccttccgtctgatcctgcagggtctgcacactcttcctcgcagccgcagtagccctgactggagtcaggcaagaaatgatcctatgcagatgatgctggagcatggactgatggcgttttgtacattcaggggtgaactgaactgtgcaggttgcaggggatagtgctctgggtagcatcagtattccctagtaaccgaaattgaaaaggccgcctgttaaacttctgcaaacactagcatgattacgtctcctagtgctactgttgtttagattggaaaacatggaactcaaccgtaagcatagatttaccttgaagcaacccttttcttttgcttagaaataatttgtgttggggattttttttcaccatgtaagaactgagagcacttagattagaggggagggtgaataggtgagcctccaaaaaatactttaaataatacaaacttggtctaataaaaccgttattgaggactaaaaccaaatttgaatgagaagagtagaggaaga

SEQ ID NO: 24809 - DNA, 1752 bp, Zea Mays
gtatactcattgtcctgtagtccatctgtatactgtattccaactcagtagttactgggacgagactgacatgtggttagtttctggaatcggtatagaataatccataaaagaaaagacaagctctgttctggtttagtggtttactgttgattgctagtctggtgctattttgacatttccataatgtaaaccatttgaatcagtttcatcctatgaaggaagcatgtcatctgagaaagtcccaccaactccacatcgaatacctccaagtccctctagatttgcgccgtctccacagatagctagagttggatctgtcaacttaagcatccagcagatcctcagggcaactcagaacttctcaccttcatttaagttaggtgaaggaggatttgggatggtctacagggctgtattgccagatggcaatgttgttgcggtcaagagagctaaaaaggatcagtttgcaggtcctagggatgagttcagcaatgaagtagacttgcttgctaagatagaccaccgaaatttggtgaggttactgggttttactgataaaggaaatgagcgcattatcatcactgagtatgttccaaatggtactcttagagaacatctagatggtcaacatggaagagtcctagattttaatcagcgtctagaaattgcaattgacgtggctcatgcacttacttatcttcatctgtatgcagagaagactataattcatcgtgatgtgaagtcatcaaacatcctgctgacagatagctatcgggccaaggtgtctgactttgggtttgcaagaagtggccctagtgacacggagaagacacacatatcaacgaaagtgaaaggcacagctgggtacctggaccccgaatacttgaggacataccagctaactccaaagagtgatgtcttctcatttggcatattgcttgtagaaattctttctgctcgcagacccgtagagctgaagcgaacccctgaagagaggatcacaatcagatggactttcaaaaaattcaacgaaggcaacacgagagagatactggacccattgctggaagatcacgtggacgacgaggtgcttgaaaagctccttagcctggctttccaatgcgctgctccgacacgggacgaccggccgaccatgaaggaagttggggagcagctgtgggagataaggaaagagtacggaaagagtgttaggaaggtgtgaagatcatggaaaacatttccctgtttctcaagactttccctggaccaaggggactaagggggtgtttggttttatagggattaaattttagttcttccattttattctatttaagtccctaaattaccaaacacggaaatcaaaactttattttagttttagtatttggtaatttagagacttgaatggaataaaatggatagactaaaaataagttcctagaaatcaaacaccctctaagcatgcgaagtatttgtgcccattggataaacacctgatcatctatgtttcttggaagatgtgacctgaagaaatgtacagtgcgataacaccgccatcagtttgtgctttcttgtctcagtttgcagtgcactccctctatggagaatgtatattttggagttctcgcatttcttgattctgttgatatggtattctgatggatgtacccgcatacattactgcaaacggtctgaaataatatacgaagggaaattgtttgtattggaagacactgaagcttccgg

SEQ ID NO: 24810 - DNA, 2311 bp, Zea Mays
ggccatgggggttagcgtagcggaggccgcaggggccatggcgcaacgcaagaatgggaatggcacttgtcactggcactgggcatggcgtggcgcaagcggccgcattgacaaaacgcagcagcaccgcaatttggcgtcctagttgccatgtgggggagccgagccgaggtcgggtgggagtgggaggctgtcccctacaccagccccagtcgtcgccgcgcaccatcacagcctcctccatctatcccctccctctcgagtctcgcctgctgctgctcccttcttcttcttcctcctcctcctcttcttggtcttggagctggaccttcctcttcccctcgttgatcgttcgcggttgccgattcgccatcccctccaaatcaagacaagattgagtgggtcttgggcccctgtccctagctgcattgcgaattgaggcgccaatttgggagacgactgcattgatgaatgccggaggccacagcactcactgatttagggattcgatgtcacgggcacccggatgtcattgccgatcgcccttgtagtcggcattgccggtggcgccaccttgctcgcggtggcggccgtgctgctcgcgctctggtgcgctgcgcggatgagggcgcggcgtaaccgcaactccgacactggctcctccgacccctcgacgctagtggagtggggaaaaggggggcgcagctcgttggcaccggacctggagcatcaggttgcgaggcaattctcgctggaggacctggtgcaggccaccaagaacttcagcgacacgaacatcatcggcgcggggagcttcggattggtgtacatgggcctgcttctcgatggcactgttgtcgcgatcaagaggcgcgtgggggcagcgacgcaggtgtttgctgatgaggttaggttgctttcagagattcgtcaccgaaacattgtaactctcattggttactgtcaagaagggggtctacaaatgctggtgtatgagtacctgcccaatggcagtgtctgtggccatctgtatggtaatgtttttatcttgttaggaaaaaagattgtagcctactagcctttcttgctttattacctctgaagcttcatacggtccaccagataacaggaaaggctctgcaacacggcttgagttcaaacaaaggctctcaatagctattggggcagctaaaggtttgaatcatctgcacagtcttgatcctcctttgatacacaaggacttcaagacaaacaatgtgctggttgatgaaaatttcattgcaaaggtggctgatgctggacttgttaggttaattagaggatctgacgatgccggcccatcgcgtgggttcagtaacagtgtttaccaagatccagagtaagtccagttataacatttatcagacaagtatgtaggtcacttcacagtaacatgtccagttgagttttcagtgaaagcgacatttttttggtattttagtgttatggatttgtaatgctattgagtcttaaatctctgcagtcatggacgattttctttgctcatcctgtgataataatttgcaacccattctgcatgcttatatgcagggtacagtcgatgactcagttctctgaaagcagtgatgtttacagctttggagtttttcttttggagctaattactggcagggaagcagcttccttgatacctacagagtccagagaatatttggcacactggatggaagcgcatttcagttcaaatgaactgattgacccaagattagccggcaacttcactgcagaaggtatgaaggagcttgttggtctggccttccaatgcttgaacccatcatcaagacgccgaccgaggatgaggcttgttgcgactgaactagaccggattctagagacggagatgtccatgacaacgttcatgggcgacggaaccaccattgtcacgctcgggagtcaattgttctcgtcgtgaagcgacgttgggattgatttcatgtctgctatttgatgacatgatgattgtgtgtgagagcctaacaacagctattgtttctgccatgctgttcaggctctgcattgttatgaaatgccatgtatggtcatttttaagcttgtcatggttgataggtaggagtgagaagaaatagagctgtatgtatgtctcttttttcttctttttgttgcatgggagaagaattgtatgtaaatcttttagattgttaactatccttcaatgtatttgcagattgttcttcctttcggtgttttaatttctgaaagggctaacttgtgctaagttttttctgctgat

SEQ ID NO: 24811 - DNA, 4606 bp, Zea Mays
atggggaagcagaagggccgcgcgtccagcagcggcatggcggcgtcgctggtaccgcacgcccatggcgccgtccccaccgtcggtttcggcggctaccatggcgccgtccgtgttgagcccgctgcgccctccgacccagacgccccgattcgccttaccccagatgtggatggtgaagtactccagaacctaaagaggctgggaaggaaagatgcaacaacaaagatcaaggccttatctactctctctatactctttggacaaaaaccttgtgaggaagttgtgcagattgttccacaatgggcatttgagtacaagaggctgctacttgactataacagagaagttcgccgtgctactcatgaggccatgtctagcctcatcacagcagttaggaaaggtatagcaccgcacctgaagtctttaatgggtccttggtggttttctcaatttgatcctgctcctgaggttgctcaagctgcccgacgttcgttcgaggcagcattcccacagtcagatagaagactggatgcattaatgttatgtgtgaaggaaacatttctttacctaaatgagaacttgaagctaacaccacaagctttgtctgacaaggctataccaatggatgaactggaagatatgcatcagagggtaatgtcatcatcactgttagctatggcaactcttatagaaattttactaggagtgaaattgcaaagttgtgatggtgagagtaccaatactgaaaacaaaaatatgtcaaaagttaggtcaactgtactttcttctgctgaagctgcattttgtatgcataaatgttttcttgacgtcctcaagtcaaaaagttctgttatacggtcagctacatactcactgcttacaagttacatcaaacatgttcctcatgtttttgacgaagaaaccatgaagaaactttccccaactctacttggtgcattccatgagaaggatgcgtcatgccactcttctatgtgggatacaattcttgttttctctagaaagtttccagaggcttggtcatattgtaatattcacaaagttgtcctcagtcgggtttggcatttcctacaaaatggatgttatgggtccaaacaagtttcatatcctcttctagttcagtttttggactctatgccacctaaagcagtcatgggacaacaatttgtttttgattttttgcataatctttgggctggaaggaaccagaggcagttatcagctgctgatagtttggctttctgtggtgcctttaaacagagttttttgtggcttctaaaaaatgcatcaagatattctactggagattcttcagatgatgtacccatcaagcttataactgatgtacttgccaaaatagtttggcgtgactaccttttattgtctggagacacaattggtggcggtgttctcttatctcgtaaaacttcagggttagctgcgaacatgcactacccaacatactatcttcaggatttgaagaaatgcatcactgaaatactggatgtgattgcagatacagaaaatcatttacttaatatttcttgtcagtcgctgttaagtgactgtttggacataattcaacaaggagagaagctttccaagtttcagaatcatgtagaacaacttgtgtcgttctttctatctttggatcaaattgttgtatgcaaaggtgaattatggccactggaaaggttagcaaaaccattggttgagcaatctttgccagctattaagttcatggacactccatgccttgttaaacttctttcagttttggttgaaatatttgggcccacccccttattttttaagacttgtaaggaaaatgatgaaaagttggatatcaagtcttatctggagtttttcaatgatgaattgctcccttggtgtttggatggaaaatatagcacctgtaactcaaagattgatttgttactttccttatttcaagatgaatccttctttgaccaatggtgttccatcatcaaatgtacgacaactgaacaaaagcagtccgttgatgataagacctcaaatattctgggacgatatgaattgcttacactgttacttcagaaaatcagagaaaagattgctggggggaagctaagaaatttgcaggaaaatggttatcttctgcaacatttgcgtcttgatatattagattctactgcagcttctgtcctctgtgatttgcctgcttcagattgccaagttagttttatatgttaatagaaaatgcctgaagattctaccctatgttatgacctccatcataaaacagttctcagccttgaacaacggagattcttcgtatgctgatttggtgcggaaaagcatacagagttggcttgatgcaaccatttcttgtctgtcatcaagctcaagggaggtacctgtgcaagatattgaggactggatgcaagtggtgttgtcttgcttcccattgaggataactggaggagcccgggaattggtagctgtggttgagcgagagatcagtgatacagaaagatcactgatgttgactctgtttcagaaataccagattttctatggtagtacagcttcatcattggtcactagtggaactgccgtatcaacgacagttgaattactgggagtgaaactgacagctgttttggttggttattgctggagcaaccttaaggagaatgattggcattttgtgttccgcatggtattcaaatgcattgaatcgtctgttttgcttgtggaagaaatgactgatggcataaatgatgccacaataaaccaggtatcaagtgaagatgccttggagaagcttaaattagtggttggcactacagataagttaacattaagccttgcagaatctgctttggttacaatgtgtcagctcaaccatctttgtaatatccaagaagcagaaaactcccagtgtgtacagcttattaaatcaggggactatgctgagagtaatgacaagatggtagagagtgtcctccgtttgttcttggcctctggtgtttcagaggcaatcacaaaatcttgcagtgaagaggcttcgtctgtcataggttctagtcgccatgcttatttgcacttttgggaacttgtggcatcattcataaaaaatgctccactgcaaagtagaaagtctgcacttgagtccatggaactgtggggactgaccaagggttcagtcagtggactatattcgattcttttctcctcacaaccaatatttcacttacaacttgcagctttctctctacttctctctgagcccttctgtcaactttcactggttaaaaattattcaatgggagaaagttgctcatctgctcagcaatctggcacaagccaaagtgctgagttgatgccagattcagacaagacagtgcatctaagagaggaactttcagacttaatcgagttcccaacatctgaacttctcaaaactgatctgacagctcgagatagggttgatgtattcattgcctggtcattgttgctgtcccacctgcaaacactaccagcatcttccagtatcaagggagatgtgcttcaatacatacaagaaaagcatatcccagtaaaggccgctgcaccgaatgggaagaaaaaggataccgagctagcgcctgaagcagaagctgctgccaaagcttcgaagaatgccatagctacttgttctttgcttccgtacttggagtctctttggcccatcgggactttgcagatggcctcacttgcaggctcactgtacgggatgatgattaggctgctgccttcttttgtgcgcacatggtttactaccttgagagaccgttcattgtcatactcaatcgagtccttcaccaaacaatggtgcagccctcctcttcttctagatgagttttctcaggttaaggagtccgtatacggcgatgagaatttctcggttagcgtcaacaggtcggctttcgagatcgttgctacatacaaaaaggaggagacaggaatcgaccttgtcatacgcctcccgagctgttaccctctgcgccacgttgatgtcgaatgcacgagaagtttgggtatcagtgaagtcaagtgcagaaaatggctgctttcgctcacgtcattcgtccgcagccagaatggcgcgatagcagaggcgatccgcacgtggaagagcaatttcgacaaggagtttgagggcgtggaggagtgcccaatctgttacagcattctccacaccagcaaccacaacctgccgcggctggcgtgcaagacgtgcaagcacaagttccacggcgcctgcctctacaagtggttctccacgtccaacaaatcgacttgcccgctgtgccagactccgttctagtcctagctctagacacatgcttgtttgttggcaccacaccgttcgatccttcgatgtaaatggcgtgtgtacgcagcgcagtgttcagcgttttggctgttaaatactctcgaaacaggacgggacctgcagagactgagttcagaggtcttataatctacaattaccgtggattcgctagattatttttaggttaattgaacatgaaaatgtctaaattcttaacactta

SEQ ID NO: 24812 - DNA, 3303 bp, Zea Mays
ttgagcaacaaaggtgctggtagtgtgagccgtcgaagactggatgtggggacgttctacccgaatcagtataaatatcgcgctcactgagctcaacatccggaccccagaacgtgcacaaacaaatttacttgtcggagtaggttcgaaacaccgacatagtgtttatttaagcgagcatctggagaagtatggaattcctgtgcccagttatgctcttgtcaatagagaatatccggaccaagagctagactacttcatcgagcaagaagattttgttgaggtccatgggaagcggtttttgaagccttttgtggagaaacctgtcaatggggatgatcaccgaataatgatatattatcctagttctgctggtggtggaatgaaggaattattcagaaaggtgggtaaccgatctagtgaatttcatcctgatgttaggagagtgagacgtgaaggatcctacatatacgaggaattcatgcctactggtggcactgatgttaaagtttacactgttggcccaggatatgcacatgctgaggcacgtaaatcgcctgttgttgatggtgttgttatgaggaaccctgacggcaaggaagtacgataccctgtacttttgacccctactgagaaacaaatggcaagagatgtctgcaatgcttttagacagatggtttgtggttttgatctcttaagatgtgatgggagatcatatgtctgtgacgttaatggatggagctttgtgaagaactcatataagtattatgatgatgctgcttgcatcttgagaaaaatatttcttgatgcaaaagctcctcatctttcatcaaccatccctccaactcttccttggaagtctgaaccagttcagcccactgaaggtcttacacgacagggaagtggaattattggtacatttgggcagtcagaagaactgcgctgtgtaattgttgtaatacgccatggcgatcggacaccaaagcagaaggtgaaattgaaagtgacagaagaaaagcttctgaatttgatgttgaagtacaatggtggaaaaccaagagttgagacgaaactaaaaagtgctgtacagttacaagacttgctggatgctacaagacaacttgtaccaccaactaggtctggtcgggagagtgatagtgatgctgatgatattgagcatatcgagaaacttcgtcaagtcaaagcagtcctagaggagggtggacatttctctggcatttataggaaagtgcagctaaagccattgaaatggataaaagttccaaagcgtaatggtgatggtgaagaggaacgaccgattgaagccctgatgattctgaaatatggtggtgtgctcacccatgctgggagaaaacaggcagaggagctgggaagatttttcagaaataacatatatccaggtgaaggaactggtttgcttcgtctgcatagcacttatagacatgatttaaaaatatacagctcggacgaaggtcgtgtacagatgtctgcagcagcatttgcaaaaggccttcttgatttggaagggcagttgactccgatactggtatctttagtaagtaaagactcatctatgctagatggactagaagatgcaagcaccgagatggatgaagctaaggctagattgcatgagattattatttcaagtgagaaagcaaagaacacagaagggccagtggaatttccatggatggttgatggtgcaggattgcctgcaaatgcttcccagctcctgcctaagatggccaagttgacgaaagaagtgacttcacaagtaaagctgcttgctgaaggtgaagatgaaagacttgcgttgacgagcacattttcaaaatatgaccaggcaaaagctcttggaaagacaactattgatgtggctcgtattgctgccgggttgccatgtggtagtgaaagcttcctcttgatgtttgccagatggagaaaacttgagagggatttatacaatgaaagaaaggaccgttttgacattacacagatcccagatgtatatgattcctgcaagtatgaccttttgcataatgctcatctcaatcttaagggtttggaagagctattcaaagttgctcaaatactcgctgatggtgttattccaaatgagtatgggatcaacccaaagcaaaaactgaaaatcggctcaaagatagcgcgccgtttattgggaaaaatcctaatcgatctacgcaacactcgtgaagaagctatcagtgttgccgaaccaaaatttattgaagacgaagctctattcctaccaacaaaagaagcagagcaccagcagaaggttcatgttagaaatgaggatggaagaagatctagctctacgagtgagaagtcattggaccaagaagatgaagatgatagagaaactaaataccgattagatcccaagtatgccaatgtaaggacacctgagcgccatgtccgcactaggctttacttcacatcggaatctcatatacactcattgatgaatgtccttcgttactgcaatttggacgaaagtctacaaggagaggaaagccttgtctgccagagtgctttggaccgtctacatagaactagggagcttgattacatgagtaatattgtgcttagaatgtttgaaaacatagaggttcctttggaagatgagaagaggttcaggattgaaatgacgttcagtcgtggcgccgatctcagtcccctagaggacaaaaccagtgaaagttcttccttgctccaggagcacaccttgcccataatggggcccgagagactgcaggaagttgggtcctgcctgaccatggacaagttcgagaaaatggtgcggccattcgccatgccgccggaggacttccctcctgccgctccgccacaagccttgggctacttctccaaaggggcaggggtgcttgaaaggttggctagcctctggcctttccacaagagcgctaacgggaagtagctggaagctaacaaatccctgaaaccagttcatgtggttattcttgttctgtaacactttctgcacgccagcccaattttgacgatctgaatcatagtgaaaattttgctggttctttttcatgagcgcgagacataattgtgctatcatgttgcttgcatggatctgagatttaagggtgcgtttggttgctggatagccaaaacaggaatgtcccctggtatcctctcttgtccctccaattttaaggaacaactggggacaatactagaataattctgtctcaatccttgatcctgaactaaacaaacttattt

SEQ ID NO: 24813 - DNA, 567 bp, Zea Mays
aaggcccagtccgatgactctggccctataactctgagccccatcggagactcggagtcgggggcgccagcgtctcgcctcgccgtcagcagcagcagcagctgcacctccattccacggcttccgtcgtgcgcttcgtctgcacccacaaaggcgacggcgacggcagggggaggagatgaagctgaagcagctggagggcctcttgggtggcctgacccagttctccgaccccaagctggagctggagcagtatgcgacgggccctcacatcgcgtcgcggatgctctacatggcagagaatagtttcaatgacataactggcaaagtggtagctgtctagctgacttcggctgtggctgtggcactctggctgtggcgagtgctttactggatgctgaacatgttcttggtattgatattgacccacagtcacttgaacttgctcaagaaaatgctgctgatctggagctggacatcgatttagtttggtctgacataaagaacttaaatctgaaagcaatggccaggccaataaagttgatgaaacagcgtcacacagagcaa

SEQ ID NO: 24814 - DNA, 302 bp, Zea Mays
cgcagagattacaaggtcaaggattaagttggtatgcctttgatagatatgggaaatcaaaggcatcaaactcaagaaaaatgatcggataggactttcctaggttgggttgataaagcaacatggcgatccttaagaacaggcaaactagataagggacatcagcttgtgtcaatcgaataagggcatggtctaagatgaagacatgactcgagattcttattttaagcctaggtacactttatgtccaacaaagaaattatctaagcatttatttgtatgtgtttggtcatggagtgata

SEQ ID NO: 24815 - DNA, 195 bp, Zea Mays
ctcaaattaaagtactggagttattacataaatcggagtttttcaagtagctgacataagttcacaaaataaaatgcagcggataatcgatatcgtcgatagcgaggaattgtgcaagacctagcccactactcctcttgctcctctcctgccggaacaacatcccactcgactgtccaacccggtggcagggtg

SEQ ID NO: 24816 - DNA, 947 bp, Zea Mays
cccaccgctttgtgaatttgatttcaaatgtaagatattggtggaaatcaaggtgattcatatcaaagatctgattcacataattaccaagttcagcagttttgcctctgacgatatgggttcttgggagggccaagctaggcagcttttgttggatgaggaagaagacgatgaagagtttttctttcttcttctccctgctatactttcattcctctctgaagagcaaagcgaaactggagcagctattgaaagtttcgtggaattcaagaggagcaccgcagccaaaacgctcgaagctcttgaagaaaagaagaagcatgatgaagatttctctattaaaaagtgtctagaggagttggatacaattgatgggctgacagatgaggatagatcatatgcaatggaagtctttgaatctgggttcaacagagaagtgtttatgagttcaaaaaaccacaatgttaggttgttttggctcaagagagaaattaaagcgcttgctgctatcatgtgatgtgaagtgaatgtggttgtgaagagataggcttacagaaaccgaagaaatccaactgctagtaccgttccagcgagaagacttcagccctgctttctgagtgcttggtgaacgatggaaggcctaggatgctgtttttgtttatgttgcttagagacggatattggaacgaggatataccttgtttgtacggtatcgtgctgccaaaattaatgcgttttaagcaatattttgctaggctaaccacggtttcttttaacggaacttgcctgacgtgatggagcctgctctgtctctagccagaaccccgcgtgttgtcaaggcgaactgtcatactgatcctaaatttagaagcgtcaatgttgagttatcagaacttgaaacaagacagcgtacatatactctacatggataatctcattcgagcaag

SEQ ID NO: 24817 - DNA, 2118 bp, Zea Mays
gcatggctggaagttcaaaccgtttcccaccaaccgtggagtccgaaatttgacgggaaatctgacgagcccatttttttcataaaggtccggaacctacacaaaaaagttctgcgtcgtcccggtcctctcagaaaacgcgttgcatgagataaccaaaaccacatacagccggaaccgagggggtgatatggaataacagcgctaaaattgaactaaccatagttagctggggacgcctctcccgcggggctgacaccaaaccgtggttcctcggacgcaacgcgagcacaaccagaccacaacacctcgaggctcgagcatccctgcatccctcccccccttccccatcccacctcctgctacaaccgcttcgtttcctcccctcccaaatcccccaaccccaaatcgagctccgagtcgacggcccttgccgaaccgctctccagttcccaaatccccctcccccgaaattcaccgccggactggcccggccgatggagtgacccagctagggttccgaagccggcaatggaggcgcagtggctcgcggagtatccgcaccagggggccgacaagcggccgcgcaaacgggcccggctcgcctgggatgtcgcgcccacgctgttccagccccccaaggcaattccgatgctatattgtgggcaggaactaattaatggtaatttcacgactgcatttcttccaccaccatcaatttattacaccgggccgccacggaatatttcgcctccttggagaccagatgacaaggatggacactatgtttttgcggttggagagaatctcacaccaagatataggatacttaacaagatgggtgaagggacatttggtcaagttttggagtgctgggacttggaaaaccaagaagcagtggctatcaagattgtacgctcccttcagaaataccgagaggctgctatgatagaaattgatgtgctccagagacttgggaagcatgactttactggcagccgttgtgtgcaaatacggaactggtttgactatcgtaatcatatttgtatagtatttgagaagcttgggccaagcctatatgactttctgcgaaagaatagctaccgttcatttcctattgaccttgtccgagaatttgccagacaaatattagagtctgttgcatttatgcatgacttgcgacttattcacacggatctgaagccagaaaacattctccttgtttcatcagagtctatcagggtgcctgattataaggtttctatacgaccaccaaaggatggttctttctttaagaaccttccaaaatctagtgctatcaagctgattgattttgggagtacaactttcgagagccaagaccacaattatgtggtgtcgacaagacattatcgtgcaccagaagttatccttggtcttgggtggaactatccatgcgacttgtggagtgtgggttgcattttagttgagctttgttcgggggaagctctctttcaaacacatgaaaacttggagcatttggctatgatggagaaggtcttagggcctctcccaaagcatatgattgtcagagctgatcggcgtgctgaaaagtacttcaagcgcggagtaaggttggactggccagagggagcggcctcacgagagagcatgaaggcagtctggaaattgcctcgtctgcagaaccttgtgatgcaacatgttgatcattctgctggagatctaattgatcttcttcaaggacttcttcggtatgatcctaatgagcgcctgaaagcacatgaagctctacaacaccctttctttaccagatgcatcagaagatgtggtttctgaggctacactgagattgaaaatgtcaatgctgtatttcttcattttgatgtgtaagaactacaaaaaagtggagatgttctacgaaaaatgaaatatgctaacttgcattctgttcaatgatttgaaagtactagcaggtagcatgcagaaatccctaaccaggtggtgtcaattgaggataaatgggattaagtggtttcatggaagattggaacactatttaatggtggcatacagtgatctcgggtcaacaggtacaaacgtcgagtcggaggagtcccc

SEQ ID NO: 24818 - DNA, 579 bp, Zea Mays
ctctcatcccttctcttccctctctcttctctctaccacgacgcgccaaggatcaagcgcacgcgacgcccgacgcccgacgccccgactgcctcgacccgccagcgcccaggaagacccgacgccgccaacgcccaggaagactcgaccgaaccctaacttcttgccgccgccacctcctcttactcgcatgccaccgtcgctcccctgggcgcaaacccgctgtcgctcagcccggcgcacgggatcgggcggtccggggacgccggcagtacacacccgtcgtcggtttccgcaggtatgttccaatgtttgtggagatagagtacgatccgaactgctagtacacatctgttctaattgaagagcaactggaggctcttggaagagcaatagttgctggcaagacaggcaattgaaaatgagaattgatcttttttatgggcgaagtgttgaagatggctttggtgaaggaaatgtcttgttagcatcaagtaagtggcgacatcacaacccctacaagcttgtgccttaaaacaagaggatacaagaagttggagtgctttttgtgaagacttt

SEQ ID NO: 24819 - DNA, 217 bp, Zea Mays
cgcaggagaagaacaggtggtccaggaggagccctacaacgaggaatatgagcttatctaggttgcgtctcccagtgtgcttgatgacgacaaggaataattatttagttcattttattgttatcatctatttttgtaagacttccgctatgtaataatgatacttgtgacatttatctctatacactttgtcattatatgtgatgttctcctttgg

SEQ ID NO: 24820 - DNA, 2876 bp, Zea Mays
ggcgcgtatacgagcgaaggaaacggaagtttaagttattcccaaattgaacggcccaaagggaaaccccaccacaaccggtctcgagtctcgacagatcggcgtcgatgaccctaccactcgctggccctcccacgccttccccggcatggccgagcccaccccaccgtccctcccctcgtccgactgcgcagacgtgctcgtgggatcctccgccccctccttcccctacatccgcggctggtcattcacctccgactcgggcgctgctatgggttctgtagaggaacatctccaacccaaggtgtgcgtgcagacgagcacctccgcggggcttgagcagatcctgccctggctcttctatcacaaggtcgtcggcgtcgcgcagttcctgctcttcgtggagggcaaggcggcgaaacccaatgtcgcgggagtcctcgagtcaattcctggggtaaaagtggtgtacagaactaaggatcttgaggagcggcaggcacggagtcgaatctggaatgagacttggctttcaggatttttctacaaaccttgcaactatgaactctttgtgaagcaatccctcaacatggagatggctattgtaatggctcgggatggtggcatggattggatcatacatttagacactgatgagttactttatcctggcggagctgctgagtattctgttagacgtttgttagctgaggtccctcgtgatgtcgacatggttatttttccaaactatgaaagcagtgttgagcatgataatataaaagatccattcagcgaagtatctatgttcaagaggaattatgatcatcttcctaaagatacttactttggcatgtataaggaagcgacacgaggaaatccaaattattttctcacctatggtaatggaaaatctgctgcacgaattcaagaccatctccgtcctaatggcgcgcacaggtggcataattatgcaaagagcccaaatgagatcaagttggaggaggctgcagttctgcattatacatacactaaattttcagatttgacatctagacgtgatcgctgtggatgcaagcctacaaaagaagatgttaagagatgtttcatgttagattttgacagagcagcttttataattgcatcaactgctagtgaagaagaaatgcttcgctggtaatttcctaaattttctttgcttattaatattttttgtaatgctttagagacgctgcagctctgctaggttcagaatgtcactttattgattggaacaaggaagttagatatacttaaagttttcttatatggattattttttataagagatttatgccgtgttggactgaacttccttaactttagagattgcttcttaaaggtttattcaagtaaaaatgtcctaaaaaatggaccacactgtaccatattttttaattccatctcatgtcttcttcctcagttatggtttatgtctacctatactagtacagtcctcatttggcatggtagttactcattcatgaacatgaaataactttctaactgaaagcacatggtaacaagtggacgcataactgaaataactttctaactgttaagcacatgccccaagtctaggctctggaccagcttgagaaggcgtggctcaaaactccaaaggctgaaagtcttgttaggttttttcaatagatactgtttttttttcatgacataatttatgaaatgtaattgtttggttcagcttttttctgaccagcttttttgagaatctggctttgtagagaatctgagaatcattaggattacgtgcggaggaagataaatgtgtccataaggcttaggatctagaaggtggcggattcctactattgcaacgactcaaccgattatgtgtttatgttgattttgaatggtttttacccaagcgaattttatagaagctagttgaaaagctgagctttcgacagtccgtagcagcttttggtggccagaagctacaaaaagctgaaacaaacaggggcaatgtattgcttcaagatgaaccagactgggaatagatacattggctgaaagcttaaaccgcagcctgccctgaatctggaataatcagactacactgtactatttcatggaaagatctaatatttacaaacacttttccagctgcctcttggtgccagttgcatgcattaaaattgtgtcggtccatttttttttctccacagagaaatggattttagtgttcggttcgctaatcttttttcttgtaatgtttcttgtttctttttggctaggtacaatgaacgagtcgtgtggaccgataagcagctgaacttaaagcttctgaggaaaggagtgctgactcgcatatacaccccaatgacaattgttcagagtctgcgcgaatccggtgtcttcacttccgccattacagctggccaacctgctgtgaatgccaaactctcacccaaggaaaccaatgcgcagagccaaaatgttaccgcacctgggaacatgacaagagtggtcagatctactgattcaaaggcatctggcagaaagatactgcaagccgttgatcttgccttcagcgatactaatgtaactgctgttccaccgttgtcgccgcccagtttggacgaacacaggcatcatagtgaataataatgtcatacgtatcatatatatattttttgctcggcgtataagttcctaagaaaaggaggaaaagaaagttactgacatcttcgttaagagaagtgctaacatcagcttggatggtcaatttttatgcaatcgagctttatttgtttcatttttaaactaaaattaattaatatctcgaacgaattttgaagaaacatttggattgtggt

SEQ ID NO: 24821 - DNA, 2763 bp, Zea Mays
cccgaacatccttccccaaaacccccccacccaaaggcgaggcagggggagagccgtgcctggtgtggtggctcctgaccaaaacggagtccctcgccgccgccgcttcccgaaatccgccaaatccggagccaatgccgccgtcccctcccaccccggcggcacccaaaactatcgccgacttcttcgcgcgccccgccaagcgcctgcgcgctgccccggccgcctccctctcctccaactcctctccctcctcgctgtcgccggagcagcgccgtcgcgccgacaccaacctggcgctcgcccgcgcgcggcgcaacctccgcctcgccgagtccaaagcgcaagcatcggggggcgcaccgaagctggaggagctcctggtggaggagacgtgggcggaggcgcttcgcggtgagctgcgcaagtcatacgcgctcgagctctgccgcttcgtggcccacgagaggctccacggcccgctgcccgtgtacccgccgccgcacctcgtgttccacgcgctcaacgccaccccgttcgaccgtgtcaaggcagtcatcatcggtcaggatccataccatggccctggtcaggccatggggttgtctttctcagtaccggaggggataaaaataccttctagcttaggtaacatttttaaagagctcaaaaaagacctaggctgcactgtgccatcacatggaaatttggaaagatgggctgtgcagggtgttcttatgctcaataccgtcctaactggtatgattatttcctccatcagaacaaaagatcccctgtccttcttagttcttatcaaaatctacaaccttaaccaaactgagttactgtgagctgttttatatggctgcatttatgttgtggttctacttaaatgtgtttcactctgctcttttagttgcaactctatttagtattattcattcttgtagcttgattcagattgtatttctgctcatatgatttagccttggaaaattctgaatcatcttttattctttttttagttcatctctgtagtcgttcctaattgtaggcttagatttgccttgtctctgcatggtgttcgttacataccaggggtgtgttgtgcgtaggggtggtaatgggctataaactttacactgcaaattttaaggatcgaatcggattagggtcgggccctattcttattcatttttgaactaatattttttaagggctttaactttttgtgaagaggcatttggatcgtgatccattaccacccctagttgtgcgggggatcaaactgctgtcagttgctcccacacttggtagcttacctctggaacaaaggcttgtcccaaaaaaaatgttcctgtatccactaaaggaaccttagtacctgttgattttctgtgatctcaagttatttattttctctataaacttaatgtgcactagcaacactctggatgatccctgctgaaagcataacatattccaatgacaactgtgttatctgttatctgcacattccttgtaaagtgtttttctagagttccatgggacataacccctgtgcatgtgaatcagcagctggaccaggcaggtgcagagccagctcacggagctaccggtgtcagttttacaggataataatatcagttctatacatgaacattgcatatcaaaaaattctcattgattttgctgaaagtcaccggtgtcagctgacaccgatgaactgacctagctccgccctgggaccattaccaataatatgagtggatttttagaccaacccaagttggagataaaaattaccaatataccatgtctgaagccttatgttaccaaaagaccattgggctgtcagagtgacaagtagtcaaaatgcaattttgccaatgatagcagagtaaattttgcttagcataatgcttatcagagcataaccttgttctgttctgtgttgttgactttttgtccttgttatatgtagtccctctagccttattcaaaaccatactcctatagtcctatctgttatttccattcttgggtattatatcttgtgtgatagggagactagcttgtcttaccagtgagggagcatcaagccaactcacatgccaagaaaggatgggagcagtttacggatgaggtcattaagactatatcacaaaagaaatcaggattagtattccttctttggggaaattctgctcaatctaagacaagattgattgacgaaacaaaacatcacatattgaaatctgctcatccatcaggtctgtctgcaaacaggggtttctttggatgcaggcacttctccaaaacaaacgagatcttagagaagctggggctgtctgccatcgattggcagctctagaaaaatcccaagacgacatgtgatttctctgtttgagcttgacaaccaccgttgctgtatggagtggagcagaagcacatgcctcaagggctatcatattcggtcaagattatgtggcgactaaagttgttattcatacatggccaatatggatgtgagtgcttaacgcttcttttgtgccgtgtcttatcctgctttatttactttggcactgtaccagcttgttgcggccattgtggttgtcgtgcgtacgtgcaactactttgcttggcgctaggacacgcccatttgggctgccttgctagatctaagcatctgacgtactagagcttaaccaaccaccctatatatatgcataaagggcctgcctctacggctctaccttccgc

SEQ ID NO: 24822 - DNA, 1783 bp, Zea Mays
ttatgattcctcattggaaatcctttctgtaagttgtccaaccatccagatcctccatcaagaaccaacctcccattgaggacaacatcatcgaacagcctgaactcaggtgctacaacccgccgaccatcatcgtctggaggtcttacttctaattcatcaaggccttcaacaccaactggacgccctacattgacagctagttccaaaggttcaaggccttcgacccccacttcccggacaactgttcctgccaaaactggagcttctgtgtcaaggtcgtcaacaccgactttgagatcaacacttccatcagccaggtcaacgaccccttcaagcagggcagttggtcctgctagcaggacttcagctcctataggcagagcatctgcccctgctagtaggtcatccacacctacttcaaggtcatcaatacctgctaccaggtcaacaacaccatcatccagaccctccataccagcacaaagcaagcctacatcaagggcatcaactccaacaaggcgaccttctgccccttcggcccagcatggtaacttagctgcaccagttagatcgtcctcaatctccaaaccaggttcgacaatgcccaaaggttcttcaccagcaaaaactgcagcgccaacaccttcaagaggcagctcccctactgtcaaatcaagaccatggaaaccatctgaaatgcctggtttctctcttgatgcacctccaaacctaaggacatcgctaccagaaagaccaacctctgccactaggggcagacctggggcacctagttctagatcttgctctgttgagagtgggccagctggtcgaccaagacggcagtcttgctctccctccagaggaaggactttaagtggcagcgtgccttcagggagctccatgccagcagtgagaaggtcacatctcaatggaggtgacagtgtgaatccagttcaaatgggtaataagatggttgaaagggttgtgaacatgagaaggctagttcctccaaagcatgatgatcaaagatctagcctgaacagtgtatctggtaaaacttcaaattccccagatagctcgggctttggtaggactttgtcgaagaaatcactggacatggcacttcgacatatggacataaggcgcagcattccaaacaatttacggcctcttatgacaagtatccctccatcatctgttcatagcgcacgttcaggatccacaaggagcagaccaatgagtgtctcagactcaccgctcgcaacaagcagcaacgctagctctgagccgagcgtcaacaacaacctgatgtgcctggacggtatttatatggatgatgagttgtgcagcgatagagcaggaccctatggacggtgatttcacttccaaaaggtttaaaaggcatgattctgatggaaccatttggctacagaatgttcagagcagcagggtggaagatatcgagtacctgacgagcattattattttgttatattttaggttcttcgaatgttcaatatctatccagttccttcgtgtcgtgtcatgctctgcagctccatgtgcaattttaaccatggaccttaatacactattgaaaagtgtcctttatgtgataaatctctagagcagtttatagcatctttgacatgcgatttggtagtggaacatgttccgatggctgaacgtttgtgctccacaacgttcagtgtcgctaatgtaacgtctcctagaatgtgtagttaaacaaattaagcaggagtatttttttttatataag

SEQ ID NO: 24823 - DNA, 1966 bp, Zea Mays
acaccgtacctccggcgcctccgactccggtcctccggcctgcgcaggctagctagctctatttaggtccaccgtgcccccgccgcgcaggcaggggagatccaagggtccgagcagaaggccgccggcggcgagccagccagccagctaaagcgatccatatatacatatatactatcgagcaacacgtaaggaaggaaggaagaaagaagccaagcccaccagggccagggaagagagcatagctaaggaaggaaggaaggaagatgatgagcaaggaggcagtggtgaacgcgttcctgggctgcttcatgcacgtggggctggcgctggtgctcgccgtctacctccccgtggcctttgtgtgccgcctcctccaccgcctcctcgtccgccccttcgccaggggcgaggacctccgcggcaaggtcatcctcgtcaccggcgcgtcctccggcatcggcgagcacctggtgtacgagtacgcgaggcacggcgcgtgcgtggcgctggtggcgcgcacggaggtggcgctgcgcgccgtggccaaggcggcgcgcgacctgggcgcccccgacgtgctggtcgtgccggccgacgtcaccaaggtcgacgacgccaagcgcgccgtcgaggagaccgtcgcgcacttcggcaaactgaatcacttggtggccaacgccgggatctggtccagctgcttctttgaagagatcaccaacataaccgccttccataatgttattgatctcaacttctggggtgccgtgtacccgacctacttcgcgctgccgtacctcaaggccagccggggcaacatcgtggtgaccgcctccgtcgccggcagggtgccgacagccaggatgagcttctacaacgtacgtacttaagctgcaacttcccaatcctgtctgtgtcacccagtccaggaacattggtacggcatgatgaaatgccgctcaccaaacacctgcgtagctagatggatctggtgatctatctagctagctataatgtagttcagctaccaagctagtagtagtaggtcgaccgatccacgtgccgcgcgctgtgtcgtcgtcatctatatatcagtcagctacaagtaattttgcaggcaagcaaaggcgccgtgatacgtttctacgagacgctgagggctgagctggggtcccacgtgcacgtcaccatcctcacgcccggctacgtcgtctccaacctcaccaagggcaagggcctccagaaggacggccatgtcggcatcgacgaggaggcccgcgacatcaacgtggggccgatgccggtgggcaagacggagtcgctggccgaggtggtggtggcgagcgtgcgccgtcgggactactacgtcacgtggcccggctggtactggcccttccacatggtcatgtgcgccgcgcccgagctggtggactggttctcccgcaccttctacgtctccaagtccggcgaccaggacggcggcggcggcgcgctcagcaagaagatcctggaggccgtcggcgggaagaagttcctctacccccagaccatacgctcacagaccgccatggcacccaataactgacaacctacatatatatatatatatatatatatatatatgtcatttatgagaatgcacggtcgatctgttgttggattagaacagtacgtgatgatcgaacgtacgggccggcacgggtgaaattgtttattcgtttcgtttcggggttttttcttcttcatttcctctgccttttctccacttccgattttacaaatggtcaatgtgtatgaagtaattaatacgaatgttcattcgtggttggcttgcattgtacgccccgtgatattggggcatgcatgggtgcaaattgcaaagttgatgtacctatataggttttgtttgaatttaacatctcaagttagaactcacgaaagttgacatacaattggctatatttac

SEQ ID NO: 24824 - DNA, 236 bp, Zea Mays
cgcggacctattcatgcagtggaggatccgtgggaatggtagacatatgcaagagttacgagaaacatatgtcgtgtggttagagatcctcatctgagtaaatcgattcagatcgccgttatatccccggagagtggagacttgatctctgacctgcaacctaagttaggatgtaaacattatgaataaaaataatgttgtattgatgagatggtgaaattagactagatgcaacc

SEQ ID NO: 24825 - DNA, 2721 bp, Zea Mays
cacggccacagcgaccacgtgacacctctcacagtctcacctcgtcgtcctcgtcccttccgcggccagccaggcagtcaggccggctggccgaggcagccgtgcccacgtgcacgaagcagcgggccgtgacgtggtttggggcgagcaggtgaccggcgagtagaagtagaagtaggctagcaacctgcacgcctacccgtcccacgcacctcccgacttctccggttctcccttcttcatagcagccacccacgcatctcagcgccgaggcgagcgaggacctcgtggacgcggcggtggagggcgtggccccgcctgcggaggagatcgcggcgaacgcgagggccaaggaggcggcggttctggccgccgagctagtgcagctcagggcgaagatctccgcgttagagtctcgcattgcagagcagaacctggagttcaagaccaagaatgatgcaatcgaaacactgaatatgattgtcaaggaaaagtcacagaagattgctactatgcagaatgaagccaaagggtctttagctgcagaggagcaggcaagcaaggccaatgcactggctattgagctcaagaagcagaccgagaagctcaagaaggatattacagaacaaaaaattaaaaaagcagctctggaggctagggctggcaatgctgataagaaggtgcaagagctaaatatgaagctggagaagctccagaggacaagcagtgatcaaaagcgcaggattcagaagactgaacatgctcttaaagctgctgaggaggagctgatgaaggctcagttggaaacaacaacaaaagtaaaacagcttagagaggttcatggagcctggttgccaccatggttagcgacacatgcagcccgctctatggaggtgatgtcaaatcactggaatgaacatgggaaacctgcctttgacagcttcttgcagaaggcatctgaaaaaacagtgcagacaaagaaatgggctgagcctcatctggaaactgctaagacaaaatggatgcctgttgctaaagaaaaatgggttaccttgaagaaacatgcaaagccctatgtccaaatggtctcagagaaatcattggaggcttatcaaacatcaagtgactttgtcaggcctcatcttgtaaatgcacatcaagttgttgatccctatttccaggaagccaagaaattatccaagccatatgttgatcaaattgctacagctactaaaccacatgtcgagaaagttagaactgctctcaagccttatactgaaagagcacgacatgtatatggacagtttcttgagacagctactacatatcatcagcaggctcaggcaactatctcggattaccttcaccggcatgagtttacaaaacagtttgtaactaaagagttggtgtggtatctggcttctgctttattggttacacccttctttgttttgtacacactcctaactgaaacattctgtaccaagaagaagaagaaaacacctcggagcagtaataccaaccatggtcataggagacataagcgccggcatgctgacaagtaaaacattgatcaaccatggtcattactttttttataacgatcttggaagcttgaccatttacctttcactgtaaatggtatagacactatcatccgtcatcgccgaaccttgttgtgtatccacgaactagaatacacacaagaaatgtgtttctgccccccatcgtgttgggagagttgtgtttttcatcagagtagggaccgcgagcttaaatctgtgggtgtcatttcataggttatttgttgtagcattgtgcttgagcttgtgtaattcatgattattttgtctcgcgtttgtggatcacttcagccactacattattctacagcttccactcggtgtaaaagttttatcttccacgctgggatgctgtggtttggagaaattctagtaccaagaaaaaccttagttttatatacaagagacatggaaaaggaggtctagactctgttccatcgtaactgcgctgcgtaagcccctaatctaccgcgaatccgcttgatgtttctaaggggaaatccaaatcgaagcaatcggcatgtcccgggcgcttgtcggagaaatttttggcaccattcgtccatcacgtaaccacatatagctcaaaattcaaaggtcgggtttgaagaaaacatacacgtttatcagaaactatcacacggacgagtacaccccatactcttatctagatccctgtatgagctcgatcagtaccaagcctgtttttgttgcacatgacatgcatgctgtcaacctatgctgctccgatctctacaagccaagagcccccaacaaaaaactgaaaaaaaagagaggataatttccagctactgatacaaacaacggactaaattgacacatcaaatcctaccgacctacatgatccatacaccaacattacgtcgttgttacgtttgtcggctgcatgcatgccattgccaagccacgccactactccgatccacagctactagctagacttggtacccgccggcaggccagtacctctccaccagctgctccacgtccaagccctggtaccgggccccggccgccgagtccgcgccgaaccctccgtccgcgccgggcacgatcacgcagccgccgagccccgccgcagccgccgtcgccatctgcttctgctggtggtgttcac

SEQ ID NO: 24826 - DNA, 1203 bp, Zea Mays
gagctaattaattgttctcaattcctttgctgtttggtgggtaactaggataatcagcgacgaactgtagacgaactctttgttcagcgacgagtcatgatgatactggaaagcgaatccgttgggatcttgctccagagtacaggttggagatgacacatgtgtttccaagggaaggtgcctcatctagctcaacctcaatgagcagccagaggagtgaaactgatgatgataggatgattgcaatggttctctctgaagaatatgccaagttagatggtgctatggccaagcgtcttactaatttaacatcaattccccttgttccccggattaatacatacttcccgacatatagtgatgctactatggaccattatcgcctccttgacaggttaaatgcatacggcttgtttgaggtgagagtgtctggtgatggaaattgtcagtttcgtgcactctcagaccaactatatagatcacccgattatcacaagaatgttcgaaaggagattgtaaaacagctcaaggaatgtaactccttatatgaaggttacgttccaatgaaatataaacattattgcaagaaaatgaagaagtatggtgaatggggtgaccatgtcacgctacaagcagctgctgacaagtttgctgcaaagatatgtcttctaacatcattcagagatacctgttttgttgaaattgttccacaatatcaagctccacagagagagatttggctgagtttctggtccgaagttcactataactcactgtacgatgctcgagatctccctagcaaatacaagcctagaaagaagcattggttgttgttttgatatccacgcgggggtttgcttcttaatggtggaatcatattgcttgaccgcttcgaccaccggccgctggtggcagcctggtcatagctcattgtggctctatccactatatagctatgcatcaatgatccattgtattgctcggtacaactccatcacgatccaggcatacaacactagatacagttacaatgccgaacctgagccttgtgaatagatactcctttactgacatacaggttgattgtataccatgtcctatttgttcattgttatattctttatttatacagttacatattattaatcttcatcagttcattattcagttcatatttggaagaattcatcatcgtgttcttgg

SEQ ID NO: 24827 - DNA, 2083 bp, Zea Mays
cacactgatccatcccgctcggctgcaacgctcacacccacacccaccacgccggctgcaggcacgcaccacggtaccagccgccagcgcacgcccgccaagccgccagcgagaaaacaccgaaccattcgccctcccggccgacatcacgaccgcccgatccggccggagcctctccctaccccttccgcgcctccgcgctgacgaccgtcgcggcgtccgcccctcgagtccaaccccaattctgccgtggccgcggctctctgaatccccaattttttcacttcccccaagggccgcggggatgaaccggatcccgtccgtctcgctgcggggcggcggggcgaacgaggacgccgcggcggcgtcgccgccccccgatcccgcggcgctgtcgcggtgggtgcgggccttctgtgtcatccggttcgacctggagcgcgggcagctggtggaggcctgcttccctcccgacgcgctgacggcgcccggcagcggcctcgaccgcctcgtcgccttctcgtccttcccggactccatgtctcaccacctcccgcgccaccgctcctccgtccacgactcgctcttctccttccgcatccccgacccgtcctccccacgccgcgccttcctctacggcttcgttttcaaccgccagcgccaggacgagcgcctcccccgcggcggcgagcagaagtccgtagtcatcctctcccacgccccctactcctcgctcttccgcctgctgctgcagatcctcggcccgctctgctttgacgtcggcccttccgcactggccatggtggcgtcgcacgttgccgtgtggccggcgccggcgccagggcacccaatggagcttccaattggcagtgccgcgctgcgcgtgcacctcccgcctgcggctgacgatcctggcccaccgcctgcgctgctgcccgccaacccctcggtgccgtacggactcttccatgatgctgatctgtttgccgcattccgtggcttactcctccacctatggaccctctgggagctcatggtggttggtgagcccattctggttgttgcgccgtccccagctcagtgctcagaggctgtgtctgcgcttgttagccttgttgctccgcttttgtatagtgtcgacttcaggccatacttcaccatccatgatcccgattttgctcgcttgaatgtgcttgcggaaggcgaggtgttcccgccgatggtacttggagtgaccaacttgtttttcttgaagagtcttaagagcattcccaatgtcgtatccgtgggaagcccaaatccatattcaacaagggtgttaccagtgggtggccaatcgccaggaaatggaatgaatgggacacctgggaaactcaagcttgagaaacttgcaatcaataagttctctccaactagcctattgaattccatcaaattgagaagagaaggtcctctttctctcatgacagagcacaaagaagcattatggagcacgtattcaccaaccacaaagcccgatacttctgttctaaataggctcattgacgctggtgtgtcaccaaggattgaggagtccatgtcagtagtcaacaatgagatattgcggcggcacttcttggagttgacgaccaacttccttgcgccttttgggccgtatctgagaactacaacaccatcagaagggacttcaccttttgttgacccaccattgctaccaccgtttcatgcagatgagttcatcaatggtttggcagctagaggtccagggaagtttttgtccaaaaggatgaggtccaattggttggacctatataggagatttctcgaaggccccaattttatgccttggttccggcaaaggcgtgctgctgcggagcaagaacagcagaggctctggaggcaggctcgcatgaatgttgacattgaaaagctaatgtcaaatatgtccgaaatagagaggattgattcttttgatgctgttgagcgttatcttctcagagagatggaggcgtcgcctaggcatctaggcgcccaaaagatccaaggcgtccccatcgcctaggtaagaatcaagaagagaggg

SEQ ID NO: 24828 - DNA, 2745 bp, Zea Mays
gaggaaagggtatccgccgtggatataattgggtaagccagaagccaaagcaccagaagatatacagggggaggggttcctttcttctcccaccgtcgctgccgccagctgcccagctgcgcctcgtcgtcagagggttccctttcctgttcgatgtgacgcagccccccgctgcgccccgacggcggcggcctcaccggctggcgatgggcacgacaaactgagacctccctttccacccaagttctctttcctccttctctctctctctccctctctctgcggaaggtggcggtgctgcactctgttggtacaagagtctggagtgcagtgcagatccacccggccggacctggatcgatatctccgtttgttggttcaataaaaccaataaattctggggttcaactgaacccccaatccgagtataacggccactctgtgctgcaaggtttgtctaagattttcgtgcaataacggccatgtggaggctcaagcagttcatccccaaggagcagcccagccccagcggcctcgagggtcggacggtcgatgttggcaatgtcaaggtgcacgtccgagaggccattgctgagggtgggttctcatctgtctatgctgctcgagacctggtaaacccagcgaagcagtacgccctcaagcgcgtgattgtccaggacgaggagtcgctgaacctggtccagaaggagatcacggtgatgcggtcgctcaaggggcaccctaatgtggtcacactggttgcacacgccatactggacatgggacggatgagggaggcactgctgctcatggagttctgcgggaagtcactggtttctgtgttggagggcagaggagcaggttactttgatgaggagaaggtggcgctgatcttccgggatgtttgcaatgctgtctttgcgatgcattgccagacgccacctcttgctcacaggctcttgggtgtctcttgtatagaatttgctacttcaaatcagcatttgatggagaatcaaagctccaaatacttaacgggaactatcgcatcccagaattgccgaagtacagttcttctattacaacacttatcaaagacatgcttaattcttctccagatgccagaccggacatcacacaggtgtggttccgtattaatgagttacttccattggagctgcaaaaggatttacctgatggatctccatctggatcagcatttgaatctcacactgccactgatgaagtatcaatgaggccacagcagatgagtggctcttcatcaagagagaatatcaagaatacctctcttagtgattcttccaacataatggtacaaagtcctctgaaagctatagggaacatgggttctatgggtgcattttggtcaactcaacatgctcaggagctatcttttgctgatgacaaggagccagcttttgataaagagcccattgatcaagtcagatcaaagcaatcacaggctaagaaccagaacacagcagctcgcaattcatctcggaagtctctgtctgcatcagttgatagttcccctggggatttcgaaattaggttttctgcaaatggctcggagtctaggttggaggaaaccaaaacggtaataacagagaataaaacaaagatacaaactactgccttcaactcctgtgcgtcagactttgataatatcaaaatgaactcacgaaacactactgacagtataaacataactagcaaattgaaagagcttcaattggaagcagaagtaactttactcaaggaacaattaaagatagcaaacctggagaaggaagaaatttcgttgaagtttgataagttgtctgccatttgctcctctcagaggcgagagatacaagagcttaagcaagctttggctgcagcttatgttacgccaccagctaaacagttcagagaaaattcaagtgttgaagtcaccccacccagcaaaagcctcgacactccgccgagggagaagattgaaggaacccctccagagctccggcaaggcctgtttacttcaagcccaggaacaccaagccctgacctgaaaacatggtcagctttccttgaagagccaaaatctcaagcagctgtgaagagtgtccaccccaggtcagtccgaactctgcgtgcatcaaacagcaacaaagccagctcgttgggacagtcaaatataagttctagcaccgatccatttgcgtttggtcaagatagttttaaggctgctccttctggaactgtacttcccctgttatcaaacatggggaatacttctcagctcagtaatctgaatatagaagaaaagaaagacggatcctaccaaccagatggatggactgggttttgattgtgctatagtaatttatgtgccaaaagagtcaagagttcatatggtcttggtggtgtggtatactgaaggtgcagagaggaatgcctgaactggtgtaggtatgtgtgacaatgctttttgtacaattgttctggtcctgagctagcatcgtgatgcgttcagttgtaactgtagtgcaaatgtaagttgcaacttgcaattaattgctagatattagatataggaagatgtttttttttcttatgtagacaagcttgtggtgtcatgaattttggaggcatgctatatagatatagccatctattataccatatcatgaataaagggttatcatttagtgacaattggccaatatactcactttaatactattcatg

SEQ ID NO: 24829 - DNA, 2757 bp, Zea Mays
atgacacaataaacttgtgagaaggaaaaaaagatactaacgaactttcagctatcttgaggttcggtgcagaggaattgttcaaggaagacaagactgatgaagagaccaagaggaaccttgaaagtttggacattgatgaaattcttgagagagctgagaaagtcgagacaaagggtggtgaaggggaggaaggaaatgagcttcttagcgctttcaaggtcgcaaacttttccagtgtcgaagatgatgcaacgttctggagtaggttaatacagccagatcctgcagatatagttcaggaaactttggcacctcgtgctgcacgaaataaaaagagctatattgaagatcctcagcttgacaaaaataataacaggaaaagacgggcagttgaaacacaagaaaagccaaggaggctttctggcagaactgtggaaacagttaattcattaccattggttgatggagcagtagctcaagtacgagagtggtcttttggtaatgttccaaagaaggacgcttctcgttttgtacgagcggtcaaaaaatttgggaatgcaacccagattggattaattgtggatgatgttggtggtgtacttgcgaaggtaccgcatgaagcgcagatagaactatttgatttgctggttgatggttgtcaggaagcagttaaggagaatacagacattaagggcacagttttggattttttcggtgtagctgtaaaggcctatgaattgctagctcgtgttgaagagcttcagttcttggcaaagcgaattgcacgttacaaagatccaatcaagcagtaccgcatccagctaccttataaaaagcctcagtggtcagcaagctgtggatggactgaaactgatgacgctagattgatggttggaattcattggtatggctacgggaattgggagaaaataaggttggatccaaagcttggcctgacaacaaaaattgcgccagcaacacttggagaaagggagacatttttaccacgtgctcccaacttggataaccgcgctagtgctctcctgcaaaagtatgctaagtttagcggtaagagcttaaaagtcaaaggaaacacccgccagacagtcaataacgacagtaatagtggagttcgatcaatgaggggccggcaaaaggatgtaccagaaaaagatgataataagccgaacaaagatgacattcagaagcgtagggtaatagtggaagctgaagcaagagaagaaggtgaaatttctgaatcggaggcagagaccaggtatcgtcaggacaaagaggagaagtggcttgaatggtgctctgaagttttagatgaggagcaggaaactttgaagcgcctggataggctgcagaatacaagtgtaaacctcccaaaggaaaaggttctttcaaggattcgcaagtatctcctgataattggggacaaaattggagaagttgtccggcaacacagtgaatcttataggcaatcccgcatggtcatgaggttatggaattatgttgccaccttttcaaacatgtctggggagcaactgcatgatctctatatgaaacttagtcaagaccaactggaaggtggagttggcccatctcatggtggcaatttcacatccattcctcccaataagggaggtaactcaaatcaacttcatccttcgagaaaccaaaggccaactaggtctctccagtacaattctgagtctttccataatgagagctctggaagttctgaagcctggaagcgtcgacggagagctgacacagataatcaatttgacacccagcctttgtgtcaacctccaattatgacaaatggaaataggttgcaggaatctagtagttctgcaggtattcttggttggggtccagttgaaattagacggtatggtaatgagaggccaaaacgtgctgttcatcctagtcatttccctactgggcatggacctttgctgtagctgaaggaagtagatgatgcgaacaaccttgttcattttggcataaccgttcccagtgaatttcagcttccatatagttataaatggtggatctccgtaggaattgaaattctttttccaaaacaaaaaggaataaagagcaacctcacctggatcacagttttgaattatatgccttaaaaggtaatgccaggactctagaggcgacttatggaattgttaacagctacactgaatatccttctgacaccatcacagcaacacaaatacatggtggcttgtgaactgccaagaggatcaatcgaggaagttttgcctgttcagttttgtgatctctcaacaatgatctatagttaaatctcaatacataaattatgctttacattgtaatatattgaaatatggttccgttatgctccctccctctcgatgtgttttgtgccgtttttctaccgtgttgatgtaaaagatgaaagaaatgcatgttctcattttgaggcaacaaaaagttgcagccgggagcataatagtgaaatgcgatggaattatcggatacttatcgattccatagtgttttccctgagacaatgtactgaatgaggtacggttataagaaatggtgataattagcttagtaggtgctcagccattctacaagtcatctggtagtccgaagttgcatgaggcctactttcccctggttgccccacttatgctcagtaagtatgcttctagggttgtatgatgatggcccaattgaatttttaatcctgtgtatgaa

SEQ ID NO: 24830 - DNA, 3413 bp, Zea Mays
ttttatccacctcgctttccttcacttggtttctaatacgcaattcgcggggaacccaaaaccctaatcctctctctccacgccgccagagagccgtgtgggagctcggtcctcggacttctgcatcgatctctgctatgagtgctatctaggtttctcagatgggtgacctcaaggaggttttccgctccctccaagaactcttccctgaggttgatcatcgtatactaaaggctatcgcaattgagcatcgtaaagatgttgattccgcggttgttactgttcttgatgaagtcatgccgttcatgacgggttcagctggagtggatggttctgttgggaatttgtcatctatggatggttctgttgggaatttgtttggtaatcacagcacacatgaagtgggaagttcatcatctgtttggcgtgatatatgtatcaatgagattgatgcaagtgtttactctgtgcaatacacttcttatggggatgtcaaaactggcaagcaagaaaacataaacaacacatatgtgggaagacttgcatcaatcgaaggggtcaatgagcaactaaatctacattcttatcctatcccaaatggtggtcaacatgatttgcttcccaaccttgatgtgctatcttcaaataccgatccagagaaaacgttggccaacacagataatgaagttggatacagtggattatttagtgaatgtttttcccaaccaccgacaggggaagatggtggtaatatcatagccccacaaccctgtgatcaagatcctaatggcatgattccagttggggattactttccacagaacagttcaatggagttcttcagtggctatgaggactacaattttgatgacggccttttgcctattggttctaatgatcaaatatcttttcgaattttgggtactgaaaaagatccttttgcgcctgtgctagatgttcctggtcgagataaagaagaatcatccactgagacttctggatttatagaatcctccaataatgttgcagatatgcttcctgatcttaatctgaaccattttacttctacggcttcaactcactcaaaccattctgttagtattgagtctcttgaggattctgttgctgatgccagaagcaataaggaacgtgctgcccatgccgtcgtcctgatgctgttgctcggatttgaccgcagacgcctccaagtccaaggtgacactgtacagtacggctgtagtgtcgagggtgctgttctcggctcctttgatgtacgtagttccgggtcataaaactgcacacatggttccggcttgtgcgcctgacctggcacgctggcctatatcacagacctcggcgccaagatctatggtgccgaggtctgccacgtgagctgcaagttcgatccatgtacgtcaccggggccagcacctcggcgccaagatctgtggcgccgagacgtgttacctcggcgtcacagtttatggcgctgagcaacgggtataaatttggaaattgtttctacaggagtctaaatgtgaaatttcttcattaaaaagggctaagatgaaaaaaaatcgggattgacgacagccactccaagccatcttgcacattaatcagtactctgaaccctacgtaattacatacccccattccaaattataagacgtttggcttatttagatacatagcctttatgcacttaggtatatatcactgttcatctacatggccgtttagcccgtgtacaaaccgtgtaaacgctacacaatggcttaccgtgttcgtttaatcagccatttgccccgtttaatcaccatttagtctgtatggccgtttgccctgaataaatagacaaacggtacatgatcatttaaacgtttaggctaacattggtctatattattatagtaaaaacaacatatatagaaaatccaaagcgtcttataatatggaacggagggagtattttatttaagttgttgcggtatatttttccaaaagatatgttgggaagtcatttatttagtttcctactaggatctgtttctttgtcatgagcctgaattttctgaataacgaggactgccaattatagttcctcaaaagaaaaacttctatgcaatgtatatttcttcttgcatatatgtacacaggggcaagcctagtgcagtggtgagagctgtctcacttagtcaccagtttgcggctcgaagtagcctctctgtatttgcggagagaaggcttgcttcagtttattctttccttagaccccactcataatgatctgttaccttctatagaattggttacaaaaatgatagaggatgttgagcttctagaagaaaaggctaaagtggccaaacatgaattgtccgttgctgggacaggcattctggcaaaagttgaggagctcagagaaatgataacttatgcgaaggaagcaaatgatatgcatgctggtaaggttttaggcgagaaagctattttaaccacagaggcacgtgagcttctatcacgacatcagaggctttcggatgagaggaataaatatctggtgataattgaagagatacaccaaattcttgctgaaagattggttgctgcacaacaagaaattgcagcagctgagaaagaaaatgctgaaaaggaggctgctgctcaggcagtactcgatgaacaggaaaaaatgatgaattctatcgtagaagaatcaagaaagctgcagaaagaagctgaggagaacctgaagctgaaggaattcttggttgagcgcggtcaaattgttgatatgctgcaaggtgagatggctgtgacatgtgaggacgtttcgttgctcaagcgagtggtagatgagcgcctaccgttgagcaagttgcagcgctcagctatgtcgagcctctcttcttcactgcattcttctcatcacaagagctggacttcctcggataaagccattagatctccagataagcacacccttgctgaacctgcaagcccagtggggaaagatctggatggcaacgagtgcaccgtggaagtgtcagatggcaacgacagtggtgaaggcattttgaagcgcgtggattccaaggaggatgtcgatggatgggagctttgctgaagatgttcaggaatagcggcgttgccagaggatgctgaagcataaactaacaataattgtgtataaacgcatactagcacggtgctaatctaatcgttttcacatgaatcgggaagtctcgctggctcaccacagttgtacgtgagatgagtccaactggcaactgcagcttgatgtggtatatataaaagtgaaggtttcagctcccttactgtccaaattttatgtcgtttctaattttgttctaggttaaatatctgacttttactatgtcttctaaaaatat

SEQ ID NO: 24831 - DNA, 1691 bp, Zea Mays
acaatagatcacctacctttctcacccttcatccaacggcgccagcacgcacgagcagtgcgccgccatccgttgcgccgtcgtacgcagccagctggagcgccgcttcccgccagccagccggagcgccgccgcccgcgagagtcccgcccccggcgtgtatcagaaccccccccccctccccggcgccgcgcagcagagctccgtggcccccgccctcgccgagcagcagagggccgcctccagccagctcgccggctatggctgccgctggagatccaccacctcctatttatgctgagggtgctgcaaggacaagaggagaaatatctccacatttccagacatatgcaagggacgacgatgcaaaacttgagaccacacgtgcaaggctgtcaaatatcctcaaaaggcatgaagatctgaaagagcgcctttcacgggattctgataagctcatttttgagcgcctacagaaagaatttgaggctgcacgggctgctcaaaccgaagagatatcaataaatgatgatgagtggaatgatggtttactggcaaccatccgtgagaaggttcatatggaggctgataggaaggccatgtccaaccaagtaaatgttccagcagatctttcatttcaatcaaggactacatataggattagaaataaggttatatattgcttggatggagctaggattggcatacagtatgagacattctttgctggagagccttgtgaaatttttcattgtgttttggaaagcaagtcattcctggaaaagatgattatgattgaacacaccttacctttctttctgcctgtacgtgaattagaaagtgatctgttgtcatctaattcaattaaattcattgatcatcttgaagaaattttacaggcttatattgacaggagagagcaggttcgtcttatcaaggagctctacgggaaccaaattggcgagctgttccatagtcttccttataatatgatagagtttgtattggaggattttgagtgcaaggttacaatcagtatccgatattcggatctactgcagaccctgccgagtcaggcaagggtcttggcttggccacttcgctcggccaagaaaatatctacaagaagcagcagtgcatcagctgcgcaaccagtaccctttcacctttcatatgccgaggaagcactcaaaaccttgtgtctaccagaagcatacgcagacattgtgctggagctaccccatgctttgaagaggattttatcctctcgggacagtgactaaatcgtgacctcaagatgtccagttttgttgtgcataagattcacatctcaatcgtggggcatgtttttgaagatattgttcagaatcttgtggtagtatagcctgcagttgtggactgcaattcctgtgaaagcaaggcagacatttgcgtgggccgctcgaaatattccggctacagttcctgttaaaagaatcaaaatcctaggaaggccttatggtcgaggcataatcttgccaactgctgtccttgtccttgatgtgtgctccttttttttctccactctggctatgtttgtttccttttagaattatactagcgcgttacgcgcgcctgcacgcgcgtgttgacaaacctattttatttcaaatatcaagtatctaagaagacatgctaaaatttcaacaata

SEQ ID NO: 24832 - DNA, 2464 bp, Zea Mays
ggagaaaagactaatcacttttttaagtgggacagggagcaaccgccatcatccctgttcgtcatctctcccaccatcaacaccaacatgggcagcaacacggaaagggccaggaaggcgttgggcgccatgaagctgatcggtttctctaagaagcaggccatcccagtactcaaggaactcctcaaaatcttcaacaacaactgggagcccattgaggatgagagctaccgtgccctcgcagatgccatcctcgataggcaagacagcaagcaaacccctccctcccaacagggcacccaagcagcccatgcggacttggagcctcttagatcaacaagggacgatcggcaacaatatctttctgctagccttgatgacacatgtgaagatgataatgaaacacccctggtcaagaggcccaggatgggcaccgctaatttcagaccagagctgcagccaccacagcaatccagtgtttcaacccaaggtgctctgcctgcttcaccacaaacgagtcgtcggcaaactcggtccttgactgtagagccacacgctgctggccatgaatatcctttagctgtcaacgatgctctagttgtgaaagaacccaaaccagaaccacaaattgatagagcagaagattttgtggctggtcctaatgccacacaactcaatgatggatcttcagaacaaacttcgggttttggtgcaagaggcaacatagttcaccaagctcaaagtcttggcaggagcctgcaagcagccgcagtgtgcaagaatggggtagggtctacagttcaaaatactcatgagacttcgattgtggaggtggacgttgcttcctcagccaatggtgaggtgaagatgtcattgaaatgcagcttgggttcttcaaatttcagcattagtatggaggaggttttcaaaatggtggaggagaagtgccttcactcatacaagatgctaccttcagatctttctattggcaagctgctgagtgagccaatctcttgtgaggctgctgtgggcataagtgatgatgtggctggtgggtcatcagtccttgaatcctcagaaccttgtttgcagaattcacttgttgcttggaatcctgagttggctcactgtaatcaaaagacaacccatgatactactgatatatccaaaggcgaagagcggcgccagttccatgttcttgtgcaagaataacagggggcgagttctcctatacacttgagggcctgcttaagacagcattccttgatgaatgtacctcagtgaatcatttcctacaagagcaccataggttctactgtccagtttgccctcttgaaagatctaagaacgaaggctcacctggtccatgtaaaggtcatattgtcagaaaattcattaaagaatgctggagtaaatgtggatgtggcatgcagtgtggaaaccgtgtgattcagcgtggtataacatgcaaattacaggtgttctttacacgtgagggtaaaggctggggagtacgcacagtggaagatctcccaagaggtgcctttgtctgtgaatatgttggagagatactaacaagtgctgaattgcatgaaagagcaattgagaatgcaagaaatggtaagcatatgcatcaagtgctcctggacgctggttggggttcaggtgtagtattgagggatgaggacgcttgtagccttgatggttcattttatgggaatgtcgggcggtttatcaaccaccgatgctacaatgcaaatttagttcagatccctgtagaagttgagacgcccgatcatcattatcaccatctggcatttttcacgaacaagaaagtggaggcatttgaagagttaacttgggattatggcatcgattttgatgacatggaagggcccagtaaaccgttcagatgcatgtgtggaagtagatactgccgcgatccgaacaatccaaggaggatgggtagagcagctgctaagcgaaagtaggcagggagcgcggacttggttggagttgagcacaccaacttttgctgtgggggggtctggtttcgtgtttgatgtggagtaatgcagtaccatcacctcagctagtattaagtgtagataggtgtggatgattttggtgaatggtgttatggacggaaatgctgcaggctgagcgacctagtaacctatgccatgtagtggcatctaaattagcctgggattgtgtatgcgtaaaaagaacgcctaagacttaaccatgttattatgtcagcttggtacatggtgataaaaagaatctgaccatttcatgtcagccacaattcttgggacggtcggagagtgaactagtatgtcgctggtgcgttgcaggcctgtttggttgtatgcatattgtctaaaattagttgctcaaattgttgtcacatcttagcacgcgtaagtgaatcttcctttatttttaaaattcactgacg

SEQ ID NO: 24833 - DNA, 1939 bp, Zea Mays
gtctttaacaacccacgatctgaaagcaaagcagcaaagcagaccaacccagcgcagcgcgcaacacctcgccaattgcgacgccgccgccgtcactgtcgccgcaggagtgcgaaccacgctgccgcccgctcccgccgcccaaacagctttatccgagccccgattcgccggatcacatgctgcggccacctctcaaatgacctctcaactccagagcactttgctcctgctcccgctcttcgccgccgctgctttgggccgcggcggcgacgcctcgactgcgccgtcgctggagttccaccatcggttctccgcaccgctgcggcggtgggtggaggcccgagggcgcgcgctccctggcgggtggccggctcccggcagcgccgcgtacgtcgccgcccttgccgggcacgatcgccaccgggcggtgtcggcagcagggggtagtagcagcgacgcaccaccgctcactttcgccgagggaaatgccaccctcaaggtcagcaacctcggatttttgcactatgctcttgtgaccgttggcacaccgggccagacgttcatggtggcgctggacacaggcagcgatctcttctggctgccttgccagtgtgacggctgcacgcctccagccactgctgcctctggatcagctacattttacatccctggtatgtcgtcaactagtaaagcagttccgtgcaacagcaacttctgtgatcttcaaaaagaatgctccacagcattgcaatgtccatacaagatggtgtatgtctctgcgggcacatcttcttctggatttttagttgaagatgtgctttatctctcaacggagaatgcccatcctcaaattctcaaggcacaaataatgcttggttgtggacagactcaaacagggtcatttctggatgctgctgctcctaatggtctttttggacttggaatagatgaggtttcagttccaagtattttagctcagaaaggtttgacatctaattccttctcgatgtgctttggtcgtgatggtattgggcgaatcagctttggagaccaagagagctcagaccaagaagagacacctcttgacatcaaccgacaacatcccacatacgccatcactataagcgggattactgttggaaataaaccaacagacatggacttcattactatttttgacactggtacttctttcacatacttggcagacccagcgtatacttatataacccagagttttcatgcgcaagttcaagcaaatcgtcatgctgctgactccaggattccttttgaatattgttatgatttgagctctagtgaagcaagatttccaattcctgatataatcctaagaacagttactggaagtatgtttcctgttattgatccagggcaagtaatctccattcaggaacatgagtatgtttattgcctggcaatcgtcaagagcatgaagctcaacattattggacaaaatttcatgactggtcttcgtgttgtgttcgatcgggaaaggaaaattcttggatggaagaaatttaattgttatgatactgatagttccaatcctctctccatcaactcccggaattcatcaggtttctcaccttcaacatctgagaactactctccgcaggaagcaaggaacccagctggtgtttcccagttgagaccactgaacaattcagcaccagcagcgttatatgatagcttgctcctgatgcttatcttggtccacctggctgtaaattagtttggttcttaaaatagatactgtagagcttgactagaggtacaccatagagaacaatattgtttagtggttacacgtcctgtaatagagatacttgtgatgccgattttttatggctcattgtacaaccattcccccgtcttgttttcactcaaaagggtatctcagattttatctgtaacc

SEQ ID NO: 24834 - DNA, 3607 bp, Zea Mays
agggagaacccctacttgcggcaggcttaagggcgaaaggttatagagttggtcctgtgtatgatgatgtgttggcaatggcttggttttttctggagcttattgtaaaatcaatgggattggaacaaagtcgtctcttctaccacaaccttccattaggtgaagatgtcccaccgctacaattgaaagaaggtgtcttcaggtgcatcatgcagctctttgattgccttctaactgaggttcatgaacgctgtaaaaagggtttaagcttggcaaaacgcttgaacagcacgcttgctttcttttgctatgatcttttatcaataattgagcctcgccaagtttttgagctgaaactatctctcgtcagttcttattcaagagatctttctgaccttagaccatgatgatttgtctcaacgagcgaaggctgctcggattctggttgtccttatatgcaaacatgaatttgatgcacgctatcaaaaaagtgaagacaagctgtacattgctcagctgtacttctctcttatagggcagatccttgatgagatgcctgttttctataatctgaatgccatcgaaaagcgtgaagtgctagttgtcattttgcaaattgtaaggaacttggatgatgcaactcttatcaaagcatggcaacaaagcattgctagaaccagattgttcttcaagcttcttgaagaatgtataacccattttgagcacaacaaaacaggaggcagcatgctacttggtgctagttctcggagcccagatgttgagcgccctgcacccccaaagtactctgagcgattatccccatcagtcaatgcatatttgtcggaggcttcaaggcatgaaataaggcctcagggaacaccagaaaatgggtacatgtggaacagggttagccctcaattaagttcccctaatcaaccctattcattgagggaagcacttgctcaagcacaatcttcaagaattgggtcaaccgccagggcattgagagagtctctgcatccagtactgagacaaaaattggaactttgggaagaaaatctcagtactgctgtgagcctcgaagtgttgagaataaccgagaagttttcagctgctgcaggcactagaagcatcactactgattatgcgaagctagattgtgtaacatctatcgtaatgggtcttttatctaggagccaacccttggcattttggaaggctttccttcctgtggtctacaacatatttaatcttcatggtgcaacactaatggcaagggagaatgaccgcttcttgaagcaaattgcttttcatcttttgcggcttgctgtttttcgaaatgattctattaggaaaagagctgttgttgggttgcagattctcgttaggaacgcattcaactatttcaagaacactacaaggttgagagtcatgttgacaattactttgtcagagttgttgtctgatgtgcaagtgactcaaatgaaatccgatggttctcttgaagaaagtggtgaagctcggcgccttagaaaatcactggaggaaatggctgatgtaagaagcaaggatctgttgaaagattgtggcctccctgttactgcattggaggcggcccctgatggttcctctgataatatgtggtcttgggcagaggtgaaacatctctctaaatgtctagtccaggcccttgatgctggtctggaacacgccctcttggattctgtagtgactgtagacaggtatgcagctgctgagggtttctataaactagctatggcctatgcgcccgttccagatcttcacattatgtggttgcagcatttgtgtgatgcacaccaggagatgcaatcatgggctgaagcagcacaatgtgcagttgctgcagctggcgtgatcatgcaggcacttgttggaaggaatgatgctgtgtggagcaaggagcatgttacttcgctacacaagatttgccctatcgtcaacactgatgtgagtgcagaagcatctgcagctgaagttgagggatatggtgcatccaaattaacagtggactcagcggttaaatatcttcaacttgccaataaactcttcacacaagctgaactttatcatttttgtgcaagcattcaggaactcataattcctgtgtataaaagcagaagggcttatggacagctggccaaatgtcatacatcactcacaaacatctatgagtcaattcttgaacaggaggcaagtcctataccattcattgatgccacatactaccgagttggtttctatggtgagcgtttcggcaagctcaataaaaaggagtatgtatttagagaaccacgagatgtacgtcttggtgatattatggagaagcttagtcatatatatgaggttaaaatggatgggagtcacactttacatataattccagattctagacaagtcaatgctgatgagttgcagcctggcgtctgctatttacagatcactgctgttgatcctgtaatggaggatgaggacttgggtagcaggagggaaaggattttttctttatctactggtactgtacgtgcacgtgtttttgaccgttttcttttcgatacaccattcacaaaaaatggaaaaacacaaggtggtctagaagaccagtggaagaggcgtactgtgctccagacagagggttcctttcctgctttggtgaaccgtctgccagtcaccaaatctgaatctctggagttctctcctgtcgagaatgcgattggaatgatcgaaacaagaacagctgcattgagaaatgaactagaagaaccacggagttctgaaggtgatcaactcccaaggcttcaaagcttgcaaaggatactccaaggaagtgtggctgtgcaggtcaacagtggggtattaagtgtgtgcactgcattcttatctggcgagccagcaactaggctcagatcccaagaactgcagcagctcatcgccgcattgcttgaattcatggctgtctgcaagcgtgcaatccgtgtgcatttcagattgataggggaagaagaccaggaattccacacccaacttgtcaatgggttccagtcactcaccgctgagctatctcattatatccctgctatactctccgagctatgatagaactgtaacaagccagaaattaggtagcatgtgaatgattcattctttcagttgcaggttcccaccaaatgtccatatttccattagttttggttgtatagttgcaccgattcctgattttggagtgtaaagtttgtataacctagtgttatctgttatgcaccagttatatgctgagtgccatgttttttgcggtttgctactgtatcacagcgagccgacattttacaacagttatatgtaatgttctgtagtgatacaatagtgcctattctgggtgatatgtatttttttccctgtaggaaatttgctgctgtcgagggcatcctcgcaatttgtttatgcacgatttgaagccttgtgttattgaagtcgttcccataactgtagtttgtttattgttcctagtgtataatgacgccttaaattgctcatgttccatggttgaacaagatttggaacatttcaa

SEQ ID NO: 24835 - DNA, 3689 bp, Zea Mays
cttgttcctgtctcggcggcgtcttcttctttactcccggtttccctccctcgtcgccgtccatctgctatctcaggcgctcagccaactgactccactgacccccaactccgctgccgactgccgagcccggactggctgactgggtgcgcgcggcgcggtggtgcatcagcagcccgcgcggcgccaaaacacacaaactgctccctccctccatcctatccccccacgctgggtcgcccgatctgcatgcgcacggcggcttcctcttggcgtttctagatgggctcctcctccgtcctcctcttcccctcgtcctcctccgccgcaccctccgccccccattcctttccccactctcatgccaccgccatcgcctcctcccactccttattgccgccgctgccctgctccaaccccccgcctcctctttcctcgcaagaccacgtcctcatccactacatccaccagctagacgagcaagaagccgccaccatggtccgcaagcgccccgcgcccgacatggacctcccgccgccgcgccgtcacgtcacgggcgacctctccgacgttacggccgcagccgccgccggtggtggtcctggcgcgccgtcctccgctagcgcgcagctacccgcgctgcccacccagctccaccagctgccccccgcgttccagcaccacgcggcggaggtggacgtgcccccgcaaccgcacccgccggcccattcgcaggcgggcggcgaggcgcccgcgtccacgaccgcgtgggtggacggcatcatccgcgacatcatcgggagcagcggcggcggcgctgtctccatcacgcagctcatccacaacgtccgcgagatcatccacccctgcaacccaggcctcgcgtccctcctcgagctccgcctccgttcccttctcgccgccgaccccgccccgctgccgcagcagcagcgcgctctcctgcacggcgctccggccgccgccgcggggctggcgctccctctcccgccaccgcttcctgacaagcgccgccacgagcctgcgccgcggtgccagcagcaacagcaggaggagccgcatccggcgccgcagtcgcccaaggtcccgaccgccgaggagaccgccgcggcctcggccgccgcggccaaggagcggaaggaggtgcagcggcggaagcagcgcgacgaggagggcctccacctgctgacgctgctgctgcagtgcgcggaggccgtgaacgcggacaacctcgacgacgcgcaccagacgctgctggagatcgcggagctggccacgccgttcggcacctcgacgcagcgcgtggccgcctacttcgccgaggccatgtcggcgcgcgtcgtcagctcctgcctaggcctgtacgcgccgctgccgccgggctcccccgccgcggcgcgcctccacggccgcgtggccgccgcgttccaggtgttcaacggcatcagccccttcgtcaagttctcgcacttcaccgccaaccaggccatccaggaggcgttcgagcgggaggagcgcgtgcacatcatcgacctcgacatcatgcagggcctgcagtggccgggcctcttccacatcctcgcctcccgccccggcggcccgcccagggtcaggctcaccggcctgggggcgtccatggaggcgctcgaggcgacggggaagcgcctctccgacttcgccgacacgctcggcctgcccttcgagttctgcgccgtcgacgagaaggtcggcaacgttgacccgcagaagctgggcgtcacgcggcgggaggccgtcgccgtccactggctgcaccactcgctttacgacgtgaccggctccgactccaacacgctccggctcatccaaagctgctaacactcgtatgacattgggtaatgtgagccttacggcaagcatcaagtggtggtagtagatccagtacagctattctaaaatattcttcggacgtttcctgctcatagtaaaaaaatcgcgttttcaagctcaaaaagcgatttcttcagaggtttgctgttgagcgctattttggaaaccccattttctcaattaatttttagtttttaaagaaaaattagttcattttttctcttgtgaaatggagtcccaaactaaccctaatattaaaaaaaaaatcgcgttttggagctcaaaacgctcgttgttatgaccaaccagctttataggttgaatcttgacaatgcttttgagatgatactgtagtgtagtctgtagtggagcatcctccatggtctttggtgatcccaccgaaccacaaaagatagatttcgcttgcatttggtgtgtggatcactaggagggagctgaaagtttatcatcatggccaactttccatgccaaaaggtttctggttccaagtgccaggacgaccatggttactgactgaatggaacaactgccatcttctactactaatcatcatttgttaacacgctacaactcgatcatcatcatgaccatcatcaggaagctacactcagaaaggcttgtcaaaggctagtcttttctccaatggctgacatgccagattgccagcagcacacatatgcatatctcatctgaagcatgagataaacatgtaccctgaactgcaatgcccttgatttgatgtatcattaaaaacgctagcattgtcgttctggtacagtggcattgccaccagcgattacagaaccgaatggttgtcacaaaacgcacatcctgactgactgacggctcccgctgttggggttggaccacggggactgttgatcgattccttccttccttccgtccgtccgtccacctgcaggctggcccccaaggtggtgacgatggtggagcaggacctgagccagtcggggtcgttcctggcgcgcttcgtggacgccatccactactactcggcgctgttcgactcgctggacgcgagctacggcgaggacagccccgagcggcacgtggtggagcagcagctgctggcgcgggagatccgcaacgtgctggccgtgggcgggccggcccgcgccggcgccggcggcgccaggttcggcagctggcgcgaagagctcgcgcggtctgggttccgcgccgcctcgctcgccggcggcgccgccgcgcaggcgtcgctgctgctcggcatgttcccctccgacgggtacacgctggtggaggagaagggcgcgctcaggctcgggtggaaggacctctgcctgctcaccgcgtcggcgtggcggcccgtccagacgccgccgtgccgttgagagctgaaatcgttgttggttacccagccagtggtagatcttcttcgtactatactcctgcttgagtttcttgtgccacttcttttgcatctgtagctagctagctggctgctcgatttggtcgtcagttccgagatgggaaaacgaaaacatctcttctcgtcactaatcgctagatccattcacagtgatagttactgatgtaagcctactaattagtttaatggcagatcaaccttgtttagcctaattagttacttggtactactgttctttatttggtggagttccaccatttcatatgtgggcatgagctgaggtcaaggctgtctacaacagctattctattttagctcgtatcatatcttctattttaatttaaacgctgcattctacagtataaaacaa

SEQ ID NO: 24836 - DNA, 445 bp, Zea Mays
ggttttgcattggctgattgcatcccgcctccgccttaaaccctaaacaatgacctctcgcgccgccgcggaggccgccctcctccttccgctccgcctccactctgccccgctccgcctgcgcttcttctgtacctccgcctcccggctccgatgggcgtgttccgcggcggcgctgcttgccgtcgtttcgctcgtcaccgccatctgcgctatgcccgacgccggcgccggcaccaacgttgaagccgatgccggcgccttgcggttggagattgaagcgctcaggctaaaggtcgcgcggctggaatctcttctagaggcaaattcgaaggcattagacattaaggctagtatcttggaggaggacaacaaactcaatgaagcaatggaacgtgaaatccagcttttaacgaatggaccagacagaactaagtgaccatgg

SEQ ID NO: 24837 - DNA, 1985 bp, Zea Mays
atggacttgtgtggccatggtgggaggtgttggcttgccagagaacgagaaaggaaagaccgaggaaggaggggggcctttgattctttattggctgccctcgatacacgtggcacccgggaggcacagctgcattcaatgttgcaagtgatcgagccaaccttcaaggaagctattaaaagaaatgtgagtatagaattatctgctggaaggtatccaaagaatggagctactgacatgataagggcaaattatcacagtgaggttggaagctcaagcagtactcctagtgctacatctgacagtataacagcatattctgattcttttaaagtagagcttgggcgtaatgattttgagaagacagctatctcaaaaagggcagatatatttttaaaatggatgtggagggaattctacaatcaggaattgacatgtgccatgaaatacggcaagaaaagatgctctgaattgttgcattcgtgtaattgctgctatcagatttacctagcagaagaaaggcactgttcttcttgccataagactttcaaatccatttacaatttttctgatcatacaacacaatgcgaagagaaacagagaacagaacctttctggaacatgcaaaacactgattattctgtcccaataggaatggcatatataccatcagaagcacttcaaccattttggactgatgtgtatcgaaaatcttggagtgtgaagctgtacactaccaaatctattgctgaaatattccagcttttgactgttctggaaggtgcaataagaccagattgcctctcttctgattttgaaacaaatggatagagatgatggaggtttcatgaaatttccgtcaaggtatacagttgctaagagcaaacaagaaacaacacctgaaacagctggtttggatctgtatgatggaaggtggcttcctggtagtggccgtaggggtcgtggacgtggaagtagaggaggtagcaggggaggcagaggtcgaagtcgaggtggaaggatcccaagaggtgttagcagctcatcaaggatcgagttcaagggtggtattgttgcttctgataaagcgccaaggaagaatgtacgccgagggcgtggtcgtggtcgtggtcgtagacgtggacgtcgaactgtgaggcctcggcagccatctgttggcagagccagatcaattccaaaggaaaatttgttgggaagctttagcatgcttagcagctcaaaggctgctaccattgaggagtctccacgaagctctggcgcagacgagtggggcttggagaccagaacgacatacactgaatgtgatgagaacagctctggatcacagtcagaagataacgaggaaaatggccagcccatggatgatgattatgaagatcaagttccagattactcaataggctattctaccggctcgaggcaccatgtaatgatgtccatgatggaccatgatagtgacgaggaggatgaagatgctgaaggtgatgagaatgtggaagaagatgcagaccttgcagttgacgatgccgatgttgagatggacgaagatgatgaaattggtgatgatggagaggatggtggcgttggaggggagatgaatgcggatgaggatccggatgctacttcatattcatccgattacagcgactaagaaagcagaaataagggaaccttatcccagattcctccctcggcatggaatgcatgtagtaccgagtaggcattcccccccgttgtgagccaaaagggagcttagatgcttaggttcgaaggagcgaggaactgttttttaggcaccgcaggttttaatagaatttctgacgcattcgacgaagtgtttggttgtaccgtggtagttgtgttactggggaattccccgagttattatacaatgtgttaagacaaaatactgtcatatcgcatctggttgccatgcgtctaactggttcacggttttaccgtta

SEQ ID NO: 24838 - DNA, 1160 bp, Zea Mays
gtcatggagactagcatgctgtgagggctgcacacagcaacccaagttcccactcagcgagtacttctctacttcctgtcacaaaaaaagatttgcaatctagcatatttatggaagcctttgctccggataaaatttgcgggtcagggagatcagcggtcaccacccaagaaagagtgatggaagcccaaagtagtacttgcttttcaaaagttgtgggacctaacctatggtatggcgatcgcacaagacttacacccaagcaagaagaagctgcgcttggtttgtcacgtgcctgtggctctggcattccagcatacatttgcaccatgaagaagtctaatgttgtcaagagacagatggtattttcaagacagttcagtaagcgacacatattcggtcgtctgggcacttatgggtgtgaaaccagagtttttgcaggcagggacctgttcggcagtaagctcaacttctcaatgatccatggaggactaaggcttcttggtggatggcccctctttgtgaagagccaccgtatcgaagcagaacacgtctgtgctttcatgttccaggaagaggaagagggcgaactgtcacttagggctgatttggtgatttggtgattagggatccctaggggatccatggggaggaatcatcttgcaattcaattttgaatagcaagaggatttcttcccctcgggatccccggtcaccaaatcagtccttagggtgcacgttctgggtactatgccagtgccaacaatctagcctttgcttgtttcgttgatgaggcacgggatgaacgtcgctaacgaattatgcatcagacattagtattggaaacaacaacatgtagctatctagattacagccttataggttgttttgttgttctatctagataactatgtatggacatattgttcttttgtgttggagggagtaagcgttagtgttttgagacacgaagattgttatttttagactgaccgctcgagttgtgcaaataggaactgaattagtggcattgttagcatgtacatgaaaacgtgatttgtgcagtgcagggattagcttgggaatgtcgtcctaaggatggccttatattgggcctgtttggttcaacttttttcttaccagcttttctgaaaatctgg

SEQ ID NO: 24839 - DNA, 1923 bp, Zea Mays
ggtatagatcggcgctgttaacaattggtatcagagctccaacgatcctcggaccttcttcctccatggctactgcttcatcaccgatcgacgcccagctcactcaagcgctggaacaccaaacccgtgccattctcgccgagctcgacaaacgcttttccgccatcgattccaagtgggagctccgcgtcggtgccctggagtcccaagcgaaagagttcgcccgccaccacgaggacatctcctccacgatccgggcggatgtcgaggcgcacctctcagcggccgatgcggataccctggaccggatccgctactgggaggcatccacaggtgctcgcgttaccgccctggagtccgccatccacctgctcgatacttggcgtcctcgaatggggtcttcagtggatgctttccacacctccatggatacagttcacgctgaactgtccaaaatggagatccaatggtccaatggagcgcgcgttgacggcttctccaggcccagcctccttgacgcgcgcgaatcggcaccggcgcgctcacctgcgcccgtcagcttcgccgatggctcatgttttgggccccgcctttcctctactaaccgggactgtggatttgggccctatgtggtcgatctccacttcccggtcaagggaagcagcggagcctgctcgtgccgaccgttcttatacggctcggccaatgctgaagcctgtcgcggctcgctgggatcaacctcgaactgggactagtgacaactccaagcactccctcgctgctgctccaactgctgattctaaagtggcttctcttcgtgcctatcgccatgctagaggtctctgccaatattgtgctgagaaatggagcaaaggccacaagtgtgctgagacagtgcagttgcatgttgttcaagagttatgggatatgttgtctgttgatcagccagagtctaagggggagtttgaggattctgttgaccagttaatgctcttattatccaaggaatctatgtcggctaatacactatctaaggcattcagaatttgtggacaactgcaaggcatggagatgttgatgctgcttgattcagggagttcccatagttttttgaattcagtccgcaccaccgacttatcaggttttgttccgttggacacgcccttgtcggtcagagtagccaatggcaatgtcttgctttgttcagtggagctacctaatgcagaatggtcagtgcagggtgtcactttttcttccacatttaaagtcctgcctctacccttttatgatatcattttgggcatggattggcttgaaaatctgagcccaatgacagtggattggaaacacaagtggttgtcagtcccactggctggcagtacagtgcttttgcaaggttgtcacccattagtccctgtgggaactttgctggaggtcccacaggtggctgttaattcagccgaatagattcagttattgtctattgaggagttgcagttgcccgaacatgtgctgcacttacttcgtgtattccaagacttatttcaatcaccatctactttgccacctagcaggtcctgtgatcacactattcctcttattgaagcagctcgaccagttaatattcgaccctatcggttttctcctgcgatgaaggatgagatcgagtctcaagtggctgaaatgttgcaaactggattaattcaacatagtcacagctcgttttcctctccagtgctgcgggtcaaaaagaaggattcttcttggcgtttttgcgtcgattacaggcatcttaatgctcttactatcaagtccaagtaccctgtcccaattattgatgagctactcgatgagctgtttggtgcatcctggttttctatattggaccttagggcgggtttccaccagattttattgaaagag

SEQ ID NO: 24840 - DNA, 920 bp, Zea Mays
ctaaaacttccacttgttctagccgtcacggcgctaccagttctctgccgcatctctctgttcctctgtttcttcctcttctctaatacattccactagtaatctgttaacacttcgtcatgaagttcggcggctcgtcgctcgcgtcagccgagcggatgcaggaggtggccgacctcatccttagcttcctcggcgagatgcccgtcgtcgtcctctccgccatggggaagaccaccaataacctcctcctaggaccctccatttctagctctcagcgcctgggccggagagaaggcagtgagctgcggtggaggaggggcgtccgaaatccctgagctcgctgtcatcagggagctgaatcttaggacaattgatgagctcggtttagataagtcgatagtttcagggaccgttctccccaacacgcaggggtagcgtaggaggtgttgtggcggcattatctaggaagcggtctgtggacgtgaggcggatcaacccgaaggtgcctaaggaggaggctgtcaccatctccggtcgactcgtccagatcctctccgaccatgggcccctcaccatcggcaacacctggaacaacaccaaggtacccaatcaaccagtcagtcaagcagagtggcaaaagccggggagcgatgcaggcgtcggagcagcaacaacggaggactctgctggtgtagatgagaaggaaacacacaaagagcatcaaaagcaagttcaacgatcttatgtcaacccatccacctctgaatgaggcatattcagatgtgtgtgtattcagcactcatgctgccttcagtttacggagctcaatatgttacatcgacctttccaacctgccggcagaactcaagaagctcaagcacaagaagtgcctcgtccagtccccccaactccttcat

SEQ ID NO: 24841 - DNA, 1158 bp, Zea Mays
gagggagaaaagaatagagaggaggcttgacaccatgatagaggatgttagttgccttttgtgagcaaacagagggtcaaaagttgctggaagatttaccagtgcaggcgatgttggagactctcacaaagagatacgagaaggaattgatacacccaattcaaaacctgttcagtggagaattagcccgtgctatgcttattcagattcaaaagcttaaactggaccttgaatcgaccatggtgctgagggaagaggtaatattgcacgatgtcaacggaggctgcttcttgttgatgtagagagaaggcttatggagtttcaacattacagggataatggaatggaggaagaggcacggtgcaagtttggcttagtactttacacgcttgatagactctgcaaagctgttgagtcacacgcaaaagaaacaggcgaatggttaagcttgagacaagatatttttgatctgtcgaagctcgacatgggaatgccagataagatgattgtcgtttcacggttgaagtggatgtataactgcttgcttccattctcatcgagccgtttgccacgcctctagagcagtgagcaactggacgtcgtgtgttgcattttggataaagattttgacacggatacctggaactctatgtcggaaggatggttctttcatgcccacaagatgttctgtagattttagcagagctggatgaagcatatcggaagggggcagattgggtggatgcagtatccatcgagccctccgttgacaattcttgcattgctaggcatgttgatttggattggctgttgcaccgaatggtttgcgtcgatgggctacatctacatgtgtgcgagcattgtaccctttggccttgttccacttgcaattccaattccaatggttgttccatatcccatactagttcataagtcataacatgacaacagaatgctcttcttttatctattccgcagagatgggtacaatcttatttaactgtttcatttgaaagaacgtgttattattcatgtggccacacgacaccctgggttcctttcacttgccgatgatggcgagcagcgcttccttgtagtggccatgggtgttcttggccacggcgtcggcgagctttgtcccgtactgcctggtgtagg

SEQ ID NO: 24842 - DNA, 3327 bp, Zea Mays
tacaagagaattcctcctcccatgtgcgtggatctcggggcccgtgcgggctagggtttatggctttggtcaatccatggcgtgcggtggcgaggtcgcgctgtcgcttcttctttaatgcgcgctgatccccatggacgccgagtccccacgggacgcttatggtttcgcggtgcggccacagcatctgcagcgtttccgcgagtacgccaagatttacaaggaagaggaggaggagagggcgcacagatggagagacttcttggacaggttggctgatgcagcgaatgtgcccactacacccagcgtttcaccatatgcatctaccggggatcctgcgtcaggtgcaggacaggcacaagagaatagcggcatcggaatacattgtgatgatgaagaggagggatctgagaatgcagaacataacaacaacttggaaagcccaaaggaatccgatgccagtgctgaatcacgagaagcaaatggtaaatcagaagatctgaaagatgtaactaacttggacaaactgcaagagaagactggtagcagcagctctacagaagcaatcaaagccttagagggcttgatggaaacaaatggggactttgaagaactaaaagatttgaatggaagctcagaagaattggaagaagagaataatggcaacatggaaaagctggtagagctcttcttggataaggggttgttggatgaactgaagcccataaaagttgagtcccagcggcgggtacgtgcagcacttagcatcattgacaaaatgatgagctctcgggtagtgaagggtggtaatggtgcaaatggtattcatggaaacgatggagcacagcttacttctattgaagaggaaggaaggactgcagaagcgagtgatgacggagatccagctgaggttgagtcttgtgttgcagagaaggtggaacttggacaggagacaactcatgattctacaggtactgctttggatggaggcaatgatgggtcctattttccttggagggaggagcttgagagcttggttcgtggaggtgtaccaatggctcttagaggagagatatggcaagcatttgtgggtgttggtgctcgaaggattcctgggtactacaacaaattgcttgatgacaggactgagacattggatgaaaaggatcttgtggacccagtggtcaacgaacagggaagtgcacccagaaaagttacccagcctgagaaatggaaaggacagatagagaaggatttgccacgaacatttccaggacaccctgcattagatgaggatgggaggaatgctttgaggcggttgttaaccgcatatgcaaggcataatccatcagttgggtactgccaggccatgaacttttttgctgggctatttttgttattcatgcctgaagaaaatgcattttgggccttagtaggggttattgatgattattttgatggatactacactgaagaaatgattgaatctcaggttgaccaactcgtccttgaggaggttgtacgagaaaggttccctaaattggccaaacatatggaattcttgggagttcaagtgggatggataactggaccatggtttctttcaattttcatcaatatgcttccatgggaaagtgtacttcgcatttgggatgtcatcctttttgaaggaaatcgcataatgttgttcaggacgacacttgctttgctggatttatatgggcctgcactagtgaccacaaaagatgccggagatgcaattacactactgcagtctcttgctggatctacatttgacagcagccagcttgtattgacagcttgtatgggttttcaatcagttagagaaatgggattgcaagagttaaggaaaaagtacaggcctgaaattttaactgcaatggaggaaagatcgaaagaccgtggctcctggaaagataagaaggggttagcaaccaaactttatagctttaaacatgatccttcatatgtgtgctcaccagttaagtccaaggaagggctagatggttcaaaggtgaatggagagactgggccagcaaatcttgagacctaccttagtactagttctatactggataatgatttggatcagggtgttgatcttcaagatcaggtgtcatggctaaaggttgaactatgcaagctgctcgaggagaaaagatcagctgatctcaggagtgaggaattggaaactgctttgatggagatggtcgagcatgacaacagacgtatgttgagtgcaaaggttgagaagcttgaaacagaggcatatgaactgcgcaaagctttttcagacaagcaagagcaagagcaagtaatgcttcagatcttgttaagaatggagcaagaacagaaagtggcagaagatgcccgcatagccgctgagcgagatgctgctgaacaaaaacacgctgctcacttgctccaggagaagtatgaagcagcaatgacagcactttcacaaatggagaagagagctgtaatggcagaaacaatgctggaagctacaaagcaataccaggttgggcaggttaaagccaaccaatctttcacttcaagttcacctcgtgcagaccatgttcctgcgaagataaatcaagaaccaaaccaaactgcacctatcaggagaatcggcctgctttctaggggacttggatggcttgacaagggcaagcagggaaggcagaattccaatgaaacatctggagcctaaactcatctaaagtccaggatgaagtcatagctcccaacaagatctggattgttcattaacgcttggattgcttgatcaccgtaagagtgttgaaatcagcatcgatacatgttttctcgggaagattcagctggtatattccatgaagttttgcaggaagtgtatcttgtatcatattgagttcaattgtcagataaagttttgttggtaggtcagaaaggcttctgcaagtcatcggtgtaaattttcttttattagttccattaagattgtcaatagttagtgttccaaataggagaaagaaaagaacgacttactacacacaagaaaaatttctgttagattagttacagtatcatggagttgttctggagaagagcatgttttttttatctcttcagaaatgtcaaaaccaccgaagagattctctctctgtatttttgtctgatacgtgtggctcatacattcttcagtcacagttgacatgtttgatgtaaggcaattattgtcacgaggattctgattacgaatacaacagcagaaactccactatagggaggcgttttggaaagttaattgttgtcagttcctca

SEQ ID NO: 24843 - DNA, 401 bp, Zea Mays
cctcgaaccggggcaccaaaacgactctgcagagcatcacatcgacgaccagcgtgggggtgggcgcagccgtgcatggaatcagtgtgcagcgtcgttgtccacctaaatatagtatgggaagaatcggtcgcgccaaccacgcatcctggtgacctcctctgacgggggaattggccggagtgccggcaattgctcaccagatttcaagaaattgcctcggaccgcccttcatcgtcggcgtagcggcctgctacttattccacggtgagttacccttagatcgattcgccttgctctcctcttcgcgtgggtccggatagttctgtaggagtgaagaccgtaccgccaggccacctatctcgacgaaagcgccgccgtgacatcaccctccgctgtcg

SEQ ID NO: 24844 - DNA, 1939 bp, Zea Mays
gcccgcagaaaagaaggctggtggtcgccgctgcacgcggcccagtccacccacgagtacaaacagcggcagctcgcctccacgcgagccaagcgcccgcaaaaccctagccccgcccgccccaaaccctaggcggctacggtctccgatcccggggtcacgtcctaatggcatcttcgccggacttgttccccaacgttaccttctccgacgtctccgaagccgcagcagggcctgcggccgagggggccaccgccgcgttcggtctcggcgccgccactggagccccgcgcctcagcctcgtgaaggccgaggcggagcccacggtcgagatcgaccttgccgacgcgcaggtatttaagttgggaccgacggagtggctgtgtgtgtgcgacgagtcggaggctaaggatggcgtggaagagtcattttcaagagcaattaaggttgttcttaggacagaagctgagagcaaagccttctctttagcttttcaacgatggcaacaccaagttattagtggaaaagctggtgagcggctggagaatggatcaataattgcttcgaaaaacaaattcgatacaaaaattgaggcatcatcagcaaagatgtatttccactactatggccagctattacatcagcaaaacatgttacaagattttgtgcggacaggaacatactatgctgctgtgatggaaaaccgttctgacttcgagggtcgagttgtggttgatgttggggctggaagcggtattctttcgttatttgctgtccaggctggtgccagacatgtatatgcagttgaggcatctgaaatggctgaacatgctcaacgtctaatctctgggaacccatctcttggacaccggatcacggtcatcaagggcaaggttgaggaagtagtgcttccagagaaagctgacatactgatttctgaacctatgggaacccttttggttaatgagaggatgctagagtcttatgtcatagctagagacagattacttgctccagatggtaaaatgtttccaacaaccggaaggattcatatggctccattttctgacgaatacctttatgttgaaatggcaaacaaggctctcttttggcagcagcacaatttttttggtgttgatctcacacctttacatggttcagcattccagggatacttttcacagcactgtgcaaaggtggcttaccactgctccaggatcccctacaactcactggtaccaactacgatgtgtgctttcacagccattgtatgtcatggccggccaagaaataactggccatcttcgtctcgtagcccatagtgctcaaagctacacaatatacttgacaatgtcagctaaaatgtggggtgtgggtgcggagcaaggcggtatcctacagacatctactgggaaacttgaactgaaggagccatactacaggttgtctcagccacaatcctgcacgttgccacaagatcagcaacagcagcaattgccatctttgcaggcacagggatcggagcagcagatgcaggaagggctcagcccagccttcacgatagaccaagattgcctcaactagacagcctggagtcgcgtatgctaggattccagcaacgagctgaggtctgtacaagcacaagagtttagagtagccgatattgtcaggcgttagctgccaaaggctaatatcacgatcgaggtgtaccgtgtacgagaccattcctgagttgcgcagctggcagctaaactgcggtcgcgccttctccgagggaatcgagaaaaaggaaattataaagtgtatttggtttcaggtaaagtgaagagcgaagggcacccttaacaaggacgggtgtatgttgtttgatatattatattcttgctaggaattaattattttcatgttaagtatgtttaattcaatttgcttcatacaa

SEQ ID NO: 24845 - DNA, 2834 bp, Zea Mays
tggccccggcccattttaaggcgtttcctctccggcgcagagcgggtagcgggacgaactcgtcactggtgtgggccgtggctgtacgccgcagagtgaagcgagacgagacgacgatgcgcaagtgggcgctctcctccgcgctcctccttctcttcctcctcaccaccctccccgacccagctaagaagctacaggtgaatgcggaagagagcagcgatgacttagctaacccacccaaggtagaggagaagcttggtgctgtccctcatggcctgtccaccgactctgaggttgcccagagggaagctgagtctatctctaggaagactcttaggagctccgccgagaagtttgagttccaggctgaggtgtccagactcatggacatcatcatcaactcactctacagcaacaaggatatcttcctgagggagctcatatccaatgcctctgatgcattggataagatcaggttcctttcccttactgataaggaagttctgggtgaaggtgacactgcaaagcttgagattcagattaagttggacaaagagaagaaaatcctctccattcgggataggggtattggtatgaccaaggaggatcttattaataaccttggaaccattgctaagtctggcacttcagcttttgtcgaaaagatgcagtctggaggtgacctcaatcttattggacagtttggtgttggcttctactcggtgtacttggttgctgactatgtcgaagtggtcagcaagcacaatgatgataaacaatatgtttgggaatcaaaagctgatggatcgtttgctatctccgaggatacatggaatgaaccccttggccgtggaaccgagataagattacatctgcgagatgaggccaaggagtacttggaagaggataagcttaaggatttggttaagaagtactctgagttcatcaacttccctatctatttgtggtcaaccaaggaggttgatgttgaagtgccagctgatgaggatgagacaagtgaagaagaggattcgtccccagaaactacagaagaagagacagaagaagatgaagagaaagagaaaaagcctaagacgaagacgataaaggagactacttctgaatgggaacttctgaatgatatgaaggctgtatggcttcgcagcccgaaggaggttactgatgaggaatactcgaagttttaccactcactagccaaggacttcggtgatgacaagcctatgggttggagccacttcactgctgaaggagatgttgagttcaaagctttgctcttcattccaccgaaggctccgcatgatctctatgagagttactacaacagcaacaagtcaaacctcaagttgtatgttagaagagtgttcatctctgatgaatttgatgaccttcttccgaagtatctcagctttttgaggggtattgttgactcagacacactgccgctgaatgtgtcacgagaaatgctccaacaacatagcagtctgaagactatcaagaagaagctgatccgcaaagctcttgacatgattaggaaacttgctgaagaagaccctgatgagtacagcaacaaggataagacagatgaagagaaaaatgagatggaggagaagaagggccagtacgccaagttctggaatgagtttggcaaatcaatcaagctgggtatcattgaagacgcaactaacaggaaccgccttgcgaagcttcttagatttgaaagtaccaagtcggatggcaaacttgcctcccttgacgagtacatttcaaggatgaagccagggcagaaagacatcttctacctcacgggaagcagcaaagatcagctggagaagtctccgttcctggagaggctaaccaagaagaactacgaggtcatcttcttcaccgaccctatggacgagtacctgatgcagtacctgatggactacgaggacaggaagttccagaacgtgtccaaggagggcctgaagctgggcaaggactcgaggctcaaggacctcaaggagtcgttcaaggagctgacggagtggtggaagaaggccctggagagcgagagcgtggactcggtgaaggtcagcagccggctgcacgacaccccctgcgtcgtcgtcacctccaagtacgggtggagcgccaacatggagaagatcatgcaggcgcagacgctgtcggactcgagcaagcaggcgtacatgcgcggcaagagggtgctggagatcaaccccaggcaccccatcatcaaggagctccgcgacaaggtcgcccaggacaacgagagcgaggagctgaagcagacggcgaggctggtgtaccagacggcccttatggagagcgggttcaacctccccgaccccaaggagttcgcgtccagcatctacaagtcggtgcacaagagcctggacctgagccccgacgcggccgtggaggaggaggacgaggccgaggagcagccggaggtggaagagaaggagccggcggccaaggaggggtcggagccgtccttcgacaaggacgagctgtagtcggcgtgctgtggtctcgtctcgtcttcgggatctgttttgaagtctagctgtagctcccgtttagttgagatatcggggagcccactcactgccagctttgtgtttaggaacgtgatacgggatctttttttttttgttgcctgtctttgtacttgtacaaacctcagttcagtgactcggtctaattaccggctccgattagtgaactgtttctgtctgattagtgagctcaccgacatccatagggtggcgctccctcccttctaatttaacttaaaaaaaaaaaaa

SEQ ID NO: 24846 - DNA, 5330 bp, Zea Mays
ttttccttctcccgcgtgcggcgcgccctagcttcctccttcccttccactcccgtccatagcagcgctgccaccaccgacggaaggcccttagcagcgccgccaccaccacgggagatgcgtggagagatgaagcaaaccaagtcagggcggatttggtggcggcgactgtgaggcgggcgagcgaggtggtcattgggctcgcgccggagaacgctatgatcccgctgttcgagacggggggcgcgcagctcgagctcatacgggatgccgagattgagccgtgtgcctacgtgaggtgggagcaagggaggccgagaggatccgcttcatgagttggatgcacacgagagacgttggggatcccagcttcccaatgcgggagatccagaagagtcaacggcggatcgatcaagtggattagcactctcccctgtctgcgtgatctgtagaacaaggataagtcggggacgctgttctgctttgccgcgatggaacatgtgttccaatccgagaatttcaggctggggcggttgggatgagggggaagccaatgggagatggatcaaggagatgagcatggtaggctgttcaattctcaatggcttcgtcgcgaaaagtgaggaatgcaaataaacgctacaccaaaatcaacgaagattggcaggataaagatgagacaaatgtacataaaagtaaagtgcgaaagaaaaagttatctgacatgcttgggtctcaatggagcaaagatgagctcgagcgcttctatggagcctacagaaaatatggaaaagattggagaaaggttgctggtgcaatacgtgataggacatctgaaatggtggaggctctttacaacattaataaggcatatttatctcttccagagggaacagctactgctgcggggttaatagcaatgatgaccgatcactacaatattctggatggaagtaacagtgatcatgaaagcaatgattcaccaaaagcttcaaggaagccacagaagcgtggtcgtgctaggtttcaatctgtttctaagacatctgatgcacgttatgctgatctagggcaatctcagccttcttcatcaagctatggctgcctttcgttgttgacgaaaaaatgtgctggagatctgcttgtagggaacaggcctcgtgctgttggaaaaaggactccaagagtacctggtgcaagtatatactatcgagatgacaggggtgtaacagataggcgtgcaaaaacagttgctaacaatggtgatgatgaaggagctcatgtagctgcgcttgctctggcagaggtatttcaaagaggaggctcacctcaggtttctgaaacatccaaatggtgatcacatgttcctgtctcctgttaaaagtagtgacagaaaaaatgctgattcagagatgggaagctcaaagttgcatgggtttcatttggatgctgattaccccgaaggtagcttaggaagcagggaggccgagactggtgaatattgcaaaggttcatcatttttgacgaaaaatgaaggttctggtaagcctctgaagaagggaaaaaagtctcagaagaggaggaaaaaagctgcacataaaacaggtgatcagttcgaggatgacagagaggcttgtagtggaactgatgaagggcataggtcgataaagattaaagaagactcagagctggagtcattgggatggccgtctagcacgtcaaataaaagaagtcgtcaattgttttttggtggattgctaacaaaagaacagtagcggaggcccttgagggtatggcgtggattagtgatatcagggggaccatctcttgggcagttattttcgatctcctgatcctgtgcgaagctgtcacagaagttcatctacaggctgggaccaccgacaagcacttttggagattttccacttctggccagtattctgcgaaggcagcttatgagctgttcttccttggctccactgccttcgggcctttgaaaggatttggaaaacttgggctcctgccaaatgcaagttctttttgtggttggtcatgcataacagatgctggacagcagatcgtttggcaaaaagggatctccctcaccctgcggtctgtcctctctgtgatcagcaagcggaaacaatccaacaccttctcatttcttgtgtttttgcaagacaattctggttcacgctgctgcaaaagatgggggctgccgaacctctccccagacttggatgccaccaatctggacagttggtggaatagtgctgctgagaagctgcctggagaccttcaagccggctttaattctatcgtgatccttggcgcttggagtatctggcgtccccgcaatgactgtgtcttcaatggcatgtcacctagtgtgaccacggctatcacccttgctagtgatgagctgaggatgtggagcctcgctggtgctaaaggtctcaacctgctgtcagccctggtttttgtgttcgatccagggtgggggttttttcttgagtttttgggtttttgggtttgtgtgtgagttgtgctgtgttttgtgggttgtgttctggtgaccttgtggtcgctgggctgtttgggtgtgtgtttgtgtgtgtgtgtcgtggtgttttgtactccctttttatctttaatggaaagatacgcagctctcctgcgtgttcgagaaaaaatatgtccttgttttgcatacattggctgatctatctgtgaatatcctaccaccttcatcagtaatggaatctgaatcttcagcccaaattaaggatgaaaacaaagatgttgattctgatgacaggcctggcatgcctgcggcagtatcagtgtatgagcagaaagttaactccaaaagcactgcaaggaaagttaaaaggcagcctgaaatttcaaattcagagatggtcactaggaaaaaagctaaagttactaaagatcctcatcacgatgggagcaccacttctgatgtaaagcagcaagcttgtacatgtggtgtcaaaacagagaaaaagaagaggaaatcatccacgacaaaggtaattcccaaattattatttgttgatcatttctgtaaggaaaagtatgtttctgctgaagaagggaaggtgtcgtctaatatcgggacaaccacacaaggtgatacaacacaagctgacttatcatcaaagggtaaaagctgccgtaaaataggcattcagcaagcactaattgaagaatgcaaatcaaccaaggttgccaatgatactggaagtgataaattttctcactcagtgaataatgttattgatcttaaggacaaactctctcactgcttgtcctcacgtttgcttcggaggtggtgtatgtttgaatggttctatagtgcaattgattatccatggtttgcaaaaagtgaatttgtggagtacttgaatcatgtcaagctgggtcatgttccaaggctgactcgtgttgagtggggtgtcataaggagttctcttgggaagccccgccgattgtctaaacaatttttgcatgaggagagagagaagctttctcaatatcgcgattcagtcaggcaacactatgctgaacttcgatctggtgttagagaaggactacccacggatcttgcacgacctcttgcagttggacagcgtgttatagcctgtcatcctagaacaagggaacttcatgatgggaatattctgacagttgacaataatcgttgtcgggttcagtttgatcggcctgagctgggtgttgagtttgtgatggatattgattgtatgcccctccatcccatggaaaatgagtccctcaggcaaaaaaacatcgtgaataaatacttatccgaggtgaaacttgaggatcagatgaatgacttgggtagtgggggtgcagcaaggttcgcatcaaatgtgaatgtgaattgtggcgatgcagcgttccaaataccttctagccacccggtaaatagtttaacgaagcaagcaaaggccaaagctacagttaatgaggttgcaattgcagcacaacaagcaatgtacaatcagccatgcagtctctcacagatacaggaaagagaagctgatataagagctcttgctgaactatcacgtgcccttgataaaaaggaagctttattggtagagttgaggcacatgaatgaagaagtgtccagaaagcaaaaggatggtgagactgttagagttgaagcatttcaggacgcaatatgctatggtgcttgtgcagctaagagattctaatgatcaagtagcctcagctttgctttctctgcggcaacgtaacacgtatcatggaaatcaattaccgtcatatcctatttccatggaaaatggtggaaccattactggagcaccagatccatataaccgttttggttatattaatccagaatccggttcccaagtaatggaagttattgagacttcaaggtgcaaagcaaaaatgatggttgatgttgctgttcaggattcctcatggatctcatcaactcatgtttatattctgtattttgcgaagaaagttcttccaattgaacaaacagcgatgtgcaaagtgagggaaggagagaacgcctttgctaaaatcggtgaagcactagatgatctcgatagtcgtggcacaggctctggttcaagcatactaggaataagacggatacctcccgattcagggaaggcaaatacatcctttcaagataacggaacgcctgcccctgcagcaatcaactcttcaggtccaagattgcccaacgggtatgattctgaagctcaggttcctactgatttgatttcgtcctgcgtagccacgatacttatgattcagaactgcacggaaaagcagtatcatcctgccgaagttgcacacatccttgattcggccctgtcacgcctacaaccgtgcagctcccagaacatcccgatcttcagggagattgagatgtgcatgggcattataaagaatcaaatgttggcgttgatacccacaccaagcggctagttccttgctttcctgtgagctggccggaagaggggtaaatttcggaaagaaaccggaatactgtatgtggcgtgtattgttttttttttcccattttttactgatttgttgtgttgtacaagctgtatgtttttttactgtcgtacaagctgtatgttattgctttatacatgtataatagtaatcatgaaagttcattgttctggcaagcgcatgtacattcagcttgaaatactgaaccctttttccaaacggaaattttttcctgttcctttacttttttgaaattcttgcgttccaaacggggc

SEQ ID NO: 24847 - DNA, 1297 bp, Zea Mays
gtgaattacgttttcactcgcgatatcgtacttttggttcgtcgtgtactcgtgtggaaggcggctgcctgctcccgcggtctcttccgtctcggaggtgggagagagcgatcagcggcgtcgccgggtggatccaaagcgcgcgagaaaatgcagggcggatccagcggcatcgtgtatggtggcctcaagtaccaggcgcggtgtatcgccgacatacgcgcggacgccggctcgaccaccttcctcgccggcaccctcagcctcaaggaggagaacgaggtgcacctgatccggttttcgccggcggagagcgagctggtgtgcgatggcctcttctaccaccccaacgagatttgggacctcaaatcatgccccttcgatcacagggttttctccacagtctacacgtctggtgagggctatggtgcatcagtttggaagatcccggagctcaatgggcaatcaaactcaccacaacttgagcagctctttgagcttagtgggcatacgggcaagattagacgtgtgatctggtggccacttggaaagcatgataaactaattagcattgatgaccgaaatatttttctttggaacatagacacgtcaaaaaaaatagctaaggtgatctcacagggatcaactgacatgcttccaaatttacgtggtggagcttgggatccacacaatcataatttagttgctgcaatatctgattcatcacttcagctgtgggatctacgttctatggaaaaatcaactgcaattgaacatgcacatatacgggatgtggattataaccccaagaagcaaaacattgttgcaacagcagaagaggaatttggaattcgcttgtgggatctcagaatgcttaagtatcctctaaaagatctccctgggcactcacattggacatgggctgttcggcacaatcctgcgtatgatgagctccttctgagtgctggaacagattcaactgtaaatttatggttggctaaagttagcagtgacgatcctgaatctgatagcccttctgctttatccaataggcaagaagtaccattactcaactcatatactgactatgaagacagcatctatggtattgcatggagctcccatgatccatcattattcgcttctttgtcatatgatggaagggttgtcttggaatcagtcaagccctacttgcagagaaaatgaaccttgtctagttttctaaattgtaaggcagaattgagcaaacttggtaaaccattcagattaacgagaataagttattttatgaactatc

SEQ ID NO: 24848 - DNA, 271 bp, Zea Mays
cacttgcccaatgccccaccccattcccgtcttacctagcgctagggttagtacgcgtccacggcgacgacctctgcgcggagtgtgctccgattggctggcctcctcgatcctccttcccgcgaacgcacgcgcgcgcgagggagaggttgagacttgagagatagacgaaagacgaaacaagggaaggagacgccgtgctcgcctattggccgccgcctccgctccttcgcgcccaatgcgacggccgcggctgccagcaaggcggcga

SEQ ID NO: 24849 - DNA, 3580 bp, Zea Mays
gtcgcattcggctcgcacagtttaaaatttatttaattctaaaagtgtcgagcctagtgccaatttaaaattaatctagacgaaataaaattgtcacttaagtatttcgctcggttcgagcaatctctataaatttggtaaagccactaccagggatagactgttttaaataaactgaacccgaactaattgaaaccggaaaaattgttagccgatttggtgtcctatttcaaagtcccagtaaataatatgtttaaatcaagtgtcgttttaattagattgtgtacatcttgtctagacccaaattcaaatattctgaaatttccattttacttaaagaaaatatcttccttggatatttgttttgccaccgtcttgttgcatgcatccctatccgttcatctccctctcacgctgctcctctctgagctgtgcacgtcgacctccctttctagcatttgtactcgcctcagctttttctccaagcccagcttcctcttcctagctgcgtcgagtcactggaaaaaaatcttgccgccgcccagtctgtcgatctcatctccctgtgatttttttccttcagccgcctttatccttaccagttaccaccgcccatggcgttgatatttgctggtcaccatccctatccttccaccgcatggcgtctatctatatatgtacggtgcctgctcctttattccatggtgtacgcttcgctcatagagaattgctggctcatctctccgttgcgctctgtgctcaggcgcacgtttcttagcccacggccttggagcccgccggtggccatgctcagctccagctctgtgccgtgttcatggctgcgcgcgtgctcgccggtcatcccagcccagtcgtgcttctctccctctctgctcgctgcgcgcgctgctctttggggctcgccggacgtcgcttcctagatgggttccctgcactgcgctcagctccctcgctcctgctgctagccgtggctggctccctgctacgctcgcccagatcgtcgccgtcgagttccctcgccgaggtttctccctgcgcgcgcgagctctgttgcgagcgccgatccgtacccacaaagcctcgctggtgctcaactggctcaatgctggtccgaccatcgccctgctgtgtcgtgctctatttccgcgacaccactcttcgtcatggtcgttaaatcaccgttaatcgtgccgtcgtagccagtttgcctccgtctcgtggtggtgttgcactgccgtcgagtcccgatatcgatctggttgtcgtcgaagtgaagctcagtttaaagctcgccaagggtttgatcaaagattttattcggagactatcgacgttctcgcaagctttaagtcggatttaatggacggtacgttaattaatcgcgtgatgcggaagataccccgagtcgaccccaagcgcggactaaaccgcaggatgatgctgatggatgaactggaagatggataatctgagcgagtgccaagccaaaggatgatcgtcaagtggacatcgcctaacaaacactaacctagtgttactcaggcaagccccggtgcatgcaaccccttccttgtgtttttaaatacttttcgcacactttaagtctagtgaaatgtgcattaggtttataggagttgcttgaaaccctttgatgcattgccttccttgatatccatacctttatagatacttctgatgaagtatcaaaatatgatttacaaaatttgcttagccttgcttagaggtaaatcttgtggatagaggttgtcctttgcgttaatgcctagctcaggggttatcctgaggaaggatggcttctgcctgcaagaatattttaattgggagcaatggtgggatcttactgcaaagttccctttgatgctcttttcatcctaaggaatacaaacaatcctaagggtggaagtacttaaatcgggacttgggctaggaacaggtgatgctccgcctgggtcaattaaggattggatgcgtatgtaggcctgatagatcaaggactatcttaactggccacatgccctggaaatgggacagggtaagcttgaacccggctattccataccagggtatgccgtgaacatctctttgtgtctctcgttcaatgtggcctgctcctccactctcgcgcacatgttgttatagatgtccatataggccgggccacccgtttggcacaaagcccgacactattttagcctgatacaaaaccggcacggcaccccggacatcgggctagtgtttgggctccatggtcggcacacagtggtcggcccgatcgacacggaataacgggtggcacgacgtgctggcccggctcggcacgcaacactgaccgtgtcgtgcccaatccagtccatttgtgccgtgcccacaacgggccagggccgagccgagcggcacgtttggatatctatacatgttgtcaccctgctcctccgaatcaatgttgtcgtctcctttctcgccacgcagtcataaggttttgcattcggacttttaacagccaagcagtcataactggctcctgggctgccatgctaaacgagcagacacaacccatcgaacgttttatgtgttgtgctataggccgagcgttaagctcgaaggctggcacgacacgacccgatatgttaaacgtgtcgggtcgagcctggatgtgaggcatgagcatggtccttttgggccacgggccaacccgacacgacccgatatgttaaacatgtcaggtcgagcctggatgtgaggcatgagcatggtccttttgagccacgggccaacccgacacgacccaatgtacacctatatttgtagatataattttgacctctaaaagtcctttagctactctttctgtcagaaactaaaaattaatctaaatgtgtttcgtatggccaagtggaccattattttttggaattttgtagtaagttatcttggtttgttggctaggatgttaatgatggagggtgtaatgttgtaagctagaagtagggactagggagataccaaactacgatgcttttttcgtcacttaatacacaagtgttgggtttagagttaatgtacggaaaatggaccaaaccaggggcaaagctatagtcagtttaggtggtgcagatgcaccccctaaaataatacaaaactggttatagtagataaattttaaacttatatttacccctgtcagataatacctatacatcataaggcaattgcactctcttgaagttcactctagctttgccactggaccaaagtaccaaacaaagattgtatttggtatggggagtatatatatggggtttgtggagtggagcactggcgttaacgttgccatatccatatcagttgtgtattgttgtgtagctgtaatatttcgagaaaatcttgtactttctactctctgttgcaatgcgtgagagtgagaggtaattgcctcttttacacccgatgtttctgtgttacttgtgtattcccatcgactgttacaggtttactcttgatctgagcatctcttatagaaacaggcaagtggggtgat

SEQ ID NO: 24850 - DNA, 777 bp, Zea Mays
ggacgtcctcgcataacctccctacacatatcttcttcacctgacctctcttccttaccctccctcatagcagtcggctgccgtggtccggtgacctccccacgatgcctcccgggaagagatccacacagccctcacggaattccgaagaagaccctcttactgaatacgagaaaatgagggctgtgaatatgatgaagaacaatcaattgtttcaacggctaggccttggacaattaaaaacaatgatcaccgcaacaactacaaacaacaatcaaggcggtcctcaggaatcaggttctttatatgatggtgagaacgttgaggattctggtgaagaggatgttggcatgaaatcataccaaggagaaaaagtatgggcaggcaacttgaatcgttaagcagaggactgggaatcaatattccaatccaaatcactgaagggaacaaaaggccagagccacctattcaagctgctaagtttgcatcagagggtggaatcacattgaggcagcacattccaatatttaaccattggaaggaatacaagaagagagagaatgaacctataataagaaactacattggcaaagttactgctaatttcacggtggacagtgagagcaagacagtggaagatgcatgtctagacatgctaaagagtggacaacgccaaatgaggtatagactgaaacagaagtacttcaatgggatacctgctaatcaagtgaggactacatcacctattccaagcatgtctgacaacgactggagaaa

SEQ ID NO: 24851 - DNA, 2160 bp, Zea Mays
gggttattatatatagagagagatgggcaagcgccacaaaccgatcgagcctcgacgagcgagtcgaggactcatcctagctagctaagctgtccgacagcgcagcagaccgatacgagtacgacgatgatgagtagcaccggcggcgagagcaagctggagagcccgctgctgggcctgcccgcgccgggctcgtcggccggcagcgggcacagccacggcgaggcggtgagcgggcagctggagagcatcctcagcgacgcctccctgccgtggaggcggcggatgctgtcggcgtccatggtggagatgcggctgctcgtgcgcctggccgcgcccgccgtgctcgtctacatgatcaactacctcatgtccatgtccacgcagatcttctcgggacacctcggcacgctcgagctggccgccgcgtcgctcggcaacaccggcatccaggtcttcgcctatggcctcatgctgggcatggggagcgcggtggagacgctgtgcgggcaggcctacggcgcccacaagtacgagatgctgggcatctacctgcagcgctcggccgtgcttctgtgcgtcacgggcgttccgctggccgtcatctacgccttctcggagccaatcctggtgttcctgggtcagtcgccggagatcgcccgcgccgcgtccgtcttcgtgtacggcctcatcccgcagatcttcgcgtacgccatcaacttccccatccagaagttcatgcaggcgcagagcatcgtgctcccgagcgcctacatctccaccgtcacgctggtgctgcacgtggtactcagctgggtcgtcgtctacaaggtcggcctgggcctgctgggggcctccctgctgctcagcctcagctggtgggttatcgtcgccgcccagttcgcgtacatcgtgatgagccccaggtgccgccacacctggaccgggttcacctggcaggcattctcgggcctgtggggcttcttcaagctctccgccgcgtccgcggtcatgctttgccttgagacctggtactaccaggtcctggtgctcattgccgggttgctccccaaccctgagcttgcattggatgccttgtccgtatgcatgactgtcaatgcgtgggtgttcatgatcgcagtgggattcaatgctgccgctagtgtgagagtgagcaatgagcttggtgccggccacccaaaatctgcctacttctcagtgtgggtagtgaccggggtctctacgctgatatctctggtgcttgccattgtgatcctctgcctgcgcaactacatcagctacatcttcacggagggtgaggtggtgtcaaacgcggtggcagatctctgcccactgcttgccatcacgctcgtcctcaacggcatccaacctgttctctcaggtgtcgccgttgggtgtgggtggcaagaattcgtagcctacgtgaacgttggctgctactacatagttggtgttcccctcggcgccatcctcggttttgtcttcaagctcggtgtaaagggcatttggagtggtatgattggaggaactttcatgcagacggctattctagtgtgggccaccttgagaactgattggaacaaagaggtagaggaagcacagaaaaggttaaataaatgggcggattcgaagacgacagagccccttcttgttggtttcggcgatggcaactaatttactgcaagggtggatggatggatccacatcatcctctggcttcaccatcgtcaccatcaggaatctacgaaggatcagaagagacgacggagccccttcttgccggcgttggcgatggcaattaatttactggatggatgaatggatccacattattctctggatggcttcaccattgtcaccatcaggattgctaataaatcatgcggagggttattttagccagtaccaaacgtatttcgaggactctatatttcaatttaataaatatgtaccatttataatgaataagatgagattcttcgtcattatctcttgtatttatgtgtttgtgctgttgcggtgaaggaacagaaaacgagccttccacatcttcctcacacctgacaggaggtttagttatctagatctagatttccgatgatactgttactcaatacgtcatcagctctgctctacctt

SEQ ID NO: 24852 - DNA, 1624 bp, Zea Mays
gacgacggttagctgggacctgtgtttcagccggtacagagggtcgcactccagcacgccagggtgacaacagaacggagcagatgcaggagctgtacaacagcctgaccgcttccaacgagctggtcagggtcctggccaacgtcctgggccccgcgggcgcgctcaacccgacggcggcgtccgtgctcgcggcgctgcgctccgagctggacgccgcgcgccagctcgtgaagcagcagcgcaggcgcggcgtggacggcgaggagcgcctgctgcggaggcagctcgcggaggaggtgcgcgcgtggaagtgcaggcacagggagaaggcggcggcggccgcgcgcctcgtcgcctcggagctcgacggcgagcggcgggcgcggaggcgggcggagagggtggggacgaagctggcggaggcgctggcgggcgcggaggcgtcgctgcgggcggccacgcgggagcttgggctggagcgggcggcgagggcgcgcctggagaaggtgtgcgacgagctcgcctccagagacgttggcggcggcacggaggcggaggcggaggacgacgacggcctcaggcgggaggccgccgccaccgcgctggaggagttggaacgggagagggagatgctgcaggtcgccgacgagctgcgcgaggagcgggtccggatgaagctggcggaggcgaggctacacttcgaggagaagaacgccgccgtcgaccgcctgcgccaggagctcgaggccttcttgggcaacgaacgtcgagaacaaacgcctgcccaccatgaaatggccaaggaggaggaggaggaggatcaccagctgcagatcgtccttgcctccgaattcggtgtccacggcatcgatcctctggtcacagagaagagcggacaggaagaaaatgccgaagctggtgacgacgacgacgactcggaaggcagcgacatcgagctgaacatggacggcaacagctggagctacaccaccacctccaggtccagggacacgacggccaagaacgcaacgtcggcgcacggctcactttcggacagagcaacggaatgtggcgccgacgccggcgccttcgatcgtagatctgaagcgacgagagatgcgccggagcaggactgggcggctgacggatgcagcgacggcgggaccaccggcagggacgaggacgaggacgccgagaggtacgaggcgatcaagaacctcagggagcagatgctgaccggccacgccttcctcttcctgtccaagggcgaggcagacgatgacagcgatcggcgtcgccgtggtttcgcttctcattttgaagaagatggggacctctggtgagccaaattgcttggtgttcaaccgttgacagtaaaagcaccaatcctttgttcgaaatttgtgcatagttttggttttggtgctccatttgcacagcacagttatagagttctttatctctgggatttggattcatactcagttttggtgttttggcactggcattttgcgtttgatgtcacaataaaaaaaattaccaatgcattatttctgtatacagaactataaacttacaattgtaaagttacacgcttattgtaaacttcattgtatctatg

SEQ ID NO: 24853 - DNA, 1032 bp, Zea Mays
  misc_feature (1031)..(1032): n is a, c, g, or t
aagcatatgatgacagagatgctaaagtccaagcagcacgcaggaaagctcatttgtagcagcatgggtgcaagaatggattctgaaccaaagagttggaggatacttgctgatgttctctacgatcttggtactgcattggaagttgtttcgccgctgtgtccacaacttttccttgaagtagcaggcttgggaaattttgcgaagggaatggccgttgttgcagcaagagcaacgaggcttccaatttactcttctttcgccaaagaaggcaatcttagtgatttatttgctaaaggggaagccatatcaacacttttcaatgtcatgggaattggagctggaattggattggcatctactgtttgttcaacaactcaaggcaagttaattgcaggcccgttactttccgcagtgcatatatatggggtcatccaagagatgagagcaactcctgtaaacacactcaacccacaaagaacagcaatgatcgtggctgattttatcaagagtggaaaggtttctagccccgccgagctaaggtacaaggaagacctcctgtttcccaaccgagttatagaagaagccggcagtgtgaaaatcggtcagccacttcgcaaagtgttcagtccccggcttgttgagcagctgagggcgactttcccaggcgagaaatttctgctcagccagaaaagcaacaggacgtacatggttctggagcgaagcgcgagcggagaggacgcgctgagggggtggctggtcgccgcgttcgcttcggagatggagaggtcaggcgccggctcacgcgatgacgcggttctgagcgaggcctacgagaagatggagcgggtcttccccaccttcgtgtcagaagttaggagtagggggtggtacaccgatcagtttttggacgggaactgtagtcgagtctcgtttgccaagtttcggtagtcgcagagactgtatatggtctatgttttttggaggggagatgcggaaccatgaactcatgcatgcagggcagtgtagtnn

SEQ ID NO: 24854 - DNA, 4282 bp, Zea Mays
gctgccaccacccacctcctctctcttcacctcccattctctctctccgccccctgcttgcctgctctacccacctcataaacttccccactccttcctccatttccatccattcttctccccaggctgccgccgctggcagccgcatatgctgctgctggtgctctgctactccttcgtcaatctctgctgccgtttggcattagacggattccagtcaactccatccattttgatggttaaactatcaaagatactgccggtgctgtgaatggctgctcaagttcctcagattctttaaattctgagttcatcctcaattcggggctcttggtttaagccgttggacgattcattgtaccgcggaggattttttatggctcatgttgcctcgtgacattgtggtctgaccaaaagctgcttttacatctccttcatgggctgttcagcttccaagtgttgttcacaattgaagtgctctttgtgctcaaatgggtgcctggggcaggcacctgactccccgagggaatccaggggaaagtcaagtcgggggagagggagggtagattctagtggttcagatgattcttctggtgatgatctcggggaagatgacgatgcttttaaccatatgaatgctacaagggaatcaactgctggcatcagccgactgtcaagggtgtcgtcacagtttcttcctcccgatgcttcacgcaaggttcaggtccctttgggtaactatgacctgagatactccttcctgtctcaaagaggttactacccagaatcactggacaaggcaaatcaagatagctactgcgtacataccccatttggacctagtcctgatgaccacttattcggtgtgtttgatggccatggggaatatggagctcaatgctcgcaatttgtgaagcgaagattatgcgagaacctgctcagagataacaggtttcgtaccgatgctgtgctggctcttcattctgcttttgtggcaacgaacacacagctgcatgccgacaacttggatgactccatgagtggtactactgcagtcactatcttggtcaggggtaaaactatttacgttgcaaataccggtgattcgcgtgctgttatcgccgaaaaacaaggggatgacattgtcgctgttgacctttccatagatcaaaccccttaccggtttgatgagcttgaaagggtcaaggaatgtggtgctagggttctaacgttggaccaaatagagggcctaaagaacccagatgtgcagtgttggggtactgaagaaagtgacgatggcgatcctccaaggttatgggtgcaaaatggcatgtacccaggaactgcttttacccgtagcattggagattctgttgctgagtcaattggtgtcattgcagatcccgagatttttgtcctggatctcaattccaacaatccatttttcgttcttgctagcgatggcgtttttgagttcctttccagtcaaacagttgtcgacatggtttctaaatacaaggatcctcgagatgcatgtgcagaaattgtcgctgagtcctatcgtctttggctacagtatgaaactcgtacagatgacattacaatcatactcgtgcatattaatgggttaactgataaggaatctacccagactgttacgaaggtgactttacaaccttcacaacaagtagtaggactggcaggccctgaatcgccactaatagtaagttccaacaccaataatcagcgctccaagcatgatttatcacgggcacgattgagggctcttgaaagttctctagagaatggtcaattatgggtccctccatctccatcgcatcggaagacatgggaagagcaagcgcatattgagcgggtactacatgatcatttcctatttaggaagcttactgactcacaatgtcatgttctacttgattgtatgcaacgagttgaggtgaaacctagggatatagtagtacaacagggcggtgaaggtgactgcttctatgtagttggtagtggtgagtatgaagttctggctattcaggaagaaaatggaaaggaaataaccaaggttctgcatcggtatacagctgacaagttatcttcttttggggagctagcactaatgcacaataagccgcttcaggcttcagttcgtgctgtgaccagtggaacattatgggctctaaagagggaggacttccggggtattttgatgtcagaattttcaaacataccatcattgaagttgctccgatctgtacaactgtttacaagatttacagtgcttcaactaagtcaacttgccgagtcacttgttgaagtatcttttgcagatgggcaaataatagtagataagaatgataaattctcttctctgtatatcattcaaagaggtcgtgtgagacttatattggctactgatcaaatgacttcagatacttgggatctcattagtgctgaaacaaagcaggcacaaagtagtcgggaaaatggtaattatgtgcttgatatagatgagggagggcacttcggagagtggtctctcattggtgagactattgctttcactgctattgctgttggtgatgttacttgttctactatcatgaaggagaaatttgactcaattgttgggccttttcctaaactttcgcaagctgattccaagattaaagaatctctggtaactctggagaatgttgcagatggtgatttcccttttaggagggtgaagctctcagatttggtacggggaatggaaaatgtgcatatatgctgctgattgcagtgagattggtcttgtccaagtcaggggctatgacaagatgagaactttaaaaaggttttacatcaagagagtacaagatctccataaggaagtacaagtatttgaggaaaaggaccttatgaaaagcttgagcaaatcaacttgcgtgccagaagttctgtctacttgtgctgatcagtcataccttggaatattactgaattgttgcctttgttgctcactggcttcaatacttcatacaccactaaatgagacatctgcaagattctttgcagcctcagttgttgttgctctagaagaacttcatcagaagtccattatctatagaggtgtttcggcagacattcttatgctcgacagatcaggacatctgcagctggtggattttaggtttgcaaagaagttggaaggtcaaaggacatacacaatatgtgggatcgctgactctctggcaccagagattgttcttggtaggggtcatggatttcctgctgactggtgggcacttggagttttgatctatttcatgcttcagtcagacatgccattcgggtcctggagggagagcgagctggaacctattacaaaaattgccaaaggccaccttgttatgccagtgtctttcagtgcagaagttgttgaccttataaccaagctactcgtggtcgacgaaaacgcgcgccttggaaccagtggtgctgaagctgtgaagaaacacccctggtttgatggcactgattgggagcgaatagcatctgggacttgtgcagcacctgaagaaatcactgagcgcatcaactactgtatagaaactcttaatgaggacttatccgcatctccttccgtgccgattgaagacccagatgatctcactgctccagagtggatccaggattggtgatctcaatagttgcatgactgtccaatgatgaattgttctagttgaggaaaacgtctctagtttttcaccgagcattctcatatcaaatggaagaaggtatacataagagttgatcgaactgacaagttgtacataccaaagattattccttctgtgatcatagatcagaatttgagatgccaagcaacagagactttggtctatgtttgctgcatagttcctggtaagaaggatctggatagtttgttggtgatccatgtaattatatatccaatttgtgcactcccttgctgtttcggaaatggatactggtcgggaggaaggtcaataattatcgttgtgaatacggacatttctttcatctgccactgtcaatcgatttgtacaagatcaagttttccaaatataattatgaaggttaccaaaacaagagcttgttatctcatatacacggtgcaaataacctgcgacgcgacatttggcatctggacactacacctacctaaaacaaaacttgatgcataatttaaataaaatacgtaaaatacaaaaaaatacataactcataaaaaagactacataaa

SEQ ID NO: 24855 - DNA, 3757 bp, Zea Mays
ccgcgacccgtccgcgtccgcgttgccattctcgccggcatcgtcgcgcccccaccccatacgagccgcccccgcgacgctgaccccactgccgtccagcaggatctctcccttcccccgccccacgcctagcaggatctctcccttccctcgcgcgtccgagacgacatggacgaaggtgggaggctcccaacgcatccccgccgacctcaacgccgacggtcctttcctaacccgcagcccccggccacagtctctctcttccggtccagtgggggctgctagcttccaggaatattggagatgtgccttcaacactctagggctcgattgcctccagataagcaacttgctgcagaaaaaagttttgccttgtattgcaagccagttgaattgtacaatattatccagaggcgagctattaaaaatccaccttttgttcaaagatcccttctatataagatacaggcaaggagaaaaaagaggctccaaccgcgcctcctcaagttacttcgcagcaatgccttcaaggcgaagcccgcgctcatcaccctcatcggcgcctgcgcggccatgggcgccaatgccgaagtcaccgcctccatcacgtgcctccgcgatgcaatcgctagcgatgactgggcagcgaggaaggccgcggcggaggcgcttgctgcattggccctagagcacacggatcttctcacgacctacaaatcctcttgcgtcaccttcttcgaggccagaaggtttgacaaggtcaaggttgtgcaagagtcgatgaaccagatgattgaggcggggaaggagatcccaggtgctgaagaggacgagtgctcctcgctctgccaccagcgtcccagtcacaacgaagatcttctcttacagggagtgcaagtgatgggcgatatccagctgcttcgctgggctcaaactcagttcctttagcaacaaggaagagcatattatctgtaagcagatcatctctgtctgacgtgtctaccagtgtaattttctggaccttctccaggtaattttcctttagtgtgtttattgttactgtatatttttacagttctcttgcgagacgtagtagtatagggcttgtagtcgttaccttttcttccagaaataagtaatcattaacttctctgctgattactaaacacaagagaaaacattctgtaactgtaagtccacgttggaagtggaagtagttagtttttggatacttggttgcaacttgagctgtggcttcaatgctggagcagattatctggtgaagctgaggttgttttgagaaaacgtttggttgaacagcttctgatatctcttataaatagctgagaggggcaatgtccaagatgcccttgggtattgtaaaatttgattatatggttgcagatgttcttttatatttgagtacttttcaaattttaaaataaaaattatcaacaaccaataactttgccaagaaacgagcagataaggaattggggttatggcggattctttctaatttcttgtgaactttaggggtgaaaatgtactttgtgtggtgggccgtgggcctgtccatgtagcgcgtggaagctcctttttccaactccaccatgcacctgtccctcgtgaaagcgcactttatggtttatggagctccatgaatggagctgctacagcagcaccttcttggtacaaggagctaaaaacagctccaggagctgtaatggaatccccaccaaaggggggcatatgttggtcgtaagaagagggtactattgactcctgtttgagaatactgaaaagggactgctacttaaaatttgatgtttccatccagcattaacttttcagtatcagtgacacgatgggtcagatttgaacatgattattgcaagccaagacattgtcaattacatatagaagcacatgtcatgttgctttccatgttccccgcataatattacattgctaaacttaactatgcactaatgttttagtagtgacttgtaggtatacatattaccaccttgttgagtttgctgcaccagtcatgtgcaattaacgttccgtatcatcacttgtaaaaaaaaggtttatgttgggggcatctcctctgatgtctcttatgatgatctcaaaaactctgccagtcttttggacaagtagtggaagtgattactcctagatttctttgtgctagcttttgtttttgctttcttctaaattcagagttttttcttttcttttctgtaggttgaactcatagctgatcttcatgttatccatgctagcaatgtattgcgtttattcatatttctcttttatagtagggtgggtatatgtgataaagcatgtattcgataaagcagatctttccaagtagggaactaaattgaaaattgtattttatgaactttatgtttagtttcatggatcagtttgaggcatagctaagtataatttatatgattacactcacatccacttggtgtttttaaaatgtttgcaacggtccactattgagttcgaaatactgaacctcaaactccttgtcaaggtacacctcgtgtagcgattttctgactttcctgagtgaggcggcgctattggctttggtaggtctttctcatgatcatgttgtttgggtctgaaaatgctctgagtcgtagtctcgtaatgttatagtaacaataacatcatttttgtgaggatttgtctgaaaggagaacaactcaacatcaatcttggttatcaaccaagagtctaaactcctttgtcatgtgttatcgtttcaatcctgaactatgcattgttgtgggtcttgaagatctggttacaagcctacaacttaactgatatatatcacatgatgatgataatatgtatattcatggtgacacctttgctctttgaacatgttgtagtctattgtgtagttgcaaaagaatatgtgaattaccagtcagtggagattgagagggattccccggctagaagctcaagcggattaggaagtggctcatcttcatccagtggtacagtacagtggagcaaatgagtatctatcaccattaatgctgagttatcgatcaagtagctcgttaattcgttaaaattccttgcagattctgactctgatgttacagtttattttttcagtaaccagaggatgacaagcctactacaagagttggtcctaagttataaaataagcctaactttttttacagagtacacaaatgtcaggttttcctgtttgggctagcaccacaaatggaaacaaaaaattggactcagcccatcgtgaagatatgaaggaagagcactgtcccattattctgtttttcggtaattaaagcatcatctccattcttggttgttcccatttttctattatttactaagtagcttatttggctaatgttaaaaactggaagaagaccatgtttctagcatgaacatgccagcatggtgccatcaacaacttccctgttagctcacggtacaccatgctccagcctgtcccctggttatcactgtggtgctgattgtgttcccaagatgcactgaaatagagcaagatcaaatgaggatgaagttactgtgtagagatttttgttccccctttgtagcagcacccatggatttttatttgcacagaattactctcttttactggttcattcaataattcaatttgttgcttggaaaccactgtataataaatacaaatgctatggtatgattttgtgaa

SEQ ID NO: 24856 - DNA, 1411 bp, Zea Mays
ctgggctagacagaccggctcatgttggcaaaatattctgggccgtatcatgttggcaaaaatatactgactccggtccgcaactccggatgtgtcggcgaccaggcaaagctccgtgtcctctcgtctcgtgtgactgacgaccaggtgggagggccataaggcctttagcgcggcggcggcaatggcgcccacggcctgcctccggacccccttcttccccgcccgtgcccgatccaccaacgccaccccgttctcgccacaccgccgcttttctctcaaatgcagcgcctccaacggtgacaactccaaccccaactccatctccatctctcccacctcgccgcctcggctaacggtgtcggacggcgtcgagtctgtggacgttaacgggttgcgtcgcccgccagcgcccgcctccgtccccgccgcccgcgatccccactggctgcctcgtccgctcacaagtgcggacgtcatggaggtggacgggaaggggctcaaggttgcttaccagggttgtgctggagcgtacagcgaagcagcagcaaagaaggcgtacccgaattgtgagactgtgccctgtgagcacttcgacactgcatttcaggctgttcaaaactgggtagctgatagggccgtactgccacttgagaattcattgggaggtagcatacataggaattatgatcttttgcttcggcatagtttgcacattgtaggagaagttcgccttgcggttcgccattgcttattagccaatcctggcgtgaagattgaaaacctgaaaagtgctatgagtcatccccaggctcttgcgcaatgtgagcacacattaacatcactaggaattgagcatagagaagctgttgacgacactgctggtgcagcaaagattgttgcagaacatatgctccaggacactggtgctattgctagttcgttggcggctaaactgtatggattggatgttcttgctgagaatattcaggatgacaaagataatgtcacccgttttatgatgctagctcgagaacccatcatacctcgcactgataaaccatttaagacaagcatagtcttttcactagaagaaggacctggacagctctttaaggcacttgctgtatttgcactgagggacatcaacctcacaaagattgaaagtcgtccacacaaggaaaggcctcttcgggtatctgatgactgttcctcactcttaaagaactttgattaccttttttatgttgaccttgaagcatcaatggctgatccaaagactcagaatgctcttggaaatctgaaggagtttgcaacatttttaagagttcttggaagctatcctacagatgtgaatgaaccttagattgaaagtactgcagattacatactgactgaaaatggcaaccag

SEQ ID NO: 24857 - DNA, 856 bp, Zea Mays
tatgtacatatatttcgcaaggaaccattcttttatggccatgacaaccatgaccaacttgtgaagattgcaaaggtccttggaacagatgggctgaattcttatttgaacaagtaccacattgagctggaccctcaacttgaagctcttgttggaaggtaactttccatgttttgagatgatccttgtatttaggtggattataacccttctatgtacttcatatgcaggcatagtagaaaaccctggttgaagttcatgaatggtgataaccaacatctagtatcacctgaggccatagattttctcgataagctcctgcgctatgatcaccaagacaggcttactgcacgggaagctatggcacatccctacttccttcaagtcagagctgtggagaacagtaggacgagagcacaataatcatggtctgcactcttgaaatggagttgttgctagttcgtgaaaatcataggcttaaatccatgttcagtattcacatcgctccaggaatctgggccatgactccatggcaatgaatcaaaatagtacgagccgcatcatgtggacaaccttggcagatctttttattcttgtctttattgctgggagcactgtagctttaaacctacaagtagtgcttgaatgagatgagattcatatcatctcctgtggtggaatgtgaaattgtatgtgacctttagactaattaaaaagtacaatacagcgctaagcatactgcttgtattatgttgtgctattatgtatctacgattcttatttattttgggcgatagtcaccgtgatgaattactttttttggatctcacggatgaaattatgagttgtctctgat

SEQ ID NO: 24858 - DNA, 1467 bp, Zea Mays
tcccttccccatgccccactcatgtggaagcctctgacactggagctatcgctcctgatgtcttggactctgatttccttgggcttcaaactttgcgccatttgatgcgtatgacccgaacatgggattcaacaatgtcaatgattcctaaaggtggtgatacaatttggggaaatctggattggtctccagaagatggcattgaatgtaaagctaagaagcacaaagccaatgatactggggtttctaaggatagcaatgggggaaatatcgaggttcaacctgaacctattaactatggaaggctggtatcttttggtaaagatgtagcagaagcaccttcttcagagattgagcagatagaatttcgtgatgctgttaaaggtaataatatcgcccattcaaatacgtcatgccgggagatctggacagagtatcacgaattaggatggggtggaataaaggcagtcgcagactacaaagtttacactgctagttctgttgtagaccttcttcattttgttgctccaaggatgatgcagcgtggaaatgttcacttttcatatggaattgctgataacttggatgatccaaaataccaacattacaaatattggtcaaaccccttggaaacgaagttaccgaatgctcctgacatggaaatattttccatgtacggagtaggcattcctactgaaagggcatatgtctataagttggccccacaggcagaatgttatatacctttccgaattgacacctcggctgaaggcggggaggaaaatagctgcttgaaagggggtgtttacttagccgatggtgatgaaactgttccagttcttagtgcgggctacatgtgtgcaaaaggatggcgtggcaaaactcgtttcaaccctgccggcagcaagacttacgtgagagaatacagccattcaccaccctctactctcctggaaggcaggggcacccagagcggtgcacatgttgatataatggggaactttgctctaattgaggacgtcatcagaatagctgctggggcaaccggtgaggaaattggtggcgatcaggtttattcagatatattcaagtggtcagagaaaatcaaattgaaattgtaacctatgggaagttaaagaagtgccgacccgtttattgcgttccaaagtgtcctgcctgagtgcaactctggattttgcttaaatattgtaatttttcacgcttcattcgtccctttgtcaaatttacatttgacaggacgccaatgcgatacgatgttgtaccgctattttcagcattgtatattaaactgtacaggtgtaagttgcatttgccagctgaaattgtgtagtcgttttctttacggtttaataacaagtgacggagcagtacaccaagcagaaaaagatccacttctaaaccagttttcattgttttagagaaggtttggacaaaatatgccacttt

SEQ ID NO: 24859 - DNA, 2927 bp, Zea Mays
gcctcctactttatggtacttggttgttattgatgacatatgggatatatcaacatggaagctgattagatgtgctttggtggaaagtaaccctggaagtagaataatcataactactcgcatttgtgaagttgccaaaaaggttggtggtgtttacaacaagaaaccactctctcttgatgactccaagacattattctatactagagtatttgctggtgaaagcatgagtcttgataacatatctggtgaagtgtgcaacaaaatcctaagaaaatgtggtggtgtgccattgtccatcattacgatagctagtctgcttgttggtaaacagagggaggactggtctaaggtgtatgattatattggttttgggcatgaagataacgaggttattgggaacatgagaaagatattagctttcagctattacaatctacctccttatctaaagacatgcttattgcacctaagcatatttccagaagatcacaagattgagaaaaattcattgatatggaggtggatagctgaaggttttgttattggcagagaagaactagggttatttgaggttggagagagctatttcaatgagctcataaatagaagcatgatccggtggatagagctctctagtagaagcaagattcgagatggttgtggtattcatgatatggtgcttgatcttatccgcactttgtcaggtgaagtaaacttggtcacggtatcagatgtggagcagcagtgtaccacatcatcatcatattcaccagtcagaagcattagcgctcgaagattagccttccacaaaaaaagaagcattgaacacaaccctggcacagaaataggacaggtgagatcattcaatgctttcaactgctctggtagtaggatgccccgacttttaagcttcagggtcttacgtgtactagctctggagaactgtaatttctcagcaggaaactgttgccttggaaatattggcaaattgcatcagctgaggtacctagggctagtggagacatccattcgtgacgacttgctgcctggagaaacaggacacctcaagtttctgcagacactagatgtaagacgaagtggcataaaaatattgccagcgtctgttggtgagctaatgaaactgatgtgcctgcgtgctaccgagggcacaaggatgatggccgagattgggaagctggcgtcactggaagagcttgaggtacactctgtggacaagtcgccaaacttcgccacggggctggggcagctaaccaaggtgagggtgcttgagatccatttcgacgaaatggacgagagcacagagaaggctctcatggagtccctgcgcaacctgcggaaaatccagagtctgcagatatggtccaagaaggagaggacaattgaccttggcggcttgttggaagactggacgccaaccccttcagatctccgtcaactgatgctgtgtggcatccatttgcccaggcgtccgtcatggattgatccctcatgtgtcccgctcctctcgtacttgtcgctcacggtccaggccgtgcaagtgcaggatctagaaatcctcgggaggctgccgttgctcagctacctctacatctggagtgagggcatcaactgcttatcctatactgctaccagcagagacgagtttcagaatctgagacatctggacacaaacctggagatcatgtgtggacagcagggagcactgcctatggttgagaagttgacatgccgtgccagcatggggaagtatgttgcctttgccaggagcagcatgcctttcgacgatggcagcgtggtgaatcctgctactgttgctgaggcagaattgccagtaattctacctttggacattggctggcccgtgaacatgccttgcctccggggcatcacctatttgctggattaccaggactgcagtgccaaggagtgggctcatgtggagacattgctcttgcacgtgagaaaaatccaccccaactgtccacccttccgaatcaaaaagaactgcagagacaagaagattaccttgatcgacgcattcagctaccttgaagctgtcaaggatgtgttcaagggcaacccctccaaatactcggagttttttgatctcatgattgattacaagagagacagaatcaaaatcaaagatgtgatcatccgtctcaagaccctatttactggacatgatcctaatctcatccttgacttcagcgtcttcctgcccagggagtgggccatcactctcggggacctgtagaagaagccccttcatgatcgattctagctaggccatcacccatttagttaacaagaccaagtcgggatgacggcgatggatctgatcatgttaccggcacaaatggcgaagaagaggacgatacccatgaagcgtaatatgcaatccctgtcaccagtggaggatctttgcttcagttaattcattgtcaaggataatcttgtttacttagtcgttgtgcttagggcctgtttatttagggtgtgtttggtttgacttttggcttttggcttttgccccctaaaagccaaaagccaaccaaagggttggatctaagaagcagctttttctaaaagctgactttctcacagtgcaaatctgaaagcacacctgaacctgcttttagtggcttttcggatggaattgtgaaaacatatatcgaagaactttgaacgacttttagtggtttccaccaaatggtttttagctttttaacggctcacagcctacagcagctttttccacagctcacagcccacagcaacttttttcacagccacagcccaaccaaacagacccttacccccagattatataatctggattaaataatcctaagaggcaaacaaacagtccagcttatttgcccagattatgggcctgtttg

SEQ ID NO: 24860 - DNA, 1608 bp, Zea Mays
gacagactgtagcaataattggtcgctccccgatccatctgggtttcgcctgccagcggcgagatgtccttcttcttccgggccgcatcgcggcagcgcccgttgccgcaggagatcgcgcgctccctcaaggactccctcgttgccctcgacaccaagaccggcgccaaggctctcgaggatgctgagaaaaacatacttacattgaggcatacgcttgctggcgatggagaagtggaaccaaatcaagagcaggttttgcagatagcccttgagatttgcaaggagggtgttctttccctctttgttcagaatcttccttcattgggttgggagaaaggatcttgtccactgctggtgtattttgttgagacagaaggttgatgaaagctattgttgtgtccagtatattgaaaatcattttgatcttttggatttccttgttgtttgctataagaacttggaagtcgcgttgaattgtgggaacatgttgcgagaatgcataaaatatcctacacttgcaaatgctctttcagatatatattggagtcaagcagcttcgagttgtttttccagtatgttgaattgtcaaacttcgatattgcatctgatgctctgaacactttcaaggatttgctaaccaaacatgaagatgccgtctctgaatttctgagctcacattatgaacagttttttggactctacacaaaacttttatcttcaactaattatgtgacacgaagacaatcagtgaagagtttctgttggaggccccaaatgctcaaataatgaagcgttacattttggaagttcattacttaaacattatgatgggcctgctaaaggattcaagcaaaaatatcaggatatgtgccttccacatttttaaggtaacaagtttcagtttcacgctggaaagtttcatatgtttaccttttcagtggcttcacactcgatcatgccttgctgcttgggttggactggctgttgttttcaatccatcatagctttgtgtgagcactacgccgttaccatctttctggttctggaggtttattttcgccgcatggatgcaggtatttgttgccaatccaaacaagcctcgtgagattattcaggttttggttgagaatcacagagaagtgttgaagctactccacaatctccccacaagcaaaggtgaagatgaacagcttgatgaggagagagatttaattatcaaagaaatcgagaagcttgtgcggttgtcagtataaaccctcaggaaattcgagcgtatccttgaagacatactgtgcaatatgctgccttgtatagagcttgtttttcatgtatggaaaaaaagtttggccacaaattgcattcttcacgagaacacttagcatttctgtcagaaaattattttcgtgtagcagaatttgcaacaggaataatctgcattatggtgtggtgttgataccattaaggattggtgaaagtgcctgccatttgaaatgggtacgcttgtcatgtttgttttgatgtctaaagtttgcacattttttcttgacaacttgagggctgttttggtgaccaagaaaataaagggaggccataggaaggaatcct

SEQ ID NO: 24861 - DNA, 1408 bp, Zea Mays
ttcggcttcatctatattgtggattgcctttgaatctgtccaattcccctcagcctttctagcaacttcctgactcccataaatagcaataggtccttgatccgaaggtatcttcatgcaaagatatgctggatgaagaattacttcgaaagcattgagtgttccgcgaccaatgattgcattgtaagggtactccatgtcgacaatgtcaaacacaacttgctcagtccttgtattattgacaaatccgaaggtcactggcatggtaatcttgccaagcgctacaatttgtcttcctccgaagccacaaagagggtgcgtagcatcatgaattttgtcttctggttctagcatctgtctgaaggctttagcaaatataatgtcggatgcactgcctgtatcaaccaaaacattatggactaaaaatcctttgatgacacaagatatgaccatagcatcattgtgagggtaatccttgagctgaaggtcctcttgggagaaggtaattgggatatgagatcatcttgacttgatgaagggtccctgtaccccgacatgatgtacccttctctgtgcctccttcttctgcttcttattggccggttctgagcacgatccgcctgttattgggagcaccagcttcatagccgaagcagcgctagctttgttgttgaatgaagccatcagctcagaaagtggaagtgagttcaccggaggtgggcgccaatgttggggacttgttctcaactgctttgaattaagaacaaggcaacataaaatgttaaatgttaatgcccttcgtccgctgaagcattatctcctttaggatttaatgaacttcggacgaagaccataagcaaaatatcacgaaggtcttatcttcgtgatcatttctataaaattatgtaaacaatgctgaatatgaaacattaaggaaatttatatcaaggacaaatattattatacataaatttcattatacaaatttgagtattagaatatgatatttaattacatttatacctttgccttggcaaagaacgataattccagtgtggtgcgccgatgattacaggattgcgtgaacagtaaaggagtactgttcacctatttataggcacagggcgcagcctgtgagaaattacaatcatgccccttacaaaagattacaattatgactcagacccttatggactaagaagtcatttcatctttaagtcggttcgaaccttcgtcttcagatacattacagtaccgaagcttcatgagtggtagcttcggtactacgtttaaacgggtttgccgaaggtgtttcttcctgcgggaccttcggcgacgaagcatggccccaacactttcgaaggtgtttcttcttatgagaccttcggcgacgaagcagacccccaac

SEQ ID NO: 24862 - DNA, 2072 bp, Zea Mays
cccaaacccagtattcggatctgtggcggaaatttgatgagttagagcttattactggtctgatactcctatacgatgtcactgaaacttccaattccgcaagggctttccttcttaagaagtgttggatggtttgaggaccggaaggttgattcagcagccaaacagcagttatccccaacgttgaaactccagacagataaggagacgtacagacctggtgattcagtcactgtgactatcgaaatctgtagcccagctagtttgaaggatgatgttgggcaggcagtgtcaggcgaggatgccccctcgctgttgttagatgtgctatcatttgaacttaaagggattgagaagctggatactcaatggttctctgttcctaagcccttaccagggtctaaacaaaggcgaggtgaacatatgtttctggattgttcggcaccatcactggtctctaaagtaataattggtgcagggcgaacaaaaacgtacattgcacgtgtggagctcccaaagactttgccgccatcttataggggcatcagtatccgctatttttattatgttaggaccacattatttggaaggccagttatgttgggtaatggagaccaatataaaggtcttgtgaataatgcaattcatctggaagctagagtcccattgcagatacgtgtttcccagaaaagcagcagcctactaaatgaagaagggaatctgcctttttcggtggatcaaccgagcatattttggaagggaaaagatgaagattcagaatggagcaaagcaaatgataatgttgatctagaagaaggatatgatagttctaaagatgaagtttcatctgtttcctcatacaatccttcaaaagcacatcctgaattctccctaaggagctcgttgtcaatgcattctctgtcatcacggctctccacgagtgagctattttacaatcaagtggaacgacctaatttcccatcatacaatccaattcctcgattgtcagtgtcagagatttcagatgatcatgacggaggtttagtggcatctcaaaggaaactaaacattttgctaccagaccatacatcgaatgggcaaagggtttctccagattctgatcactcaaaagatgatgctggactcccccttacgccaaaaaatgttgatccagctggatctgaaggctttacgacaggaagatcttataatataagaattgatgaccaagttttgcttcggttttcaccaaagaattctgactcaacctattactttggtgatatgattggtggagcacttaccttctttcacggaactggaaaacggaggtgcctcgaggtatctatagccctggaaacatctgaaacaattaatcctcgcgcattacatccttcaagaaggggctcaccaacaataaccaagctacacagtgaacatcatgaggttgttgcggatcttcaccagacaagctttctgttttccattcccattgatggccctatgtctttttgtacctcaaaggtcactgtacagtggtctcttcgatttgagttcttcacaactccggaaggaacagacccagctaggtacgagcacccactccttgttgataaaagagagaagggtgaatgggtgctcccggtaactgtttacacacctccattgcgcagacgagctactcatgagaggaatggtagatctgtctcacctggaaatatcttcaactcttgaagtgcactgttgccgaagtatagttactttcagctggaaaggatttacagactattctgactggtacaattgcatcaaaaggattttctcgctgtaaattgttataggatttgcaatgcgatgtctatttttttaatagagaacaaatggagtgaaatacttgacttgcaccaaatggatttattggaccatttgtttcatcgatttgtatcccatgagagatgcatcctggccaaaatttggtgttcagtgcattcattatttagcttatagttgaccttgaccaaagtatgagagcttaccacgacgcaaccatttggttctctcgaatagtacac

SEQ ID NO: 24863 - DNA, 2502 bp, Zea Mays
agagatgaagatgctttattgaaaaccaaatgtccgaagcatgtggagctgagatggcagactgaagttagttccagcatttatgcaactcctttgatcgctgatatcaacagtgatggaaaattggaagtagtggtgccatcatttgttcattacttagaagttcttgaaggcactgatggagacaaactgccaggatggcctgcatttcatcagtcaaatgttcattcaagtcctcttctgtatgacattgacaaggatggtgtacgggaaatagctttggctacttacaacggtgttgtaaatttctttagggtgtcaggttatatgatgatggacaagcttgaggtacctcgtagaaaagtacgtaaagattggtatgttgggctaaatccagatccagttgaccgctcccatccagatgttaatgacagttcaattgccaaagtggctacttctaatgaaactcccctaatagatcagaataaatcaggaagtatgaagggaggtgaggccctgaaaaattcatccgagcaacactcagctgaaacaaaacttaattctacgcaagtgcaagagaatgtacagttgccaaacaatgtaaacgacactcattctgagagcatctctagtgtcactactaaagcagagaatacatcgcaaacacatactcagagacgcttgcttgaaacagccgacaagagtgatgatcaaacaggaagctcagaaactcatgaaagtgattcgggggcaaaagcagcagccactgttgaaaatagtgaacccctagacgaagatgcagatgcatcatttgacttgtttcgggacccagaagatcttcctgatgagtacaattatgattatgatgactatgttgatgatcgcttgtggggagatgaggattggaaagagcaagaacatgagaaagaggaagattatgtgagcatagatgcccacatcttgtccaccccagtaattgcagatattgacaaagatggtgtacaagaaatggtgattgctgtatcatacttctttgatcatgaatattatcgtgattcagatcatgcgaaagaactagaaggaattgacatgggaaaatatgtcgcgagcagtatagttgtttttaaccttgacacccggcaagttaaatgggctgcagatcttgatttgagcacggatgctgtaaatttccgtgctcatgtgttttcctctccaactgtggttgatttggatggtgatggatatttggacatccttattgggactgcttatggcttgttttatgttattgatcatcgtggtaaggttaggaacaaattcccccttgagatggctgagattcacgcaccagtcattgctgcggacatcaatgatgatggcaaaatcgagatggttaccactgattcccatggaaatgtagcagcatggactgcagagggagaagaaatctgggaagtgcatctaaagagtctgattccacaggtacactatggttttggctgataacgtggatggtggagatgaccttgatcttattgttaccactatgaatggcaacgtcttctgcttctccactcaatcaccacaccatccgcttaaggaatggaggtcatcaaaccaaggaaggaataatgctgcatatcagtacaaccgtgaaggtatctatgttaagcatggttccaggaccttccgtgacgaagagggcaagaatttctggatagagtttgaaatcgttgacaagtacagggtgccctatgggaagcaagctccttataacgtgacggtaactttacttgttccggggaattatcaaggagataggcgcattgttgtcagtggtgtgtatcatcaaccagggaagcaacggatgatgcttcccactgttcctgttagaactactggaactgtggtcgtggagatgatcgataaaaatgggctgtacttctccgacgagttctcactcaccttccacatgcattactataagctgctgaaatggcttctgctactgccaatgcttggaatgtttggtgttctcgtcatcttgaggccccaagaaggtgcgccgctgccatcgttttcacggaatatcgactagtggtgaaatgccggtgacccattgaagctgacgaagtgactccccaacatctccatgacctaaatgtcttgttcagtgtagtatcccaacagttaaccatttcatggattatagttatattttttacaatgtacccatttagttctgcagaacaattttgtacacagccattttcaatattggctcacccaaagaacaagcatattgtcaccattgagagtttacagtaggccttggaaacggtaattgtcagattctaagagaagcgacactcggagaggagaagcaaaactctcggatactgtgtcaaaacgctcttcataactattagtagaaaacaaacctatattaagcctgttttcatgctagcctgtcattcctgggtctgtgcggatgttgttgac

SEQ ID NO: 24864 - DNA, 3407 bp, Zea Mays
gcggcacccgccacctacctggtcgcccaacctactgcctatacgaggggagggggatagggagtagcagtagccagtaggcagcgtagcactgcggctcctactaccaagtaccaaccacacctccaacccccgccgtataccaatccgccggaggtctctattcagtccacttgcctttttccctcaccggtcactgcatcgagctatcggttcgtctctccctttccctcaggagtggtagatctgccggtgcggtccccagtttggatcttgatgatttggtgacttgagtggccgattttcttcgagcaaactggtttttgggaagtgcggtttcctcaatgtctatttgaatcacagcatactgaactgaatcaagtgataattgtgttctggtcatacactaagatatacctgaaacttctgcttcatatgttcacacatcataaatattccaacaaaggtcagatgaacagcgaaaggaatgtgaagatcatatcaggtcgtgatgggcaaaagaagggaaattcacagtatggccaaattgtacacatgccaaaggacatggtcacaacagtcaatggaaacgtagatgcaaaatttgaagatgaagttagagttgtgaagaatgataggttccaaaggcaacgagagtcttggggtggggaatgcaagaagggctcaaaaccatggcctggtcgaaaggcagctactgttgatgaacttgttaaacatatgtcaaatgttccttcatatttacagcgtaaagaaacttctgaccatcttcaagacaaggcactgaatgttggagttcttgagtgggggcttcttgctaactggtctcagcaagaaaagcataagctcactagaagctatggaccatctccacccaatactagcaggtctgtactattcccatctccatcacattcttctccaagccccagcagcagatctcttgagagtaatcaatctaccccaatgagtggccatcatcattcatccatcagagcacagcagaataggctcacagataaacaccatgagagggccagatgtccacctagcccaaattctgcagtactgagcttattgtcaggtcatggcacacatccctgtccagagaacggtcataattatgttgggttgggtctcagcaatgtttctttagcctcagactctctaggttcttcctctagaagttgtggaagacatgaaatggttggagatgaagagactagacggaagactgaagacgttgtccatcattgttctcgtaggctttttgcagacagcgataacattgggaaacatttcttcgcatcaaataccaatgactccatgtgtaatgatcctgaacagagtattggcttgaatggggaaaattttgagtcactaacgtctgatgctgtaatggacacagctagaaatgacagtaagtcgtctgactatttactggaggatattgagccatcccttgaatttcctcgaatcccatattcatgtccacttcccatcatagattcagcagccaaagagattggcatcactagcactgaggctggagatgcaaaagtgagtaaaaattctaaccggaaccaatctgccatgaatgtcactgagaatcctccccaatactcagcaaagtttagtgataagatgccttattgtcatctaggttctgggatgaatcgagggagctgcagctctagcctcaaggagtcaccacatattcgacaacccaatatagttcctcctgtcgataagacaggagacaggtcatcacccaacagcaaaggtaggcgaagcccattgaggaggatgttagatccaatattaaagccaagacattctagtccagtacgtccttcatttgttcctaagtgtcaacttccagtcaataccaccaagcagtctctggacttggggaaatcagtgccacataatgttcagcgaagtgcaagatacatacaaaaaggaaatgattcagcaacaacaaggcaagcacttctgcagctagcatggaagaacggcttgcctttattcatactctcttatggtgattctgacatcctggcagccactgttagaaggaagggcatccctgaaaaggatggtctggaaagcacatatgctgtattcactgttgaagaaccgaagaaaaaaagtggagcttggatcaagacagggggcaagaacaaaaaacatcaccttttatctagcatagttggggaaataaaggttgcgcgtcgaaaatcaagatgccaccatacaaccgatgttcatgtacacagggaatttgtgttggttggttccaaatttctaccatcgtctgaagaatcaggtgattcaaatgttagtggagagcttgcagcttttatcagcacacttcctcagcaagaagcagaaacctcgaagcaatcatcttcacagaataccaggcaaagaaattcaatgccaattggctgtggttgccccccactgggaaatttccatcctagcacgagaagtgctaattctgcttcagccaatgttgttgcagtacttcctgatggcttccatggcacaataacatctggacagccattgcctttgattgagaggtggaggtcaggaggagcttgtgactgtggcggatgggatgaaggttgtatgctaagcgtcctcactgatgcgtccgaagaaaatgatgccattcaggctaaccaggcaaaggatggcagccagagatttgagcttctagatcagggtcgatcacgagaagagaggcatgccttcagtatgacttccttcaaagaggggctttatacagtggaattcagatcatccattgcattacttcaggcttttgcaatgtgtatagtgatgctccatggaaggtacccaagaagaacgcaagttggctcgcaagcagagcaggagcatgatctccttgctggtcatgagctcaaggcaatggcagccagtcaaggaagaaggcctccgacaagctatgtgccccaccggccacctctttctcctgtaggccgagcctagcttatcacgatttagtgtatgttctttctgtgtctgtcctctttcttcagctgcgtagtgccggtgggattgatataccatggtccaatggtccatatgtaatacgcatgtccaaagtgacaatctctgcgcaagtctttagagatagctccctgtacatgctgtgatgttgttgatggtgtatgactgtaccagtaccgtgatgtggctgcaaggtccatctcagtgcttagttacccttttatatgtccgcttatctgttgcttctgtatatgctgaaatgcgcctgcaatctgttgcaacccttgtttaaattgtgcgttgcatcgcagcagcatttgtgcagctgctgaagttatgttttctgg

SEQ ID NO: 24865 - DNA, 1373 bp, Zea Mays
atatgggaaatgtattttactcttcatgcttttccccttcgtgcaagcaaagctaaacaatacccgtcttgccttcaaatcgaactcctcccccgatcgatcccaatcgaacccaccaagccgataccctaaccctcgcccttctcgatgtcggccgccaccaccggcccagccccttcagtagccactccgatggcgccccctccgtcctacccggcctcctccacggcctcttcctccatctccgcgtccgccgaggaggaggaggacctctatggccgcctcaaatcgctccaacgccacatggagttcgtcgaaatccaggaggagtacgttaaagacgagcagaagaacctgaagcgcgaactccttcgtgcgcaggaggaggttaagcggatccagtctgtaccgctcgtcattggccagtttatggagatggtcgacggcaacaacggcatcgtgggctctaccactggcagcaactactacgtgcggatcctcagcaccatcaaccgcgagttgctcaagccgtcagcgtccgtcgcgttgcatcgtcactccaacgctctagtcgacgtgctgccgccggaggccgactccagcatctccttgttgggatcgtcggagaagcccaacgtcacttacaacgatattggaggatgtgacatccaaaagcaagaaatacgggaggcggttgaattacccttgactcatcatgagttgtacaagcagattggtattgatcctccaagaggggtgcttctgtatggtcctccgggtactggcaagaccatgcttgccaaagcagttgcacatcataccactgctgcttttatcagggtcgtcggttcagagtttgttcaaaagtacttgggtgagggccctagaatggtgcgtgacgtgttccgtttggccaaggagaatgccccagcaatcattttcattgatgaggttgatgctatagccactgctcgttttgatgctcagactggtgctgaccgagaagttcagcgtattcttatggagctactcaatcagatggatgggtttgatcaaacagtcaatgtgaaggttataatggcaactaatcgggcagacactctagatcctgctttgttgcgtcctggtagacttgacaggaaaattgagttccctctgccagaccggcgtcagaagaggcttgtttttcaagtttgcactgccaaaatgaacctgagcgatgaggttgatttggaagattatgtttccagaccggataagatcagtgctgctgatataatagagttcaagtgtggtgttaaagactatcgcttcaaggtacaccttgcattttgaaaatgcgaaggtgaggtagtaatgataacatctatatc

SEQ ID NO: 24866 - DNA, 3150 bp, Zea Mays
  misc_feature (3149)..(3150): n is a, c, g, or t
atggagatggggaaggcggcggcggtggtgctggcggtgaacggcaagcggtacgaggccgccggcgtggacccgtcgacgacgctgcttgagttcctgcgcacccacacgcccgtcagggggcccaagctcggctgcggcgaaggtggctgcggagcatgcgttgtgcttgtctcgaagtacgacccagccaccgacgaggtgaccgagttctcagcgagctcctgcctgacgctgctccatagcgtggaccggtgctcggtgaccaccagcgagggcattggcaacaccaaggatggctaccaccctgtgcagcagcgcctctccggcttccacgcctcccagtgcggtttctgcacgcccggcatgtgcatgtccatcttctctgcgcttgtcaaagccgacaaggcggccaaccggccagccccaccggccggcttctccaagctcacttcctcggaggctgagaaggctgtctctggcaacctgtgccgctgcacagggtacaggcccatcgtcgacgcctgtaagagcttcgcagccgatgttgatcttgaggacctgggcctcaactgcttctggaagaagggtgatgagcctgcagatgtcagcaagctgccaggctacaacagtggtgacgtctgcactttccctgactttctcaaatctgagatcaagtcctcaattcagcaggctaacagcgctccagttcctgtttctgacgatggctggtaccgtcctaggagcattgacgagcttcacaggttgtttcaatctagctccttcgatgaaaattccgtgaagatagtggcttcaaacactgggtctggagtgtacaaggatcaggacctttatgacaagtacattgacatcaaaggaatcccagagctttcagtcatcaacagaagcagcaaaggaattgagcttggatcagttgtgtccatctctaaagctattgaggtgctgtcagatggaaatctcgtcttcagaaagattgctggtcacctgaacaaagtggcttcaccgtttgttcggaacactgcaaccataggtggaaacatagtcatggcacaaagattgccattcgcatcggacattgcaaccatactactagctgcaggttcaacagtcacaatccaggtggcttccaaaaggctgtgcttcactctggaggagttcttgcagcagcctccatgcgattctaggaccctgctgctgagcatatttatcccggaatggggctcaaatgatgtcacctttgagactttccgagcagcacctcgtccacttggcaatgctgtctcatatgtcaattcagctttcttggcaaggacttcattggatgcagcatcaaaggaccatctcatcgaggatatatgtctggcgttcggtgcttatggagctgatcatgctattagaactagaaaggttgaggattacctgaagggcaaaacagtgagctcgtctgtcatacttgaagctgttcggttgcttaaagggtctattaaaccatcagaaggctcaacacatcctgagtatagaattagcttggctgtcagtttcttgtttaccttcctatcctcccttgccaatagcttgaatgaatctgcaaaggttaatggtaccaacgagcactcaccagagaagcaactcaagttggacatcaatgatttgccaatacgatcaagacaagaaatatttttcactgatgcatataagccagttggcaaagcaattaagaaagctggggtagagatccaagcttcaggtagacaatcttatcccaatacacagataaacatgttcataagttcaccataccctttttcttcagcatactccacaacgaaatcatttagtgatccacccttctgtcatttgcatcttaacatttttagcgcagaaaactccaacaagctccatcccttaacatttttagcgcctgcagtttctctacaagataacgcctttaataatattccttttactgacacaggggaagctgtgtacgttgatgatatccctgctcccaaagattgcctctatggggcatttatttatagcacacaccctcatgcacatgtaaagtcaatcaactttaaaccatctttggcttcacagaagatcatcacagttatcactgcaaaggatattcccagcggtggacaaaatgttggttatagcttcccgatgattggagaagaagcactttttgcagatccagttgctgaatttgctggtcaaaatattggtgttgtgattgctcaaacacagaagtatgcctacatggcggcaaagcaagccgtcattgagtatagcacagaaaatctgcagccaccaattctgacaatagaagatgcaatcgaacgaagcagcttcttccaaaccctcccatttgtagctcctaagccagttggtgattacgacaaagggatgtctgaagctgatcacaagattttatcggcagaggtaaaaattgaatcccaatactttttctacatggagccacaagtggcgctagctattcctgatgaagataactgcataaccatctattcttcaacacaattacctgagtccacacaaaatgtggttgcaaagtgcgttggcattccatttcacaatgtccgcgtaatcaccagaagggtcggaggaggctttggtggaaaagcattgaaatcaatgcatgttgcatgtgcatgtgcagttgctgcattgaagctacaacgtccagttcggatgtacctcgatcgcaagacagacatgataatggcaggcgggcggcatcctatgaaggtgaagtactctgttgggttcaagtcaaacggcaagatcacagccttacatcttgatcttgggatcaatggtggaatatctccagatatgagtccaatgattgcagcacctgtcataggttctctcaaaaagtacaactggggcaatcttgcatttgacaccaaggtctgcaaaacaaatgtctcatcaaaatcgtcaatgagagctcctggagatgcgcagggctctttcattgctgaagccatcatcgagcatgttgcctcggcactttcagccgacactaataccataaggagaaagaaccttcatgactttgagagccttgcagtgttctttggagatagtgcatgtgnn

SEQ ID NO: 24867 - DNA, 231 bp, Zea Mays
ccgcgtccacagtctaggcgtccagccgccgctcggcctcctggctcccgcaggcccgccctcccgtccagacgtcccgtcaacagctcgccctcgctggctcttgctttttctgctccgaccggcgaccgaggaggaggaacgaagccttcgcggcttcacggcttggcgctgctggctgctgattttctaaagtcgtgaagcagtgaccatgagtgaaggatatgtttg

SEQ ID NO: 24868 - DNA, 2346 bp, Zea Mays
tagagatcattgttattcctctcagggcttgggacatcctatgttgagacaacatatgcagaattaagttcctcatgcgacaactcatctatttcacagtgacatggacattacagctgcataagagaatgtgatacaattttatttggcaaaaactttgctaaagatatataccaggggtattccaagatggttcaacaaagattatgctgactttggggccgatagactcagactcggtccgaggactcgaactcggtcttagggactcggcgaccgggagctcggtccacatgccagacaagattcgccagcctgctatagataagggaagatggtgattcgtgataagaatgatatatttgtaaatgtagcatatcctgaattataagggagtttacatgtaaagatagatataagtattcccatttattggagggggtcagttaggctgatctctacccttatcaagctaacgactagataaactttctataaccaatgacacctccttggactataaaagggggtagtatcgcccatcaagggcagatcatctgatcatattgcataggcaatagacaccgcaacacacaagacgcatagtattatcttacattgatagcccgaacctatctaaatcttcgagtcccttgtgcattttccttaaactcttgatctaccccataaattcactatcgaatatttctcgacaacctttagctttatatcaaattcatacgcctcttatatattttttctagcctcatgcatgcaactagcagtatactatttttcgtccacccagtgcaggtgccaattgcgctgccaaccatttttctgccagcaggtaaactcgtgggcatggcatgtcgaaaacagagctccaattctttgttgtgtgcttgtacccttgtgggcttgtggtagtcactctgctattcatcatgtcttgcgacagtgctgcatgctggtcatcactctcatgtggcatgtggcatacttctgaaacaaatcattgagatggtgtctccaaaaattaatctacgtactcgtcactgtgtgccaagcatgtcattctgaccaccgaagatctcataaagccctaatatcattagagtcaaataatgtctgatagatgagttagcatgtgaatatattgattctaacatgatcagcatgcgattgattcaatgcaagtgcaaggatcataaacattcttccactgtcccacgacttaacccattgtcgtggtggcactgaacgtggtgtccttgggtgacccacttagaaaatttagagtttagtgatgggtttgctcattttatagtgcagtgacctatttgcacatacaagagaagtctggtgacctcggatgcaatttacccgatatattattttgtttcatggtttatttataatttacttcatccagctcttagctcaagtaatctggacaagtttctcatctccattgggaagcaaccagcatatgtggacttggaggctgcaccagctgtgggtaaggataatcctcctgatctagcacatttggttccaactggtgtgccaaattcttcagaacaaccagttgagaacacggcacctactaatgttcttaaagagacagaagtgaaggctaaacccaaagttcagagcaagggtgcagaaacatcgagcaaagtagataaacctactaccgataccagtgttgacaaatttgtaaatgatgtgttcgagatcatctccccattgttcttgtctgaggcattgaagaaattggacattaagaaggaagatctttctttgatcttagaaggcctcaggggacgggcagatccagatttgaagagtatagcgatgactctgaagaatgcatcatatacctcagggtttcacgctggttacaaaaccatgcagaatcgtggtctaaacggctgacccacttaggtcccagtctctcaattgcatggtttgatacaagaaacaggaatctgattttacatatttgtatgctgttgaatgaagtcaacatattatgtttgatgctctcgttctatctatgacgtatgctctttttttgtgtatgtgtggatttgcctttttctctctctgagagatcaatgggaaattttcaccataccgtgcagtgttccatagaatatgtatttacaagattctgctactcgctctaccaacatcagagtttcagtgtatcagatacatcacatagaaatgtcttcggcgcgttccagaaattactgttaacatggtatatcacccaaacagtcgttttacgtgccctttaacgatgtgtaattcactcgcctttacagtgggcgtatt

SEQ ID NO: 24869 - DNA, 646 bp, Zea Mays
tggcaggttcgtctcgtaggaggaaacaaatagacaatcaaacctcacacaaaaggaagcctaggatcattgccataatagtctaacgatacgatgagaactatgaagagtttgcggtttgcattgtatgcatcgagagaggaggagaacttaggagatgtgctcgtgcgagtggtggcatgtatgaggcgagtgatggctcctcccaagagggtgtacgtgccatgcatgtttgaaagaacacctcctaggaaggagaagccacaaacggtgcagacaaggatatgattgatacgagcccattttcgaaggcaggaaagaatgtggtcaattttgttgctaagcaatggacaagccgtttcaattcaagaactggtttgattttgaatttggccggtttctaccgatttattgcgattaatcggtcccggcgtggtttttgctaagcaactggttttgtgaaccttgatccctatatcttgttgaaattgcactacgtaaacagtaccaaactgacgttgaaggagatgaaatgttgatcattaaacctgatgaaacatagatgctacaatcgaacattgacgatttgttttattttagatataaaaatacgaggtgttatttggaaggcagggaatcaattccc

SEQ ID NO: 24870 - DNA, 437 bp, Zea Mays
tcgtcaagcggacatcgtctaacaaacactaacgtagtgttattccagccgaactatcttctccctcggatcccttcgagtcactggccgaccccgaagcaaaaaaggaagatgaaattactaagatggccgaagctattatggacgaagctgttactcgactactaaacgaggctgcagaagcagttttaaaagaagaatggctattattgtaaaaacatttggaatattaatgtaatatttgctgaacaaagtgtgtaatattttgtagttttgaatgtaatatataaactgtttgtaatttaattctttacgatgcatgaaactttacgtacatatcgtttttgagccttcggcgaaaaaacaccttcccttcttttcatgcttcgtgaagaatatccatattccgtaaaaacatccaatctccgtaagcaata

SEQ ID NO: 24871 - DNA, 1422 bp, Zea Mays
gtgaattacgttttcactcgcgatatcgtacttttggttcgtcgtgtactcgtgtggaaggcggctgcctgctcccgcggtctcttccgtctcggaggtgggagagagcgatcagcggcgtcgccgggtggatccaaagcgcgcgagaaaatgcagggcggatccagcggcatcgtgtatggtggcctcaagtaccaggcgcggtgtatcgccgacatacgcgcggacgccggctcgaccaccttcctcgccggcaccctcagcctcaaggaggagaacgaggtgcacctgatccggttttcgccggcggagagcgagctggtgtgcgatggcctcttctaccaccccaacgagatttgggacctcaaatcatgccccttcgatcacagggttttctccacagtctacacgtctggtgagggctatggtgcatcagtttggaagatcccggagctcaatgggcaatcaaactcaccacaacttgagcagctctttgagcttagtgggcatacgggcaagattagacgtgtgatctggtggccacttggaaagcatgataaactaattagcattgatgaccgaaatatttttctttggaacatagacacgtcaaaaaaaatagctaaggtgatctcacagggatcaactgacatgcttccaaatttacgtggtggagcttgggatccacacaatcataatttagttgctgcaatatctgattcatcacttcagctgtgggatctacgttctatggaaaaatcaactgcaattgaacatgcacatatacgggatgtggattataaccccaagaagcaaaacattgttgcaacagcagaagaggaatttggaattcgcttgtgggatctcagaatgcttaagtatcctctaaaagatctccctgggcactcacattggacatgggctgttcggcacaatcctgcgtatgatgagctccttctgagtgctggaacagattcaactgtaaatttatggttggctaaagttagcagtgacgatcctgaatctgatagcccttctgctttatccaataggcaagaagtaccattactcaactcatatactgactatgaagacagcatctatggtattgcatggagctcccatgatccatcattattcgcttctttgtcatatgatggaagggttgtcttggaatcagtcaagccctacttgcagagaaaatgaaccttgtctagttttctaaattctgagtagctttgccttgccattctgtagcctcttaacaagcatttatgtgatgattcggtttactgttgtagcaatggcagaaaaatggataacaagattgttacagaaatcaatttttaggatgttgtatatttgaagtgtccatgaaaaggtcttgtgttatatgatgaggtagaattgagcaaatttggt

SEQ ID NO: 24872 - DNA, 2489 bp, Zea Mays
cgttctggtgcttggcctttttgggagtgttgatgcggcgttatgggggcgctggatctgttgtcaaacctgagctcgtagcgctagcactagcttgtcagactaggacttggggattgtgctgctactcagctgaaagtttatagaaggtggagaagttgtggtgtttccctacctgttagtctgcacttctttgttcctgatcaactgctccgacacgattgttgtcttctcaacctctcttgccaagcatggctgggcaaacggcaaaggcaaaggaagcagaaaaagatgacagacaagaacccggagctgagggggcgaaaaacaagctactgccgtctcaccagcagcaagactctccagcttctgtggcggacaatgattcttcaggtgtctcttcagttcctggcgatgagtcgcctgtcctggatggggattctggtgagttgaaagtggaggaaaacttggatggtaatgggagtaaggaaaagaaaacgtctcagaagagcagtactagtgacggctttgcttctgctaaagtgagtgatgggacaagtagtttgaggaagaccagtggtagtgcgacgatgagtacacgggccgatttcactgagagtgggaagagtagcatgtgccgtgtgagcacggccagtgacattagcgacgagagctcgtgcagcagcatgagcagtgccaccacaaagccacacaaggggaatgattcaaggtgggaggcgatccatgttgtgaagtccagggataatgttcttggactgaatcattttaggctgcttaagaagttgggttctggtgatataggaagtgtgtatctctctgaactgagtggtacacggagttactttgcaatgaaggtaatggataagacttctttggcgagtcggaagaagctgcttcgagctcagaccgagcgggagatcctacagtccctggaccatccatttctaccaaccctgtacactcattttgagacagacaagttttcatgcttagttatggaattctgccctggaggtgaccttcatactcttcgtcaaaggcaacctggaaaatatttctcagagcaagcagcaaagttctatgtggcagaggtactccttgcattggaatacctgcatatgcttgggattatataccgtgatcttaaaccagaaaatgtcctcgttcgggaagatggccacatcatgctatcagactttgatctctctcttcgctgttcagtaagcccaacggtgatcaagtctgcaaatcctggcctagatgcaatgcagaggaacaatgcagcatactgtgcccagcctgcttgcattgaaccatcctgcattcagccctcttgtgtagctccaactacttgctttggcccccggttcttctccaaatctaaatcaaagtccaagtccaagtccaagaaggacaagtcaaagcctgatgctccaaaccaagagaacctcttcccagagctcattgctgagccaactgacgctcgctcgatgtcctttgttggcactcatgagtacctggccccagaaataataaaaggggagggccatggaagtgctgtggattggtggacctttggcatattcttgtacgagctgttgttcgggaagaccccattcaaaggttcaggcaaccgggctacactcttcaacgttgttggccagcccttgaggttcccagagtccccaatagtgagcttctctgcgagggacatgataaggggattgctagtcaaggacccgcagcaccgacttgggtataagcgtggcgctaccgagataaagcagcatcctttcttcgagggcgtgaactgggctctgataaggtgtgcgagccctccagacataccaaagcctgttgagctcgagtgtcgcccaaagcaagtgccatcagcaaatggaaaggtcgcgccagcccctaaccaaaaggggccagataattatctagagtttgaattcttctagggaatttttttttgtgatttctgaactgaaagagtgcatctgggcagatgctgtgaaagaaagtgaaagatgatgagctactctaggcatgtgcttggctggatcttttttttttctgccattagactgtacgctcgtttcaggatatccgagttgttttttcctgctgaactgcttaactctagggtgtactcaatccatcatgtatgttgcaattttcagaacttgcctatggtacttgaaatggacttcagggctacttgctccagctctctgtgtaattgctaatatacattgtaattgatgcttcatcttaggagttaggacatgtcttgctcttcaaatgctgatatctgaacctcgcattgctaatctcagtctgtcgtgaaaaacagaaaccggtgtttgcatttcttggttatccgaaggtgagacatcggcaaggcaatgcaacaagaagcttcgatcttgtgtaatacccaatttgtagatataatataaaag

SEQ ID NO: 24873 - DNA, 4199 bp, Zea Mays
agtagatcgaatgcggggagttaggggtctcattggacgcttcggttcttcaaacaagaggaacatcaccatacttaagaatgtcaatggtatcctgaagccatccaggatgacgcttcttcttgggcctccatcctcagggaagagcacactaatgcgagcactcgctggcaaacttgacaaaaatctcaaggtctctggcagcattacgtattgtggccatccaatttcagaattctatcctgagaggactagcgcgtatgttggtcaatatgatctccacaatgccgagatgactgtaagggagacacttgatttctctaggcggtgcctaggcattggtgccagatatgagatgattacagaacttgctagaagggagcgggatgccggcattaagccagatcctgagattgatgctttcatgaaagctactgcagtacaaggacaggagactaatattataacagatctcactctcaaggtgcttgggctggacatttgtgctgatgttattattggtgatgagatgatcagaggaatttctggcgggcaaaagaaacgtgtgacaactggggagatgctaacagggccagcaacggctttatttatggacgaaatatccactggtttggatagctcgagcacatttcagattgtaaagtttatgaggcatttggtccatgtaatgaatgaaactgtcatgatctctctgctccagccaccgccagagacctacaatctttttgatgacataatcctgctatcagaaggatacatagtgtaccatgggccacgcgagaatatcctggaattctttgagtctgtcggtttccggtgccctgacaggaaaggtgtcgcagactttcttcaagaggttacttccaagaaagaccagcaacaatattggtatcttgatcaggagcaatatcattatgtatctgtacccgactttgcagaacgtttcaaatcattccatgcatgccaacagatgcagaaggagttgcaaataccttttgaaaagtccaaaacccatcctgctgcgttgaccaccaaaaaatatgggctttctagctgggaatcactcaaggcagtgatgtcaagggagcagctattgatgaagcgcaactctttcatctatattttcaaggtcacagtgttgatcatccttgcattcgtgtccatgactgtgtttctcagaacaaagatgccccatgggcaaattgctgatggcaccaaattctttggggccctgacttttggtttaataacgatcatgttcaatgggttcgctgagctacaattgaccataaagaagctaccagttttctacaaacatagggatttcttattcttccctgcatggacctttggagtggcaaacatactcttaaaagttcctatctcgctcgtggaatcagtagtatgggttgttctcacatactatgtgatgggctttgcacctgctgcaggaaggttctttcgtcagtttatagctttctttgccacacaccaaatggcaatggctttatttcggtttcttggtgctgttttgaaaacaatggttgtggccaatacttttgggatgtttgtgctgctcattattttcatttttggaggatttgtcatccgtagaaatgacattaaaccttggtggatctggggttattgggcatcacctatgatgtatagccaaaatgcaatatctatcaacgaattccttgctagtaggtgggctattccaaacaatgacacgactattgatgcaccaacagtaggcaaagcaattcttaaatccaaaggcttgtttactgaagaatggggattttggctttccattggagcccttataggattcattattttgttcaacagtctctacctttgggcccttacatatttaagtcctagtagtggctccaatgccctagtttcagaaggtgaagatgatgtaaatgaaatagcattgaaagaaagaagcagagatgcaagaagcgaagatgaaatatcccaagttgtatacggggatctaggcactaatggagcaacaaacacactagttcagtcacgagtcactttgcctttccagcctctttcactttgctttaaccatgtaaactattacgtcgacatgcctgcggaaatgaaggaacaaggattcacagaaagccgtttacaactgctctctgatatcagtggtgcttttaggccaggggttctaacagcattagttggtgtgagtggagctggaaagaccactttaatggatgtcctggcaggaaggaaaactagtggagccattgaaggagatattaccctgtccggataccccaaaaaacaagaaacttttgcccggattagtggttattgtgaacaaaccgatatccattctccgaatgttactgtatttgaatccatcacgtactctgcatggttgcgtctttcctcggatattgatgatggtacgaaaaagatgtttgtggaggaagtgatggcccttgtagagcttgatgtgttgtgcgacgctcttgtgggtctccctggagttagtgggttatcaactgagcaaagaaaaaggctgacaattgctgtggagctggtagcaaacccttcgatcatcttcatggatgagccaacttctggtcttgatgctcgagctgctgcgattgtcatgcgtacagtaagaaatacggttaacactggacgtactgtggtctgcacaatccatcagccaagcatcgacatatttgagtcttttgatgagctactgcttttgaaacgtggaggtcaggttatttatgctggtgaacttggtcgccactctcacaaattagttgaatattttgaggcgattccaggtgttcaaaagatcacagaaggatataatcctgcaacatgggcgctggaagttagctctcctctatccgaggctcgattgaacatgaattttgctgaaatttatgctaactctgtgctttataggaaaaatcaagagctcatcaaggagttgagtgttccctcaccagactaccaggacctgtcattccctacaaaatattcgcagaatttctacaaccaatgcgccgcgaacttttggaagcaataccgttcctattggaagaatccgccctacaatgctatgcgctacctgatgacatttctcttcggccttgtatttggtacagtgttctggcaaaaaggaaagaacatagattcacagcaagatttatataatctactcggagccacttacgctgctaccttctttctgggggcttcaaatagcatcacggttcagcctgttgtatcaattgagcgagcagtgttctaccgtgagaaggcagcggggatgtactctccattatcctacgcatttgctcagacgtgcgtggaggtgatctacaccatcttacaggggatactgtacacagtcatcatatatgcgacgatcggatacgactggaaagcggataagttcttgtacttcctgtttttcatgaccgcgtgcttcaactacttcgggttgttcggcatgatgttggtagcgtgcactccctccgcattgctcgccaacattctcatcacgtttgctctgcctctttggaacctcttcgctggattcctcatcgttagaccggcaataccaatttggtggaggtggtactactgggcgaaccccgtgtcgtggaccatctacggcgttgttgcgtctcagttcggcgagaaccaaggcgagctttcagttcccggtgggaagcccgtggtggtgaagcagttcttgaaggataatctcggcatccagcatgacttactcggctatgtcgtgctagtccatttcgcctacatcattgcgttcttcttcgttttcggttattccatcaagttcttcaacttccagaaacgttagctgcacctctactctctgctgtctcacacggacggtcatttgtaatctactttctcgtacgtcgaagcaaatgcttgtttgggaagcctgtttgcaagtagccaagtactagtatattctcctctagcatgttccttcaatggaaaatgttaaaaaaagatgacgaatacataaagtgacatctttgtttagatatcggtgtcgtatctgttgtaccgtaataaaaaaattgttgggactgactgacacgtggttaggtgggtccaaacgctcgaaaagggtaaacataggt

SEQ ID NO: 24874 - DNA, 142 bp, Zea Mays
cccttaccggctattgaagcttcgacggttggtggccatggtgggaggaggcctggcgctgtgatctgactccgttgcggaattcctccggtcttaagggttcccacctggttttggttgtaaccgaaggtggatggaaacc

SEQ ID NO: 24875 - DNA, 612 bp, Zea Mays
gggcaacttgccattctttaaaaaggctccgttcggtggcctgtttgatgctacaacaacgcctacttcgccaaggtcgggggcatcagcctggtggagatgaactacctggaggtggacttcctgttcggcgtcggcttcgacctcaacgtggcgccggagacgttcggcgactactgcgccgtgctgcggtcggagctactgtgcgcggaggctgccccccgcgccactcaggctgcagcactgctgcctgtccgaggatgacgccggggcccggatgcagcgcccagcagcagctcgctgcatgaatgaaagaaacctaagcccatcgatcgacgactcatccggtggcttgggcgcaggagttgtaagccggtgcaaatttttccaaattattagatgttttgtcttttctagattataaagctttcgatatatacacacatctatatatacagtgtgtctagaggtgtagtggtggtgtaggtcgtcgtcggttgtaccagctgctacagtagattgtgtatacagtgctggtgtctttggtgactttctgaatcgtgtgcgtgttcgttccggtagcgaaggtaacttgaacaagcaatgaggtgc

SEQ ID NO: 24876 - DNA, 544 bp, Zea Mays
tgcataagtgacagtgaacactgggtgctgtgttagactcggctgggcacggcacggacggcacacggcgttgtcgacaggcttagggggctaattggaggattcgattggaaggatcttatgcgttccgttgaagcgtgcgaatgagatcattggtacgacgaccgaagaactggtgatgcgagcacaacagaaccttgcttcctgattccatttccagtcacgatggattgctgtaccttccctgtcatctccctgcaaagcgcgcaccagaggggaagcttagcttctgatcatcccggaagtctattcctagtctcatctccctgcaaagcgcgcaccagtaataaggaggaagctcctggtcatcctggaagtctattcacctgtacatgtgtacgtgtgtatctttgcattgcagtgccttccctctcgtttggtttagcacggagtgtatatgtcaaaccctgctgttacacagttgtacataacaattatatgtattttttaaatatataacagtacaaattcgttagttctccct

SEQ ID NO: 24877 - DNA, 3859 bp, Zea Mays
ccctatcggagcagcgtgatgttgtagcaacctgtcagtgactcattggttggggagaccgaaagaaaaagcggggttgtggttgtgggacagtgagaacgactagcgaggggagaccgagagagcagaggcgctcagcacggagcgaggcgccgcgccgtttccttttctgctccactgcaaccggagtccggagcatagcaacctcgctgggctcccatatagcgggcccgcggagccgggatatactccagggaagtcgagcaaggagagcgtggattgtggactacaggggtaaagatcgagtgagcatcgcttcaccatgcgcccttctctctgctgcgcacctctttttcttctgctactattacatttggcatttgctagacctctctttcctctaccgagtaagacaaagaatgaagagaagaagcccatacagacgtttcggccatataacattgctcatcgtggatcaaatggggaaattcccgaggaaacagctgctgcatacatgagagctattgaagaaggggcggattttatagagtctgacatccttgctagcaaagatggggccttgatttgttttcatgatgtaacacttgatgatacaactgatgttgccaagcgtaaggaatttgccaatcgaagaagaacctatgaagtggagtggtttaatgttactggatggtttgtagtggacttcacactggaggaacttaaaacacttagagtgaagcagagatactcgtttagagatcaacaatacaatggtatgttttcaatcatcacgtttgaagaattcatttcaattgccctagatgcagacagaactgtcggcatatatcccgagattaaagatccagtttttatcaacaagcatgtcaagtgggctgatgggaagaagtttgaggacaaatttgtggataccttgcttaaatatggatacaaaggtcaatatatgtcagagaattggctgaagcagccattgtttatacaatcctttgctcccacctccattgtacatgtatcagattttattgactctcccaaggtatttttgattgatgatatcagtgtgagaacacaagacacgaaccagtcatactgggaaattacttcagatgactaccttgcatacattagtaaatatgtcgttggccttggtccatggaaggacactattgttccagcttcaggaaactacttgatgccacctagtgatcttgtcgcacgggcacatgctcataatctccaggtacatccatacacgtacaggaacgagaaccagttcctgcacttcaacttttttcaagatccctacaatgaatacgacttctggataaacactgtgggggttgatggactgtttacagatttcaccggaacccttcacaggtaccaagaattgacatccccacaccggaaggatgagactgcaaatagcctcctagtaaaaattagccaaatgatctcagcatatgaaggtctctgatcagcacgacgttgctgaaaattgtttgtgcttttgttaatcgatctgcaagagcacacgatccattcatcacggacggtgcaacgtgacactgtgactttgcaaggttaaataaacgagttgtttctggttgggacttgttagcacgagccgtactctccattaaagctcttaaaccctgtgagaaatttctagtgtgggaataattgttttcacgatagaaaccgtatcatggtttagcgtgccaggatggacgagttggtctcgggtctttgcacagttggcctacaattgtacttgccggagtgttgaaatttctagtgtgggaataattgttttcacgatagataaacgctcttgtcactcttatcctcttttatgctgcttaagtaacacgctgtttgttggttcatcagtcactgcctaccagggccaggtgcccaacatgccaattgccatagcacgtttgtttaagtttgactctaacagactggagacagtaatgaaggattctcagacgaattttggaggaatatgattccagccttttgacgacatataagaaggatcaaaatgcccaagaaatggattgaatatgattccagcgttttgagttttgacgatgtataaaaggattaaaatgtccaagagataggtgaattaagatttatataaggggcgtccgactgcgcgtggtcaacggctgcactattgtcggacgttacaagtcgatggatgcccggagtcggacgtgaaggcaacactactatgagaagctaaggaccttagaccctggtcgagaagccaaacagcaggatgaactcactgtgtatacatatgacatttctgaaatggcaatggcaagacttgaagaggaatttgtttatcttcttacacattacaaacaggaggttctctcttttcgctctacagaggatggtagtgtggaagacttttcaagcaggagcagctcatttaatgaggaacaattggaagggaaggcaacaccaaataatatcagtggaggaccagaatattttgtgcctgatttaattcaacctggtgcactctctgctgtcaagttcattgctaaattcatgttcctgtatggctatgataaggagtgttgccaggcttatataaactcaagacagagtgcaacagatgagtactttgggtctcttggtctggaaaacctcagtatagaggagcttatgaacacaagttggaacagaatgaattcattaataaagagatggaactgggcaattatggtttttcttcgggtgtaccttgatacaatgatatgatcctgaatgagtaccatgaagcactactgcaactgggagaatctgcaaggaagacatttgcagaattcaagtatgccatccaatcatacacttcatccagtgcagtagctcgtggagaagtgcatccacttacaaagtatgttatgaactacataaaggctctcacagcatacaacaaaactctcgattcacttctcaaggacacggatcgaagatgcctggtttctgacattcagctgatggcaaacccatatcctaatttcaccgcaacagctttcaatctacaatctgttactgcagttctggaggcaaatcttgaagctgggtctagactgtacagagatgatcgattgcagtacatcttcatgatgaacaacatccactacatggttcagaaagtgaagaactcggatctcaaaagctttcttggcgatgaatggatccggatccataacaggaaacttcagcagcaagctacgagatatgagagggcgtcatggaataatgttctcttacctcagtgatgatggcctgtgtgctgctggtgatgctgcttctcgcaaaaccatcagggaggagataaaaaatttcaatctgtcctttgaagaggtttaccaagttcagacagcatggtctgtcccagatgaccaacttcgcgatgatgtccggatttcaatatcactgaaagttatacaggcctacaggacgttcgtgggaagatattcaggcttgcttgatagcacaaagcatcgttacatgaagtacaggccagaggatttggagacacttttaatagatctttttgaaggaactcaaaggacactgcagcattctgccaaactagcatgatttttgccttttcttcatgccctttcatgctgcctagctttcctttccttatgacattgtagaagtacatatgctgttagagatagcattctactgatttggtaacagggtgtatagcttccgaatgttttgatagtgatacagtgattcttcattcctgatccatttaatgatttgcctccatgaaaatggaggatatgtg

SEQ ID NO: 24878 - DNA, 3007 bp, Zea Mays
agtaaaagtaagtaaacaaacaagctagtagtaaatattctactcaatctacaataaaggatgccatggcaggtccttgccaaaaaatataataggataaacaaagatgtcaggttaactaactaactatggatcttcaggtcccccagggcaacaactgtgcaccgctcgctgccttctctaccgtgaccgagagggtgagagctcccagcccttcctcctgtagccaagatatatacctaaaggttgaacaagcagcagcagaggcaaagccgttagccaatctgctgttgcgtgttgcaccgatcaacgtcggttcccagcgcttgctcgtcaagcgtgtcctgctgctgttctctgctcctgcttgccgcgagagctcctctcgctcatctacccaaggtcctctcggcgccgagatgtccgacagcaacgacttcgtcgagctgctatgggagaacggccaggcggtggtgcacgggaggaggaagcagcatccccaggccgccttcccgcccttcacctgcggcgcggccagcagcagtagagctcaagaaaaccagccgggtactaccgacccggtctcgctgttcaagacgggaggcctcttcgccgacttctcgtccggcctagacgccgcccgtggcaacggtgaccttgacgacaccgtgccctggatccactgccccatcgtcgaggaagacagcgccgcacccgcacctgccctcgcggagggctacagcccagatttcttctcggagctccatgcagcggcgttagcagcggcggcggcagagacgaacctcagccctctgccaccaccggtccagcacaacagaagcaccccggttgccaccaccagcagaggaccagaaccctcgaaggaagccccgcgcataccagtaccaggtccaggcagcaggcccgagccacaatctgagttcgcggccaccaggaaacctcggccggagagcggtggagagggattgatgaacttctccctcttctctaggcctgcagccttggtccgggcaagcctacagaggccaccgccaccgcagacaggcactgacaaggtgtccaatgtcaccacgagcacccgcgtggagtcgacggttctacagtcggctagtgggccaagaatcgcccctgtgttcacggaccagaggacggcgtggtcacaatccaaggaggtgcggttttcatgcgcaccagcgctggcggctggtaacctgcaccaggatatgcctctgggaagacctggcaacaacatgactccccaggggaaaatggagaccaaaaaggcttgtgaggttgcagtcgctactccatcgctctgctccggcaatggcgagtcctggcgcgaacaaaagaggaagagtcaggccgaatgttctgcaagtcaagacgatgatcttgatgatgagtccggtgggatgcgaggatcaggcggcagaggtacgaagcgcagccgcaccgcggaggtgcacaatttgtccgaaaggaggagaagggacaggatcaatgagaaaatgcgcgccctgcaagagctcatccccaactgcaacaaggtacgacgatccatttctaccatcttttaattaggccccgtttgatctgattagtccctctattttagtcacatttagtccataaattaccaaatggtaggacttaaacagagactaaattgttctagtctcttaagaggtgactaaaaaaactaaaccatataaattctaccttttgcccttcctttatttcagttgcactaacgacgggcgaatgctacgaggtattttggttctcttatgattcatttaatctgttttaaatacttttagttactaaaactaaacagtgttgttttaaatacttttagttactaaaactaaacagtgtagagactaaaaatttagtctcctaactaaactttagtccctgtactaaagtaaccaaacaaccccttacttatccgacacttttgaatccctaggcatttggtaaatcggtagcaacagatgcatcacctttcttgcagattgacaaagcctccatgctggatgaagcgatcgagtacctcaaaaccctccagcttcaagttcagatgatggccatgggaagtggactgtgcattcctcccatgctgctgccgcgagccatgcagctgcaaattccttcaattgctcatttccatcatctcggcatgggattgggttatgggatgggtgtcctcgatatgaacagcacagcggcagttccatttcagcccatccctggtgctcactatacttgtccgatgatcccaggcacgccaccacaaggtcttggaattggaatgcctggcacaaacacgatgccagtgtttggactccctgggcaagcaatccatccctcagcgtctagcgtacagccattcccatcgttggcgggtcttcctgttaggccaaacctggcacctcaagtcccagccgtcatggctaacatggtgcaggagcaacagcaaggcgtagcgactcagcagcagcagagtctgaataatgaagctcaacagaaagcaaataccggagatccacaaatactacaaaaatagatgaagagatcttcgccagtaatcagtttctggatggtggtggcaacaggactaatactatagggagaaatgaggctgaaacataaaaacggtcagcaagtgccagtctcgactaacaagctgcaggtgtgaatatcagcaccaactcatcatggaagagcttaacgagtttcatgattcacgaagcagatctatcacttgaaaaaggtccaatcaatcaagatggatttggtggcgggatgtctagcttagcgagctaagatgctccaaagttttgtgtaaaatgtagatggaaccttgttacaagtaacatttcttggcagcgatgccgttttcaggtgttttttttttttgttgcttcactgaagttttcttgagtcaatatatcttattttcccagaccttaagtgatca

SEQ ID NO: 24879 - DNA, 2957 bp, Zea Mays
aaaataaagaaaaagagaaagacacaaacaatgaacaagtctcatggtcatgggccagcaaaccagcgtcgtgatgcgcgtgcagctgcaggaaaaataaaaataaaaagacaaaatcagtcggcccaatagccatggaagaattgctctcctgaggtgtgctctgctgcttggtgtttttcctcctcccgttcacctcgccgtcgacggggccaggcggccgaacacatccttgacgaccgccgtcgccctactcgcagcttcctgggtttcatcggatcctctgctagcgacgagcaccccctacaccaggccgttacttgggcgccggtgccatgcccggcgggtcttcgggtccagatggtgaagtggatgcaggatttgcgaagctccagggagaggatttcgagtattacatgcaaacgtactccatcatgctgggacgcaacagcaagaaatcaacagtggatgtggatctctcgagcctcggtgggggtatgaacatctcccgccaccacgcccggatattctacgacttccagcgccgcagattggggacaagaagttctacttcctactgccaacacggtccatcttcgcttcggctgctgctgctcggcatgctcctattattccacagcagcttcctcctccaccgtatgcacatgcacgggcaggccgccctcgtttgtccgagtttcatgaccgctccttcgaaggtgattatgggcgggaggttgatgagattgggaatggtatcagtgaaactgcgatgaggggaaagctggtaaagaggaacaagaagtcttctggcgacttggatatctatggtgggcatagaatcaatgtggaagcaatagggacgctaggtgaagacagtagatcagaaataagatcaaggggtgacagggatattgacaaccaacaagcccttcaagcagaagagaaggatgttgtatcatctgtggccacagtgttatctgatctctgtggccctggggaatggatgcccatggcaaaactccacaacgagcttcttgagcagttcggcaacgtgtggcaccccagcagggtccggaagtacctgacacaggacgactggtcgccgacggagacgaagggcaggccttggttcggccttctggcgcttctcaggaagtacccggagcactttgtcatcaacacgaggtccaagggcaggatgacctcggagttcgtctcgctggtctccttgctctcctagagggacggagagggggtggtgttgtgtccagtactccagtccgtgtccagaagggtcggaggtgtactggctctcgtttgcttgccccttgctgtgtttcagcagctgttatatggacccaccatgttgtgctgtagtatctcgtgtggttgaggcagctgcactggtccgtgaccgtctctgtagcgtcggcagcagtgtatggaaagcatgcgttttaagttttaacctatgctagcaattcagcagcagctcggtgattaccgtatccagcatgtatatccaatgccatacttgtaactgttgtgtggtgtcctctttgcagtttcccgactctcgtgaactacgtgagtagaaacgtctcaaaagatgtcacggccactctatataattatttattgggaaaataagtttttcagccgtaattaaccacggcatgtatagtatgccgacaatcttggctgcccacgtgtccgatgcaccgaagcatcgagatcagcataattgctccaagcgtcgctccttcggggtccctctcggtctcgcaagcatcaatgattcctcgcctctcactacacggcagacggcactacaggcctacagcacgcggcgcacgcgcgccttttggtaaacaattccaggagctacagtcacaccaccaaagcaactcggccagcgcgcgggccggggtcgcatgggcgacgccggcgacaagtgtgcgctgcggctggccgccaccgcgaggaagtggctggaggacgtccgcgtcgaccgcgaaggccgcgtccaccccgccgtagccagcggggggcaggcgctcacctggctcgcgactgccggcgcccgcgtctcgctggccgagcccggccgcgtcgtctgctcgctccgcgtgggcgccccgctcaccgacgcggaggggaggtggcacgccggggccatcgcggtggcggcggacaacgtgtgcgcggcggcggtcttcacggctctgggcgcggacgtgctcaccgtccagtacagcctgtcctacttctcgcccgcccatctcgacgaggaggtggagatggaggggcgagtggtgggccggaaggcggcgctggcggccgcgacggtggaggtgcggaagaaagagtccggcgagctggtggcgatctgcaggcagtggatggcacctctctcgacaacaaaggtcagcacaagcacgagcagcaagctctgaagaaatgcagaacgtctctcgccaacacacacaacggttgctgcactcctccggcaggggcggcacggcaacaccactggttgttggtagagagagaatagctgacggtgcagaggatgttgaggcgccgaggcggcgccgcgacggcttgtactctcgaggtagggaatcacttctgtgccgccggcgaggcttgttcagcctgagccttctcctgtttgttaaacgcaaacatcaaatggagaagaaattcatccataaattacatgttgaacataaatatagtgtcaaaaaatcagatcattcgtaagctatttatttccattggttacaaacattatcaattggaaattacctgttacccttctatggatgctcatttattgtccatgacagcaatatgtttagagcaacaaaggagcaaaaagcgtctgtggtccaatgttacttgatcatgcatatatccatttgcaactaaatgtaaaccaagcaattcaa

SEQ ID NO: 24880 - DNA, 1014 bp, Zea Mays
ctcgatgtcaagcctggttccactgttaagtgtgagcctggatatggttttatgctgcacctttcccagatttttacagatatttttaataatgacctcggtggaccctatgcatttcttgagccaccttttgttcaaagaccccttctatataagatacaggcaaggagaaaaaagaggattcagataactgtatcactttatgcaagtacaaatacacaagcacagaatatctttcccctttatgtacttttagctagacctaccagtaatatttcgcttgaggggtagcattctccgatatatcgagcgggatgatgcttggtggacgtgtacatactaatgtgatgcaccttagccacagcgaggtggacgacaaacctaactctactggattctaatgtccactcgtcttttgtcctcttgcagattaatcgtctcgaagcttccgatacactcagttctcacatgaacgagtgggatggacctccctagaaaccaaacacccctgaatcgcagtcatcatcagagaacgacaatccgtgtgctgttgcgatgtagtagtactactgaagcacagagcgaaccgcacaggctagcccgcacggagcgaaccacacgggaaaagctgatgggaagaaacagaaaagtcaagaaaaggcagttcctgcagcttcaaaatcaagtccggcttccaagaagagcaaggatgacgatgattctgatgaggacgagactgatgattctaacgaggacgagacagacgattctgatgagggattcaagtgatgaagatgataccagtgacgatgaggaggaagacacttcaactcctaagaagcatgaggcaggcaagaagagagctgctgaaagtttcgtgctgaaaactcctctatctgataagaaagcaaaagttgccacgccgtcagctcagaagacagttcaagttgcgttttctacatggccatggggaccatctgccgtcattttctttttgtgatttggtgaaaaagg

SEQ ID NO: 24881 - DNA, 2019 bp, Zea Mays
ctccatatgtcattttacctatattatccttacccctcattgaactggtgggctttaaaatacatattgtggatgttcttcatataggtgaaccttgttgcattcaaaacattggttgaaccatttatcaaattgatatttcatatctgtagttacttacagcattatgtgcatatgatgtctgctatgtttaactcttattcctgtctccttttccttttttttttgtttttggcaaacactctttgttatattttggatctaacagtgtctttgagtattttgagcaggttctggaagaggcagctagtagttgctaaagatgctcgtagagttgatagtctctgttcccgcatatatctgagccatagacttttggatggcacaacacgttttaaagagttgcatcagatcgtagaggatgcaaaagcaaagttggaaagtgaagttggcccccttgatggtacgtcatccaagatggctcgtggtattgtaggccggctgcctgttgctgctgatgtgcagcaactttgctctttagcaattgaaaaagctgatgagtggcttagttcaaacattcaatctgaaactaaacaaaatgatacacttccttctgcctgcaggtttaaatttgaagatattacagcttcatctttggtgttggttctcaaggaagctgtttcctcgcagtatcatgctatcaaaggctataaactctggtactggaatagcagagaagcgccttacacaggggagcctgctgttttccccaaagaccaaagaaggattctaatatccaatcttcagccctgcacagagtattccttccgtattatttcatttactgaggatggtgaactgggccattctgaatcaaagatctttaccaagagtgtggaaatcattcataagaacacagagcatggagcagaaggttgctcatcttctgccaagagagctggtaagagacaaaatgctaggtcatcaggcttccaggtgcgccagttgggtaatgtcttccgaagagcacagactgagaatggttaccccagtacgttgtgtaaatatgagattgaagattcatgtgatcagagtgagtccgtgataccagataaggaccagtttcgatgtggtgcctcccgcaaactcgatcttaatgagacctcagtcccggacctaaatgcagaggtagtcatgccaacagagtgctgccagaatgagaacggctgtacttctggaaagaatgcattcacaaagtcgaacggttgtggtgactctgagacctgtgcagaggggcatgtaggggatgcaccagccatggaatcccggtcccagagtcgcaagcaggcatcagatttggagcaggagacctgtcttgatgacagcaatttggtggcccgtgcagctaggctcttcgccccgaggttaggacagttagatgacaactacgagtactgcgtgaagattatccgttggttggaatgttcaggcctcattgagaaggatttcaggatgaaatttctaacatggttcagtttgagatcgacagagcaggagcgaagagttgttatcaccttcatccgcaccctaattgatgaacccagtagtctggctgcgcagcttttggattcctttgaagaaattgttaccagtaagaggccaagaacaggtttctgtactaagttgtggcactagccaggtagagaaagcatggaactgatatctaatgatactctagcgttcttacatcagcaagattaactgggatgacagtgtaatagtaattttatttattttctgataaatgtagttaaactgatgttgctgagctttgatatttgccatgatgatatattcttcagggctagtttagaaacttaaaccccctccaggattcctagggattgagtggaaaattagcttatttccccctcaattcttgggaatcttggagtagatttaagtttccaaactagcccttaggggatttaagcttccaaactaagtgtaatggtgctt

SEQ ID NO: 24882 - DNA, 6982 bp, Zea Mays
gtatgtctgagttatggaccaaaggcagttcatttcattgggagagctaacagatattcttttatttgcattcttatgcttgggccacctgacttctatccacaaacactaaactgtcccgaagagacattaacaaaagactatgtacaatatggttataaggagactgttgaaggaattgaggaagcaagagagattgtaataagtcagatcccatacttctgtaagccagatgttgtcataaagtgcaaggaggcactaaagaagcgtttaagagctatcaatgaatctcgtgctcaaaagagaaaggccggacaagtttatggagttcctctttctggatctctattaatcaagcctggagtttacccagagcaaaggccatgtaatgaggacacacgtagaaaatgggttgaggcccttgctcagccaaacaagcgactgcgttcattgtctgagcacgttcctcatggttatcgtaggaaatcactttttgaaggtctcattcgatataatgttccattactaagagcaacatggtttattaaagttacatacctgaatcaggcccgaccggcacctaacagtacttcagtagttgcttctgataatcaacgatctaatcaatggacaaaggatgttgttgaatatttacaacagattttggacgaagtttgttctaaagagggtgccattgtacctccatcttttaaagagcagtcatcaccaggacttgctgctggaaccaatcaaataaaaatgaaaacggaatcatctccagctggagacagtgaagaacccttggtgcacttcaaatggcggtatatggttcgcctcatccaatggcatctcacagaagaattgcttgttccctcagtacttatcgaatggttatctaaccaacttcaggagagggattcagatgatgttttagagcttcttttgcctattatacttggtctggttgacaccattactctctcacaaacatatgtgcgcatgttcgtggagctactagtgagacgtctcaatgtcgatcgtccaaaaaggttttcagtttcttctgttatagcagagttactgcgatacatggtacttgcagtgccagatacatttgtttctttggattgctttcctttcccatcatttgtggttcctgatgtatatggtagaggtgctttgttgaagataaccagtggtggtggaattttatgttctaagaggcgtgatgcttatcggtatttgtcctgtggttatgctgtttcttccattcagaaacgtgcacatgatcttgcagcagttgctaaccctagccttcaagcacgtggtgcagccaaagtggtacaggctttggacaaagctcttgtcacaggaaatttgtcagtggcatatttttcactctttaatgatttatctgatgcgttaatggaagaaagatggattaaagaagtgaatccctgtttgcagtcttctctgatgtggattgggactgttgagctatcccttatctgttctatatttttcctttgtgaatgggcgacatgtgattaccgtgattgccgagcatctccctctcagaatgtgaaatttacaggaagaagagatttgtctcagatacacatggcagtgtctatcttgaagaataaaatggatgagatgaataacttgtctcgtcctaagagtagtactcgcatcacccttaataaagttgccaaaggttctttgaatgatgcttgtttgacagcagctgctgtggatgattcttctggactgagaagtaatgcaaaaaatgttgatgagaagaaggatacaaatgatatctttgaaagccctggtccactgcatgatattattgtgtgttggttggatcagcatgaagttagcaacgttgcaggttttacccgggtggatgttcttatcgcggagcttatccgcaatggtatatttttccctcaggtttatgtcaggcagctaattattagtggaattactgataagaacgatacaatgctggatgttgaaagaaaaaggaggcatcacagaactttgaagcagcttcctgggtcttctttatttgatgttcttgaggaaactaggactgcagaagagcaacagctatatgagatgatgtcaacatactctagtgagcgacgccttgttctctcagaactttcatgtggtcattcattttatgcaagtggcagaggtgagtacacttcaagttcctgcattcggaagcagagtgatcttccagttgcatcagaaggtgataagcatggaagagtgctagaacaagtagaagatgttaaagctcttttgtcaagtctgttgggttttacatatcctcccctagtggaatcaaaactttgtgaaatcaaaacaagctttcaagaatcagtaacgtcaacgctcacacaagttgagactggggaagccaaaagtggatgcgaggattgtatgaggtccaaggggcagaaattggatgacagcgccactcctttccaagggtttccattgattcaatcaggcgaggaggatatttggtgggtgaagaaagggacaaagttacaagaatctttcaacgttgaacctgtacagaagtctgttaagcaaacttctagaggtagggcaaaagttgttcgtaaaacacaaagtcttgcacagcttgcagctgctagaatcgaaggtagccagggggcatctactagtcatgtttgtgaaagcaagatgagctgtccccaccatgaacctaataacgatggtgacaacgtcaaagattttgatcacacaagggcagcaaacgtgactgcaatagggaagtcactaaaaagacttagattgctcgaaagacgatctgtctcttcatggttgttgaaatcaataagacagcttgttgatggaaacggaatgacagcttctaaagctaccaattctataagcatccttcctttgcagcctgatgataaaactgcatccaaatggaggctaggtgatgaagaactgctgtcagttctctatgtactggatacatgctgtgattcagtctctggagtgaagttcctcatatggttactagtgaaaattcgtggagtgggctcctcaggtcaacctgggaggacttatatgcttatgaggaacagagatcaccaagtttgtcaggtcaacgaggcacttgtgttctcatctctgcttaggtatgagaacatacttcttgcgaccgacatcttgcctgatgttctaagtgctttagtgaacagaaattctatgtcagcaactaccaggcatcctggttcaacagcttttgcttatgttcgatattttttgaagaaatatagagatgtggctagtgtggccaagtgggagaaaaactttcggaccacttgtgatcaacgcctgttagctgagcttgataatgggcggtccattgatggtgatttggtatcttcttcgggtattttagcaggcgaggagattgatgagcaggtccgccaaaagttgaatggaaggagttcaagactcgtgcagaatatgaaagagatagtgcaacggcaagctgatggaattcagcgcagtttaaaggaaaagaaagttcttgcaggcgcagcacccaggaatccactcacttttgagaaagaagatagttatcaaattgcacatgacattgttttgggcttagtagaatgcatcaggcaaaatgggggtgcaaatccagatggagacctttcaatagttgcttctgctgtttctgcaatcgttgtgaatgctgggcatatgatagcaaaacatttggattttgcaggaggaaactatcaaggtgttaattctgtggctacttcgctaaattttgttcggcacactttacttattcacataaattctctttgcttactaaaagaaactcttggagatcgcttcagccgtgcctttgaaatagctctggcggttgaaacttctgcagctgttacagcagcttttgctcctccaaagatgcaccgcaatcagtttcaaccatctcctgaggcccatgatgcatatggaaatcatacaagtgagctcagcaactcagggaaaggttttgttgggagaactgcaaaagtatctgctgctatttctgctcttgttgtgggggctgttgttcatggagctgttagccttgagcggatggttgctactctaaaaataaaagatggtctggatattatgcagcttttgagaggtttgaaatcaaatacgaatggtgtatcccatcctactggaggttttaggattgaaaattccacggaagtttcggtacattggtttaggattttattggggaactgcagaactgtctatgatgggcttattgcagatattcttggagatccatacattattgcactctcaaggttgcagcggatgcttcctctaactgtaatttttcctccagcctactcaatttttgccatggttctttggagacgatatatttttaactgtgaagatccacaactttatcagtctttttcaaatgcaataaacgatattaccagacatcagccttttcgagagatctacttccgtaatacacatcggctgtataatcttctggcttctgatgttggtgattcgaagtttgcagcaatgcttgaaagtcatagtccggaccggaattcaaaaatattgccatttatacctctccgtgcacgcctttttctggacgctattattgattgcaacacaccaactattcagggggatggtgcttcagagccttgtgatcccaaagataatgaactaaagctttcagagaggcttatgcaacttcttgatactcttcaacctgcaaaatttcactggcaatgggttgagatgaggcttcttttagatgaacaggctcttatggaaaaagttgcagcaggcaagacaacacttgaatcacttcggtcattatcccctaaagctgagggttttgccctttctgatagtgagaaaggatttactgaagtcattctatcaaggctacttgctagacctgacgctgctcctctgtattcagaacttgtccaccttcttggaaagcttcaagagtcacttgttatggatgtaaaatggattctacaagggcaagatgctattcttgggcgcaggtcaacaagacaacagcttgttcatattgcccaacgaaaaggtctttcaacaaaggcacaggtttggaaaccatggggttggtccagcttgcttagcgatgccattcctaataaaactgcaaaaaggaagttggaagtcacatcaattgaggaaggagaagttgtggatgacactgttgatgctaaaaggactaccaagactccccctcatagtgttgatagaagctttgaagggattagatcgataaataaatatttaactgagaaagcccttgctgaattagtattgccttgcatcgacagaagttctgctgatatccgtggtatactttctgttgatttgaccaaacagatgggggctattagtgaacatatcaaagcaatagcattgaatggtgctaaacaagctggttcagtttcttcaggaaatgaagtgccatcgaacaaatcaagtggccgtagaggaattcgaggtggaagcccaaacattggtagaagagctccggttggtaatgacccaagtcctccttcggcttctgctctgcgggcagcgttgtggttacgcctccagttcatcattaggttgcttccagtaatcatggcagataggagcatgagacatacgcttgcttctgcaattctaggcctgcttgcaacgcgcatgatttatgaagatgcagatttgccccttcctcctaccaacgcaactgctttaaggcgggatgtggattccttgctggaacctcccctggatgtcctgcttgaccggcctggcgaaagcctttttgagaagcttttatgcgttctccatgcactgcttggtagctacaaaccaagttggctgaagtcaaggtcagcctctaggtcgtcaattaaaagccaacgagatttctcagcatttgataacgaagcagccgagggcttacagtccgcgttggaccacatggaattgcctgaaacaatcaggcggaggatccaagcagccatgcctcttcttccaccatccaggcgcccttgtatgcaatgccaacctccgcagttgtcgttggctgcattatcaccactccagagcagtacctctggtgtaggtcctcaacagaaaagttcttgtgtgagttgggtgcccactaacgtatcagtcagaagcaaggcagcattgccttctcatgaccctgaaacggaggtagatccatggagcttgctggaagatggcacaaactgccccccctccacagcatctggaagcaatggctcgagtggagtgacgggagaccatgctaatctgaaagcttccagctggcttaagggtgccgtgagggtgaggaggacagaactgacctacattgggtctgtagatgacgacagctgatacgtgtatgattatcttggtgaattggaggcaaagaatttggtctcacttgttggcatttgtgtcgtgtgcaagttaaaagcaccaactgcatcgaattctttgagagctctgtaccacaaggtggaatggaaaccatatggcttttggttggttgttgtagtgttagaatacatcgctgcccccgatttgttttagttagggcctgtgggggcggctgtatatagttggaatccatttctggattcaatgggggagcttatttgagaatcaggcaggaagccatgtagtagatttctagccaagagccctgtacttgttttttttttgggtctgagatgtaattgtcatgtcacatatattcttttgatctaaggctgacggaagttgcattgcctatttgctttagctattactagtgcagcctagacatcatgagtttggatcgttctatgactaaaccgtcctactggtttgctgtttg

SEQ ID NO: 24883 - DNA, 624 bp, Zea Mays
cggtcatggaccgatctagctaaagcggtattattcttggaatcttgtctgtctaactgggattggacgaccaaggtcatatccccttaccccagcctaagccgcggtggtgcacatgcatcccatggcggtgcgcgccggtgagcaggcgaactgcccaccccggtgcccgattttgaacgaggatgggtcctacgcatggaggcgacctaagtgaatgtagcagaggtctacttaccacgaattacagagatagttcttcccatggtgtggtgcggtacattggtgggtttgacattctggcgagcaatcttggtgactccaaggggcttcactcacgggtaaaatctccgtcaaactccacagatcccggagaagcgcctggatgaatcgttcgaggcgacgttctcgcgggtcatcaacgacgaccgctcttctattttaacaaacagttgatgttttcttttctggattttagattaaattccaggcttaacagttttaagatttatatctctaacatgttttagtactgccatctacttattttaggagaagatatctccaaattataggaattctgattaacagatatcctagttaaaaatctttagaaaattatat

SEQ ID NO: 24884 - DNA, 3784 bp, Zea Mays
aaaaaaaaagagaagtccctcccattcgtcgctaatcacaatcccgatctccaagcaaacccacctcccgtcagttccctactcgccgatccagatctcctacagctttccactccgccactccaaccggacgcctccgccgtcgccggcggcggtcgagccacgcgcgcacgccgctgaggaacccggagagggcggcggcaatggagcagctgcggacgttcgggcgggagctggcgatggggtcgcagggcgggtgggggcagtccaaggatttcctcgacctcgtcaagtctatcggcgaggcgcgctccaaggcggaggaggaccgcatcatcgcgcgcgagctcgagcacctcaagcgccgcctggccgaccccgacgtgccacgccgcaagatgaaggagcttctcctccgcctagtctacgccgagatgctcggccacgacgcttccttcggccacatccacgccgtcaagatgacccacgacgagtcgctaccgctcaagcgtaccggctacctcgccgtcgcactcttcctcgacgagcgccacgacctcgtcatcctcgtggtcaacaccatccagaaggacctcaggtcggacaactacctcgtcgtctgcgcagcactcaccgccgcgtgccgccttattggtgaggaggccatccccgccgtgctgccccaggtcgtagatctgctcgtgcaccccaaggaggctgtgaggaagaaggccgtcatggcattacaccggttctaccagcgatcctcctcctccgtttcccacctcgtctccaacttccgcaagaggctatgtgataatgatccaggggtaatgggtgcaactctatgccccctctatgacctgatttcggaggaaccaaattcgtacaaggatttggttgttagtttcgttaacatcctcaaacaagttgctgagaggaggcttccgacttcctacgattatcaccaaatgcctgcaccatttattcagataaaactattgaagatacttgctgtgcttggcagtggtgataaacaagcaagtggacatatgtacactgtattgggcgacatattcaagaagggtgacactgcgagcaacattggcaatgctatactgtatgaatgcatatgctgcatttcatccattttcccaaaccctaagatgctagtggctgcagctgaaacaacatcaaagtttctgaagagtgatagtcataatcttaagtacatgggcattgatgctcttggcaggttaataaaaataaatccagatattgcagaagagcaccagctggctgtcattgattgcttagaggacccagatgacactttgaagcgcaagacatttgagcttctttataagatgacaaagtcaacaaatgttgaggtgattgttgataggatgattgagtacatgatcaacataactgatcatcattacaagacagaaattgcatcacgttgtgtcgaactcgcagagcaatttgcgcctagcaatcagtggttcatccagaccatgaacagagtttttgagcatgctggagatcttgtcaacatcagagtggcacacaatttgatgcggctaattgctgaaggctttggagatgaggacgaaggtgctgacagtcagctaagatcatcggctgtagattcttatgtccgcattgtcggagagccaaagcttccttcttctttccttcagataatatgctgggtgttgggggaatatggaacagcagatggaaaacattcggcttcttatattattgggaaattgtgtgatgtggcagaggcccacctcactgatgacactgtcaaggcgtatgcaatctcagcaattctgaagatatttgcgtttgaaatcgctcttggaaggaggattgatttgctgcctgagtgtcaaacattggtagatgaattgttagcttcacattcaacagacctgcagcaacgggcatacgagctacatgctttactaggcttgggcaaaaatgatgttgaaagtgttatgcctgcagatgcaagctgtgaagatattgaggtcgacagaaacctctcatttctagacagttatgtgcagcaagccttggaaaacggtgcatcaccttacattccagagagtgaacgctctggtcttacaagtgttggcagctacagaagccaagaacaacaggaaacatctgcccatactcttagattcgaggcctatgagatgcctaaaccttctttgccactagcaacttcacaaaccagcatgtccacaccaaatactgaccttgttccagtttcagagccaggctactataaggaagaccatcaaacatcaaggcctcaaccaccaagcgatgcggtttctggtgagtttggtgtcaaactccgccttgatggggttcaaaagaaatggggaaggtcaacatattcctcttccacaccctcaagctcgatgtccagtcaacaaacaacaaatggggcctctcattctgatgggggagggccaagttcacagccacgggagtcctcatacggttcgaagagacagcagggcacagaagtctcagcagaaaagcaacggctggctgcttcgctttttggttcggcagcagctagagctgacaggaaagcacaagcttctcgaaagacagggaaggacagtccctcaactgagaaagtagctaccactaatgtggctgcccagtctgttaaggagcaagtaatcccagctgctgcaccaccgcctgatctgctggatctgggtgacgagacagttccatcgagccgtccatcggctgaccctttctcacagttggtgggtcttcttggaccagcatctgctgctccggcgctttctgggactccggctaccactaccagtacttccaaagcaccagatcttatgtcaatcttctcagatgatgtaccaactggagtgactagtagtgggtccaccgatcccactccaggtgatgctatttcggtgagctcccacaaaggagcgacggcagtggcaccaaagaagggctcgagccttcaagatgccttgcaaaaggactcgactgcacggcaagtaggtgtgacaccgacagggaacaaccccaatcttttcaaggacttgctaggctaaaggggacagtaaggcacaccgtatgctccgcgtggcctctttgggtagatggagttcatctccgacatgtctcgatcactgaaacagcgatgatctcgctgtttgatcagcgtaggaaaagggttgcaacttgcaagggctatatttgttctcgagtcacaagacacgacctgtcctccttccagttgggaggggggttgcgctgttgagatctgtgaatggttgcgggtatttttcctttaacctcttgtgattttgtgctgagactattgtacatgtgtttacatgacgtgtaatctgtacatgagaccgtggtacagaagcgtgtgccggcgcatttttgttcagctgggctagatacactacaattgctgggcactggaaagtaaaacaatgaaagaattggtgtcattctctggctggaataaaaatataaaacggtaaatgtgtagtgttgtttattgttgatgaaaacagtcgcagatttgtttttgcaacttttaactgttgagaagtaatgcaattctttttttttcggttccattcaaacctacttgctgcgtagggccatggcccatggggcattcagtattttctctcataaaaaggtctactactattcttttctggttctatttagtcgagatcgttgtttttgt

SEQ ID NO: 24885 - DNA, 3818 bp, Zea Mays
cggggaagggggaagagaggggacgaagagggagaaggaactgggacttgccgcccccgcctccgaattccccactcctccaccaccgccaccactcaccccttgctccgctcggcctcctgaatccggcgtcgtcaagcaaccccactccttctgccgttatcagaaccctaaccgatcaatccgtccgattcccagctgccggtttcgcgttgggagcgccggagcaggggaggggcggagggtcggatcggcagccgcaggagcattgagcgatggctgccgtgtaggatgcagctggactccgccggccgccgcctagctgctgctgttgttgctgaagttccgatgcttcagcaaccgcgatcttaataggagcggagggtggagtaccggtggagtgggccggacggctggttgatctccgtgagctccagcgcctacgcactgggaggtggggaggtgattgccggaggcgtatggaggaacctgggagggagggggattcccccgggccgccgtgggcgccaagtgagtcctcagctttccgggcgttcgttacggcggtgggggagcgggcggtggcgtcgccttcaggctcggacaatggggattccgtctgctcaagcaacctccgcgccgtcaggaagagaccttttgttgcaagattaaccacatatatcatccaaacttttgaaaaatgcaatcctgagtttaagtactcagagtcactaaaccccaagcgctttctcaccaatcccgcagttcctgttcacaaccatggtcttgacaatgcaaactctgatctcatattgtatgtcaacctggaactgcttaataaaaagtcaagccggaggtatgttgtccaagaaatgcttggccaaggtacctttggacaggttgcgaaatgctgggatgcagaaactaacagttatgttgcagtgaaggttataaagaatcagcctgccttttaccagcaggctatcatggaggtctctttattaagattgttaaatgagaaatttgatcctgatgatgaacatcacattgtccggatgctggattttttcctctaccaaaaccatttgtgtatagcctttgaaatgcttggtaacaacctgtatgagctgttgaaaaggaatagtttaagaggtttgcaaatgaaatatgttcgaactttctcaagacagatactggatgccctgattatcatgaaagatgctggcattattcattgtgatctaaaaccagaaaacatccttatagctccaactgtaaaaacagcagttggagtgaaagtaattgattttggatcagtgtgcatggagggtaaaaccatttattcatatattcagagccgttattacaggtctccagaagtacttcttggttatccatatactactgccattgatatgtggtcattcggttgcatcgttgctgagctatatatagggctgcctttatttcctggtgcatcagaatatgatgttctttgccgtatgattgagattattggtgggcaaccaccagatgatctgctacgtgaggctaaaaacactgggaaattttttaagcatgttggaagtatctatcctagtagtgaggctcggaatggcgctagcagtgcatacagaattttaagtgaagatgagatcgaagcaagggactccaagaaaccgaaggttgggagatggtatttccctcgtggaaggcttgacagactcatatatacatacccctggaagaatttgagcgagggaaacttgccagagacagaaaaggctgattgcttggcattagttgatttcttgagaggacttgttgagtttgatcctaataagaggtggtcaccgctgcagaatcattatatgttcttcacaaatgtgaaaacctattttaggcctcgtatcatccattcatcactggtgaagccttcactggtccttacgagcctgttcaggagaccccacgaattcctgttggacgtgctgcagtagttgaccacaatccaggaggaggtcacttgctgggtgctggtctttctcctcaggttggaagcattaacagatgcttacgatttaacaacgctttgcaaccaaatatgcctttttcatatggaagcagttgtggcagttttgggagccatggtagctttaacgataatgctggctttagctatggaagctatgattttaacagtgtcgacatatataattcaccaatggatccttctgggtttaatttacgttcacaacttggaggatcgtttctcggatctagcccacatattcgacgaagacctcatctctcacatggtggtggcattcggttaagccctggtggtccagggcatatgtctcttggggccagtccatcacaatttacaccgccaaattcccagatgcaaatcccaacaggtcctaatggaaggtatggtgcctctccttcaagaggtggacatggctcttcgttgggaaaggttgctgttgtaggccaatacaataggaggaggaatcagggttatccacctatgccaatgccaccacatgaacacacatctcaactgatccaggggcaccaaggagatggtgtcagtactgctcgctttggtgcatatgcccaaggaaattctacctacctacataatgcactccctaattctagtcattatagttggagatcgcaaaggggatctggcagtggtttacctttggacccttcttctagccgtggttcttttccacccaccaattactatggctttcctttacactccgatgcgtcagcagatacattgccctccacctcatcagtatcagatccagccgattgggatctcaactctagtgacaagtcactcctgcaagaggaccgaacactgtcagctgggttaagtgatcttcgcttgatagacgcaagtggccaaacaaacagatctagcagattggctcctttccaaagtcatgatattttaagttcaaacccttcgactatgaatcaaagaaatggacacctatttcatgcatcatctctgggagagagtacacatactccaggtcatgtcacattggatggatacgaacacacaacttattctcagcgaagtttcccaatctatcgtgggcaaccatttcagcagtacaacaacatgacttccagttacatccgaccgatgagggctcatcacaatggtcagcctgtctggtctaattataggctgacagaacctccaccaactacaatgggtgacggaatgctctggggagggaggggtggccattcgtttgcagcgagcggactgccacctacacttaggaaagattttgggagaatcttttagtcctgaatccggaggaatgccgaatgccaccaaattgatggcatcagttgtttgcatctgcaattccgggttggattatttgctgggggtgcctactggtattgcaatttgttgtgttcctccgatgtctcccaggatgttcggttcaaatgattatatggtacgggatatgattacagtgctcgttctttgctatacctgcacgatctagtagaaaaatgtcagttgtgctacttgatgcgaatcttgctagttcgaggtttgggagagtttttctgtctcggttattgtcttcctttctctattctatttttgacagagggttaagttcctgaaccttaacatggctaagactgaagtgaaggccacgtggtcgtggtgacatgatttcgttttcgtgatacttgaggagccgactatctgtttttaagcatctttctgttgttgttttgctacaacaggttttctaagggcg

SEQ ID NO: 24886 - DNA, 972 bp, Zea Mays
tcacgagtttccgtttgtctcgaggctcttctgaggaggatcaagaaggtagcggaggagagaccgagctccctgaagttgatgcacatggtgtggaccaagagctgaagcaccatctcctgaagaaatacagtggctatctaagctcgctcaagcaagaactgtcaaagaagaagaagaaagggaagctccccaaggaggctcgccagcagctccttagctggtgggatcagcactacaaatggccttacccctcagagactcagaaggtggcactggctgagtctaccgggcttgacctgaagcagatcaacaactggttcatcaaccagcggaagcggcactggaagccatccgaggagatgcaccacctgatgatggacgggtaccacaccaccaatgccttctacatggacggccacttcatcaacgacggcgggctgtaccggctcggctagccaccggtatctcgcttccatttcacaccccacggcctagctataaagactaatggttccaggtgtctgaagtactgaagacaggggggctagctatctaatgtttgtgccgcacgcatgagctgtaaggaggccatgcttaattattctgttgccgttgctactctatctatatgcgcctatgcctccgtgcatgaactatgctttaggtggttgctgctccacactgtggtggtgtgcttttgcttttgtgtggtcgtattgtatgcgtaacctgacagatggatccctgattgctacatgtttgaataatttgcatgatctagctagtttctgcctaatctaatggtacggctcatgtcttgtcaggtggatttgttatgtgttttttttttcaaattgaggcttgtttgttttgctctcaatccatccatgtgaattgggtggaattaaatgagtttaaattccaaagtcagtcaaaatctgttataattcttccaatccataaccgaag

SEQ ID NO: 24887 - DNA, 1317 bp, Zea Mays
tttctgtcgagcgtgtaccttcagcagtcagcactatctcaaactaagtgaatcggagtcaccatgccaaacctgtgcggttcaccgcaaaagacctcctcctcctcatcctaaattcgccaagcaatgtgcgatgccggcttcgccaactgtgattccttatgccgccgaatcccatcacctcgaaatcctccgtagtagtctttgcggtgacctcttttgttgatgtcccacccactgtcgcagaaacaaaactgaacttccttaagtcatacaaacgcccaatcccaagcatttacagtgcagtcttacaagaacttttggtgcagcaacacctgatgagatacaaaaaaacctatcagtatgatgctgtgtttgctcttggcttcgtcactgtctatgatcagctcatggaagggtaccccagcaatgaggacagggattccatcttcaaggcatatataacagcattaaatgaagatcctgatcaatacagagctgatgcactaaagatggaagagtgggcacgttcccagaacggtagttccttagttgatttttcttccagagatggagaaatcgaggctattctgaaagatatatcagaaagggccaagggtaagggaaacttcagctacagccgattctttgcagttggcttgttccgtttgcttgactttgcgctgcactaaacgtcagtaaaagaagtgtggatagggaccttgatgtttaccgcaacatactctcaaagttggttcaagccaaggaacttctcaaggaatacgtggatagggaaaagaagaagagagaagaaagatcggaagccccgaagccgaacgaagctgtcacaaaatttgatggaaacctttattccacaaggcattagaatcagccctttgcagaggagagtttcccaggataacagaattaacagtaacatctggaccgtgttgagaaaccaccaaatgttcccctttcatcacagacgtctttggctgctcgtcttgtgatgtagcattctgccgtacaaaaggatccagattattcttactactggacagatatttgtattttctcatatgtcttgaaatcaaatgtatacattttctgtgtgtaggggtcaatgttactcaagcagagaaatatagttttctcttttgtatttaaattcaggtaatttgggaggccgtgttcacttatatataatatagtgtggcaaccatgaaaacaattggtgaagttctttatgtgagtttgtatgtaccgggctcagcactgaaaaatatctgaggttgaaaagtcttaacagccggcttt

SEQ ID NO: 24888 - DNA, 2570 bp, Zea Mays
cgcaggaaccgaaacgaaagcgctagacgtccgccgtcccattcgctttcccccaaggcctttctatctgcagccggtgcggcggctgtgctgtctgcctttctcccgtctccgccaaccgctccgctagccaccacgcccgccgctttcctgccgtggcctccgtcggggttcctcaacgggtaacccttctgccttcaacgcctccaccacccatcgctcgcatgcgcgtcgatcccaagttcgcatcaatattatttggaagtgcaagccactaagtgaggatgagttttttcctgctatagaagacaactactatcggccaaggaagttctactttgacctttcctatgagcaggttgttcggctttatgaactgtttggcaacaagagagtaggacgccctattcatgactatcaaaaaaatgagtgtttgcaaacaaaccgctcaagcaaagggatacctgacaaagaaagcttgactccagatcctcattccagtaatcaatcacgccttttggttcccaacatttccgaaatcataagatattctactcctacaagcatacacacagatttaccacttaatgttgaggcatacccaagcacgttgatgcccttgggaactgaagttaatggagccaaaattgctcccaccttcagctcccatagtgaccaaatagaacctttttctcaaagtgagtttttcccagctgcttcaatgacagatgctgtttcaactcaagtatctgccccttgctctgaaactaataaccagttggttgggcaatcacatccattaccgcacaactatccacagaatattttttctgctggatttacagcccaggacccaattgaaggatctaaatttgttgcaaaccaattgtattcattatgtcgtgattatatgcacgatggcttgttaacttctggatatggaactcaaaatcgaacttacaaagggatgaatcacttgaattcaacttgtcctccatatgacccattacatccttttttgccagtgtcaaataatttcgattatcaggctcaatgtgacatctattccaaccaaggctgccctgatacatgtaatgacatatgtgcatatgagtgtgagtgtttaagtgaagaagtggtagcagcggaggaactgaaccaacgaggtatttctacatgcccacaagttcttggatgggatgggaaagcagtatcagcaattcatcaacagaatatgtgttctactgattactttcagatttctgatcgtgatgaagactctgaaaatgatcagatgaaacatggtactcatagcaatgcttcagattcatcagatcgtgaaaatggtattgttgatccacgacatacacaacatgctgtaggaactgaaaacaacacaaaggatcagtgtagccagccaaaaaaaggtgtattttctcgcttatcagtgaggaaggaactgacttctcaagatgccactggttctacactcaaccaattggtttcttctcttgttcggaagacagaacagtggagccacaacaatagaccgattgaagatggtctcattattcctttgattggggagcaggctgactgttctcatgcagcgctgaacctgctgagtgaactagagctggataaagacgtgagcatagagccacaacttcccttcttgaacttcaagagacgcagtgaagcagggaaggtggatgcaaatttaggaaaggagatcagtgggaaaatgaagagaagaaagcttgtgcgtccttccttaggagaaaacaatgattctacaaattttggagagcagcttataggaaattgcacacaagacaagaatcaaaaccatcaggaaagtgaaaaccattttgacattgacctaaacatacctgcagcaccaatagacgacggcccagtggaggttaacagaattgcagtgtgtcctagtgttgttatcaaggtacaaacagagaaaccatatgaaatagatacaaacaaggtaaactcaaatgtgatggagacaactgaagaacatgatccatccagtgcacccacacaaaaggttatccctgattttaacatggcagacttgaacacaatggatgaatctaaacttcgcacaatcctcgagcatacatcatcattgttgcaagcacttgctgaagtaaaaaatggggagtccaacaactgtgaacaggctaagtcaagctttgaagataagaaagtaaacatggcatactctgacggggccaccaaatctgagtgcgattagcagtagctgcaaagatattgatgtttatacgctaaactggtgcccgtcagtgcatgcagtggctttatccttaatcatagtaatattttttttgggttttttttggggtgcgggtgggagtgggattggggttttatcttctggaagagggaagagtgactatccccactcgttggaacctgaaagactagccatggaaccatgatccgtctaatgcgaagatgttctttaaattttgttcatatactcttgttactgcaattttagcgacaagaaattattgaattttctgcca

SEQ ID NO: 24889 - DNA, 1229 bp, Zea Mays
taagaaatgccaacaatttctttatgaaaagcaccgattctttttggagcatccaagttgcaaagtttatggccagaccgcaagcaaaaatcatcacaacgagttaacagatcttggcatcatcccctcattgaaaggcaccactattcatcagaaggttccacatgttattttctgcgctcccccgtctggttcagatgattaccctagggatgtcagggctagggcttgggacctgctatgtttagacaagctcaaccatcacagtatcatgcatagtgacagagaaaggggctgtaaaacatgggtgatttctcaattcttgagattggcagcatcaaattggactggtgaaggatctttcctgtttacatcaagtacagctctgtatgattgcagtgacaacagcatgtgcaacgaggattgtctgtcagtgccaattggcaggagccctcgtactgatattcttctaaaagtggaaaatgttgttcttgaggcaggaggctgtgttctcaggctggctggactttataagatagacagaggtgcacatgttttctggttgaggaaaggaactttagacacacgaccagatcatatcatcaaccagattcattatgaggatgctgcctcccttgctgtagcaatcatgaaaaagggactgcggagtcgaatatttctgggttgtgacaacaagcccctttccaggcaagaaataatggatgctgttaacaatagtggaaaatttgacacgaagtttggaggctttactggtactgacggtccattggggaagagaatggagaattcaaaaactcgggctgagatcggttgggaaccaaagtatccaagcttcaccgaattccttggtatcagcagttaacatccttgcatactgttcagttagtctgactcagctgagtagcaaccgtgattagattgtaccatcgtttgaatttttatggcctgaaccggtgatggtgtacatctcagcctactttgggcctgtccccagtatttttgattttcacactatttgagctatgaaccagacagatgccaccccatcccatcggataatatatattgtcacgtgagtggatttgtcgatcatgaacctacgtggctacatatggtatactctaccgactatcgcgctgcaaattgatttcaacaaactgaaattgttgcagagaattgacagtcaactaccgaataaacgaataatc

SEQ ID NO: 24890 - DNA, 3169 bp, Zea Mays
gggatagagagttattaaatttgaaagggccatttacaaagtatagtgaaaatattttttccttctaataatagccaaatttacttttacaaaatgatttagctagtctcttggagttgctgttaggctgtggctagaataccgtatatagtcatacaaatacaaacaatgacaaaccgtattgtttataaagttggatttgaaatagaagatgagataagtaatactactaaaaataccttagaagagtagcttagaatacgagtgagtttgtttataggtacgtgagaactgtgtctaaactatatttggaaaatatacttaaaattcaatatataaattaaagtaaggcataataatcaagaagaaagacaaaaacaattaaattcagtcaagacaaaaagcaaagaacctggtctgaaatggcaaaatatgttaaccaggcgaaaagcatacaatcatatgggtcgaaagaactaactgggccgtgtggtctgctgttagatacgagcatagactacaggctcaaagttccaattccaacccacccgacgtccgacgacagctggtccgggtctcctccatttcccggggacccgtccgatccgatcccagtcctcaacgccaacggtgggagatctagatcggagctagccagccagccggccgacgctgtccgccggccgccccggcgattctgacccgagatggcggtcgtccctgctgcagagaccctcgacgggctcaaggacaggttcgatctcggggtcttcgtaggcgacctcgccctcgatgaggaagtcaccagtgacgacgagtccctggaggggctgcagcaggagcttgacaactgcaagaatgaccaggaagtcgcaaacattctagccagtggcatcaaactgcgcgagtacacaaaaggcgtcgagaataacatacgccaaatcgagctggattctatccaggattacattaaggaaagtgaaaatctagtttctctgcatgatcaaatttgtgattgtgacaatattttgttacaaatggaaacagttctgactggattccagacagaaattggttccataagttcagagataaaggtccttcaggagaaatctatggacatgggattaaagctgaaaaatcgtaaggctgcagaatctaaattgtcaaaatttgtcgaggatataatagtacctccaagaatgattgacataattgttgatggagaggtcaatgatgaatacatgaaaacacttgagactctaagcaaaaaaatcaaattcatcgatgctgaccccatggttaaatcatccaaggctctaaaagatgttcaacctgaggttgagagactacgacagaaagccgtctcaaagattttcgagtttgtcatccaaaagttctatgccttgagaaaaccaaagactaatattcagattctacagcagagtgttcttcttaaatacaagtacacgataaatttccttaaggaacatgctaaggagatatatgcagaagttcgtacggcgtatattgacaccatgaataaggtgctaagtgcacatttccgggcttacatacaagcattggagaaactacagatggacatagcaacttccactgatttgcttggtgttgaaaccagaagcacaggcttcattttctccattggaaaagaacctctgaaaacccgtccttcagtgtttgctctgggtgaacgaataaacattttgaaggaaatcgaccagccagcattgatacctcatatagctgaagcgaagtcacagaaatactcgtatgaagttcttttcagaagcttgcagaaacttcttattgatactgccacttcagaatacctgtttactgatgatttctttggcgaagaatccatattccatgatatatttgcaggaccgattcaagttgttgatgaacatttcaatactgtactcctgaactgttatgatgcaattggcataatgcttatgatcagaataattcatcagcaccagctcatcatgtttaagcggcgaatcccatgtttggactcttacctagacaaagttaatatgtcactctggcctcgcttcaagatggtgttcgacttgcatttgaacagcttgcgaaatgcaaatattaaaacactttgggaggatgatgtccatccacactatgttacaaggagatatgctgaatttacagcttctctagttcatctcaatgttgagcatggggacggtcagcttgatctaaatttggagcgattgcggatggccattgaggatttgcttgttaagttggccaagatgttttccaaaccgaagctacaaactgtctttctgataaacaactatgatttaacaatttccattttgaaggaagctggaactgagggtgggaaagcacaacaacacttcgaggaggttcttaagagcaacatcgcaatatatgtggaagagttgctcctggagcagttcagtagtttgatcagattcgtcaaatctcgtccagcggatgagacggctgcaaattccgagaaagccagcattgccgaagttgagccactggtaaaggatttcgcgagccggtataaggccgcgatcgagctgatgcactatgatgtgatcacatctttcagcaactttctttgcgggatggagatcttgagagcgacgctcgcacagctcctgctatactacaccaggctctccgagtgtgtcaagagaatcaacggcggctctgctctcaacaaggaccttgtctccatatcctccatcctgttcgaaatcaagaagtattctaggacgttttagttgtttcacccccttccatgtacactaggacggctagctgaggggtagctgtgtatccttactttgtaactggtatgtgcgactgcaggggaaacaagggcattttgtcgtggtttgtatcttcgtctgtgttacccgacttgacccctgcccctttccagcacagaactatgatctctaggctgtctccacagttatcctattctatcttctgtcctatcatctattttaaacttcattttgtaaacagtatcgattatagtgcaaatctacaattttatacgatccgctgtggataaccatatgctgcatactaatgaatgcgtaccaaacgcttgccttaatgttatttttatgac

SEQ ID NO: 24891 - DNA, 2412 bp, Zea Mays
tagagcctcagcatttgccaccccttccttcccctaatcccctcctcggtcaaaccgcctcactctcctactcttctctccctagtccctacccggctctctccctcccccctctctctaaaaaaagtagcgcccggagaaccgagaggctggagaaataaaggcggaaagagggagggaaatctcactttgttggggattctttcctccgtttccgactcctttgttctcttaagtgttcttggaggaattcccgttcacatgatccgtgcctgtacctgacgggccttgtcgcgctctgctgcttcgctttcggggagaggaggactcgactcaaatcacttggtagcggagacgtcgccctttctagttcagtcgagagatatttctggcatggccggcgcaagcaaccatggatccctcaccgacgaatggttgccgccccctacaccaagcccaagaagtctcgtgtcaagctttctgaatgaagaattcagccccgggccattctctggtcttttcagtaaacatggcgccaatagaccccatgatcaatccgaaaagggcagaggagctctgaattcgagcgaggagttccctactcatgctgtcaaagacccatttcaaaagggtttctccctggagccaaatttgttcagtgctaatcatatatcaaactccaatggtggtttggcagagcgcagggctgcaagagcaggtttcagtgtcccgaaaattgatacttctcgagttggttcatcagcagttattcgatctcctgtgtcaattccacctggtctaagtccaactacactactggagtctcctgtttttctttacaataaaatggcacagccttctccaaccactggcacgttgccatttttgacggctacgaatgataagtcgacaataccaccagctaccaagataactgaagattctgcagtttataatgatgtgttttctttccaaccccacttaggttctaaagaaacaggtttctctactgcagaaaaggactatggcgcctatcagcaaaagcattcattgtggaatattcatcagcaggaatccagtcttcagtcaagttttaccgcagtcaaggacaacactagtgcaacaattggtgaaacgaagacatctagctccatgttcagtgatagtcactattcagctgaccaacagcaaggtgaagagacaaacatgaaggagcaaggcaaaggtgtcgaggctagatcagctgcttttcttcctgcaccagtgcataatgatgcatctctcctggattctcaagatgcagttgatgtctcgtcaacgctgtctaatgaagaggacgagagggcaacacatggcactgtttctatagagtgtgagggtgatgaagatgagactgaatctaaaagaaggaagttggaattagatgctttaggagctattgctattgctactacctccaccaccagtaccattgacatgggccctgcatcctcaagagctgtccgggagcctagggttgttgttcagaccacaagtgaggtagacattcttgatgacggttatcggtggcgtaagtatggacagaaggttgttaagggcaatccaaatccaaggagctactacaagtgtacacaccctggctgttcagtgcgcaagcatgtggaaagagcatcacatgatctgaaatcagtcatcacaacatatgagggaaagcacaaccatgaagttccagcagccagaagtagtgggcaaggcagttctggttctggcagcggtccatctgcaccacaagctggtggttctcaccgtaggcaagaacctgcacaagccagcttcgctcactttggtacatctcctttcagctccttcggtctcgcaccgagcggacagttgggaccaacaactggtaatttccgcttcggcatggttccgccaggcgcgacgatcccaatgccctctctaggatcacttgcccctacaaaaatgattggaaatccatcagctatgcaggggtacccagggcttatgatgccaggagagccaaaggtagagcctttctcgcgaccacacttcccaacgtcaattgcacctccgccagcttaccaacagatactgagcaggcctccttttggtcatcagatgtaaataataggaaggggatagatttgcttcggcttgtatacatgatagctacgctgcaacatggctttgttctagttttgttgatggatcgtccgatttttacttctttttaaattttcagctcacggctcacgcatttctttgaagcaaagatggctgaggatgataccctgtcgtgatgtgtaatcagggaaaggatacttttcgtccttttgatactatcgaaatttgaaaatgatcaatccgattttttagttgtggatacaaatc

SEQ ID NO: 24892 - DNA, 2386 bp, Zea Mays
ttccagcgtgcgccgaggctgtacgcgctctgcgtcagcctgctggcctggaacaccgtcgtctactcgctcacgttcctgagtgctgcatctgccttgcgtagtacggggagaaggaggaggttcggcagctgccgtgcacacacgtgtttcatctcaagtgcatatacagttccagctaacaagggaaatcaaggaagaattgatctttatattagcaggcggatgcaatcactaatcaaaaccacgatgcaaggtaacctaaatggattttaaattttattttggattgttaaatctttatttctgactactattgttttatgtcgtggatgccctcgtgaggttctacgccgacgccttcaggagggattcacagaggccatggtgaggatggccagcttgagtcggctcaccgggagcagcgcgagatccgctacaactaaatgataggaggtattttctagaaattacaaccccacctctgtcaggccttctgttgagtgaatttggtttgcacaccctcaccctgcacgctcttaccggactaccgctcctagcacccactcacacgagattgcaccccgctcgccatgccaccatagatccagctagggcgacatcattgtgggcaatcctgtgcgagagaatgtgaaattgttgtaggattgataatgaccaggggtttctccgcccacatgcaccaggtttcgctgccatttgcagcgactgtgttccagttcgaccgtttggggaaaaggcaaggaaacaggatctgtcacggaaggtatgtacacattacagtaaacgttgttcgtagaacatgcactttgtggagtggtctttgaatgagatgcgtttagaattaccttttcatgcagatctcttgttcagaacctggttgcttagtccattcttgttttgggttgctactacaaaaaagcggcaatgctttatatgaatcgcctcttactaatatccagggtcaaatggtggtccttcagtgaccagactaatatttgagcattaatcttatttgtttcacagtcatttcttgtttatcaatatgaatgctatttttttgcgagtggacttgttaactaataagctcatagatatttgaacaaaaaatagtgttttgttctaaaactgtcataaagagtgcatacatcatagctatggtttcaactgtgatttgatgtcctataatattgagtgtcctatagtgtgttgttctgaaacagtcacaaagagggcctaagaagctgatggaatcctcattcaccgccgctaaggagtttgagcgggatcggagaggagacgtcagttcttcctcctctgctcaatgcggccattcgccctgtcccccaaccctgaactccacactgccactccgtgctcattttttctgaaggggaaatattcatctccttgttgttttgtaccatggatactttagcatcattctcatactactaggagtgtaggtaaggagtccacacacgagtttgcaaacaccattaagcctattttgcttgattagtgccctgcaacacttcatatgttcaagacaaaatccatacccatgtctattgttgtatgatattatttgcattgaccgttgctgctcttcttgattgcagtcactaacattgcattaatctatgtgatacatttattcaggcgattcccatttctcagtgatgtcgatgtcctgtactcctgtatatttggattcaacaatatgccattagtgcattggtgccacaacactggatgagtataggaagcatatagagaaagatcctgccttggaaagaaggtttcaaccagttaaggttccagagcctactatggatgaaacaatacagatcttaagaggacttcgtgagagatatgaacttcatcacaaactgagatacacagatgatgctttaattgctgctgcacagctgtcttatcagtatatcagcgatcgttttctgcctgacaaagccattgacttgattgatgaagctggatctcgtgttaggctgaggcatgcgcagctccctgatgaagccaaagagctggacaaagagctgcggcagataagcaagcagaaaaatgaggctgtacgtggccaagattttgagaaggtatactgttgtttggcacagcggtgacaaagccgatccgctcccacctctctagcaacgtcgatatggttaataccaagcattatgttgtttccttttgagataaatattttgttactgattttaccttttgtctcctcttcttgttttttgttctagaatctgtagcaaatggctaacgatgaggatatccattactttgtttatgacaataaaactgatatgttcaagattccgtagcaacgcac

SEQ ID NO: 24893 - DNA, 2134 bp, Zea Mays
tcagcaccctccctgtcgccagacggcccactggctgtggctggctcacttcactcggcgctcggcggccgcacccaagtcccaaccgcactgcgccgcctcgatcaaagcaaacccccaggcccccaacccgcccagcgccctgcccccccgccgcagtgagtgagatgatcatcggaggggcagcgggcgccgggaacccgaggaggaggaggacgcaatgaaggcgcagccgctgctaccggcggcgctcaagaggcggaggggcccgcgcgtggcggtgcttgcgctcgtcctctgctccctgctcgtgcccttggccttcctcttcgaccgcgccccctccgggtacgtgacgacggaggagcggcaccgacaggaggtcgttctgccttcgttggatcacgtggagaagaggcgtcgcagtggcgctgacagtggagagcgacaggatgcgccggagaagatccccagaagtagtgcaggaacgattcatcaacgaacaccagagaagaacatctccaaaggcagtgctgcagtcattcatcaacaaacaccggagaagaacatctccaaaggcagtgctggagtcattcatcaacaaacaccagagaagaacatctccaaaggcagtgcaggagtcgttcgtcagcataagcaaattggtagcaacacgacaagggatgatgctaaaccaaaagtttttgcagcaccaaaagttgaaccatcagcggatgtgacggattctactaaagtcgcaagagtaatgatctgtagctttcaaagttgtactttgttgtttcagaactgctacttcatgtcatttcacaagtttcttattttaagacatcttccgttgaggttgtgttgaaaaatcttgcggcttctgtagtgatcaactcaactgtgagcagttgtaaggagccaggataccttgcttttcatatcctaactgatgctcagaacttttatgccatgaaacattggtttaccaggatttcgtataaaaatgcagctatccatgtcataaactatgaagcaattgttttggaaaaacttccaaagtatactatccggcagctgtttttgccagaggagttccgtgttctgattaggagcactaagcagcctactgaaaacactagaatgaaatatctgtcactgttcagccactcacattttgttattccagaaatcttcaagtatctaaacaaggtggttgtgttggatgacgatgtagttgttcaacgtgatctgtctttcttgtggcatattgatatgggagacaaggtaaatggcgctgccgagttttgcgatctgaaacttggtgaaatgaaaaatgtcttgggtaaaacagcatatgatcccgagtcgtgtgtatggatgtcgggggtgaatttgattaatttggataaatggagggagcataatgtcacagagaactatctgttgctcatgcaaaagttcgaattcaaggatgagctgtccctgcgagcagcagcatttcctctgagcttgctatccttccaacatctaatatatcccctagatgaaaaattgaccctggctggacttggatacgattatggaatcgatgaagaggttgcgcggagatctgcatcattgcactacaatggcaacatgaaaccttggcttgaattaggtataccggactacaagaagtactggaagaggtttcttgaccgaggagatcgatttatggacgagtgcaacgtaaatccgtgatgcagatggacccaagatgagaacaattgagtaaatctgggacgcagagctggacctgaaatcagaacaacatcagcaagccttaccgaagcttgtgtcgacgagaacgaatactagtggtgaagccaggattttttgagttggatattcccaacctgaaagtagtgtacacaagagtatatacggtagcataaatttgagtaaatgctggggactacgatccatcgacctccctctacggtaacaaaaaaattcaaatcagtcgacttcatcttacaaaatcttcatgaaatacagataattgtacatgctacgaaacgagataacaatgtcaattgcgctataaaatttggatttgggatatagagaagtgaattattgcacaaca

SEQ ID NO: 24894 - DNA, 3229 bp, Zea Mays
cctgtcctcccgtcgcctgcgagacgcccacggcccacctatctgcaggctgcagccgctcgccccatcgcgtcgaggacgccgcgccgccaatcgccgcccagctgccggtcttccccgcgcgacctaccccgtcgcctgctaccatgccaggccgggctcttaaatcctagctaggctcagccaatccccgcgccaggatgccgtcaacctcgggtccggttgccgtggcgtcggcttcggcgtcggcgaaagccgcgccgtccccggacgtcgggatctcgccggacctgtacccgtcggaggacgacctggcctacgaggaggagatcctgcgcgagcccttcaagctcaaggggtggtggcgctacctcgtggcccgcgccgccgcgccgttcgccaagcgcgccgtcatctacgagcgcgcgctcaaggcgctcccggggagctacaagctctggcacgcctacctccgcgaccgcctcgaccacgcgcgcccgcaccccatcgatcaccccgcctactcctccctcaacaacaccttcgagcgggcgctagccaccatgcacaagatgccgcgcgtctgggtcctctacctcacctcactcctcgaccagcgcctgctcacgcgcgcgcgccgcgccttcgaccgcgccctccgcgcgctccccgtcacgcagcacgaccgcatctggccgctgtaccttcgcctcgcttcgctcccggcctgccccgtagagacgtcgctccgagtcttccgccgatatctccaattcgacccctcccacgccgaggacttcatcaacttccttgtatccaccaaccactggcaggaggctgctaaccgtctagcttccgtgctcaacgacgatgggttccgctccgtcaaggggaaaacaaggcaccagctctggctcgagctctgcgatatcctcaccaaacatgctgatgaggttgccggcctcaaggtagacgccatactgcgtggtgggatacgcaagttcaccgatgaggtcggcaagctgtggacctcactggctgattactatgttaggagaggcctttttgaaaaagctagggatgtattcgaggagggtgtttcttcagtggttaccgtcaaggagttcagcgtggtatttgaggcatatacacagtttgagcagagtatgcttgcggcaaagctcgaggctgctgaggaagaaggggctgaggatgtgaacgagggagggggcaagaagagcgggatcgataatttatcgaagaaattcctcgatggattctggttgaacgacgaagatgatactgatttgaggatggcaaggtttgagcggctgttggatcgcagaccagagcttcttagcagcgtgctgttgcgacagaatccacacaatgtggaggagtggcacaggagggtgaaactctttgaaaaggatcctgcaaggcaagtagcgacatatgttgaggccgtgaaaactgtagacccgatgaaggcagtcgggaagccccatactctgtgggtggcatttgcaaagatgtacgagaaacacaatcgtctagatagtgctgaagatatcttcaaacgggctactcaagtgaattataaggcagttgaccacttagccagtatctggtgtgagtgggcagagatggagctacgccacaacaattttgacaaggctattgagctgatgagctgctgctgagggggatgagcctgtccaaatgaaagtgcacaaatctttgaaactgtggagcttttatgttgatctggaggagagccttggaaccttagactctacacgtgtagtttatgagagaatactggatttacgaattgccactccacagataattctcaattatgcatatcttcttgaggagcacaagtatttcgaagatgcatttaaagtgtatgaaaggggcgtgaaaatattcaagtatccccatgttaaggccatttgggtaacctaccttacaaagtttgtacatagatacaagagaagcaagttagaacgagcaagagaacttttccatgaagctgtccaacaggctcctccagaggaaaagaagcccctatatttacaatgggcaaaactggaagaggactatggtcttgcaaaacgtgctatgaatgtatatgatgaatctgtaagagctgttcctggcagtgaaaaaatggccatgtatgaaatctatatagcacgtgctgccgaactctttggtgttccaaggacaagacaaatatacgagcaagcaattgaatctggcctcccagacaaagatgttctgacaatgtgcatgaagttcgctgaactagagagaagccttggtgaaattgatcgtttcgcgtgccatctatgtgcatgcatccaactatgctgatccaaataatcctgacttttggaagaagtggaatgactttgagattcagcacggtaacgaagacacattcagggagatgcttcgtatcaaacggacagtggctgctagccgtagtcagacacatttcatactaccggagtacttgatgcagaaggatcataggttaaacctggacgaagccgttgacactctgaaacgtgctggcgtccctgaggacgagatggcagccttggaaaggcaactggctcctggaccatccactgcaccagcagcaacaccaactgccccagcctctgctaacaggacgatgaattttgtcagtgctggagtagaggcgcaggcagacagcagcaggcaacaggctggtaacaacgaggacattgagctgcccgacgagagtgacgacgaggaacccgatgtccaaattgcggagaagagtgttcctgctgcggtatttggtgagctcggcaagagagctgccgagaagaacgaggaaagctcaggtgcccaaggaaatgagcagctgggcgccctcgagaggataaagagacgacgccaatagtaagccgttgctaagattgtgcagccgtggtatcagcacgagctttatttaacgatgttgtacttgttacgtgtaaacaatttctttgtacaaacattgaagggagttgatcggcgtggccatttctgtgtagtcttgggtttgtttcttctccctcgaaagaacatgacaccaaaacatcatttctttggttcgtttctagattttattcgtccaaagcattagacgtgaagaaagccatcaatatcatgaaaggacaggcaacgtccgaaatcatgaaaggac

SEQ ID NO: 24895 - DNA, 1471 bp, Zea Mays
cgacaccgtctctggccggttccccgtccaggttcttcctccggatcgtcgcattaccccgatcctgtattcccatcgaccacacctcatggctcacgcgaataccacaccacacctcacggcgtccattcgttcccgtctcgtcttccgctgcttgcctccgactcccccacgcgtcgtctcgtgcttcccaatccccatagagccggttgatccccaaaggcccatggttttctccgacgccgcgtcgcctctcgtagccactgccgctgactctgcttcctcctgcgtcgcccacctccgctgctgctgtcgcgttagttgttgctgttgttgttgaagacgcgttgctcgctagggttcgtgatttctcgccgatcgattcgggaactggtaagctatggatctctcgcggcccgcatcgtcagacctctcgctcgggctgcactcgcatgcccacgcccacgctcgcgtgcacgcggcagccgcgccgctgcgcctgttcgacgacgcgaagccggagcgcctcgtggccggtgaggccgacgcggagagggacgacggggacgggggcgaccagcacttctccctcctcgggcactccctctgcgtcaagcgcccgcgccgcgccgtcaacggcggtgggggtgggggcggagagacgtcatcctgctcgtccacgtccccggcgctgcgccccgccaagcggcaggcggcgggggaagatagcggcgcggatctggagacccgccgcgccgcggtccgctcctggggcaaccagtcgctggcggaggccgacccggatgtgcactcgctgatggagcaggagctggcccgccaggtgcggggcatcgagctcatagcgtcggagaacttcgtctgccgcgcggtgctcgatgcgctcggcagccacctcaccaacaagtactctgagggggccccgggtgctcgctactacggcgggaatcagcacatcgatgccatcgagcggctctgccatgagcgcgccctcactgccttcggtctcgaccctgcctgctggggcgtcaacgtgcagccgtactcgtgcacgtctgccaatttggctgtctacactggtcttcttcaacccaaggaccgcatcatggggctggagccaccgtcgggcggccatgttagccatggttactacacgcccagtggcaagaaggtgtcaggtgcctctattttcttcgagagcatgtcgtacaaggtgaacccacagactgggtatattgattacgacaagctcgaggagagagcaatggatttccacccgaaaattctcatatgtggtgggagctcttaccccagagagtgggactttgctcggatgagattggttgctgataagtgtggtgcagtgcttctttgcgatatggcacatatcagtgggcttgttgcagcaaaggttagaaggcttttgttgccatttaggttatcatttcatgca

SEQ ID NO: 24896 - DNA, 930 bp, Zea Mays
caggattatatgcttagatggagttcagtttaggtggcttctatataagaaggcctcacaagtgctatatctacattttgcattgaagagacgtgcatttcttgaagaattccatgagaaacaagaacaggtcaaagaatggcttcaaaatttggggataggggagcatgtgccagttgtacatgatgatgatgaagccgatgatgtgcatgttccttcacagcatgacgaaaactctgtcaaaaacaggaatgtcccttcaagtgctgttttacctgttattcgacctgcccttggccgtcagcaatcaatttctgatcgtgcaaaggctgccatgcaagaatacttgaaccatttcttgggaaacttggatattgtcaactcaagagaggtctgcaagtttttggaagtttcactgttatcatttctgccagaatatgggcctaagctaaaggaagattatgttacagcaaggcacttgccgaaaattgagatggacagtaaagagagatactgttcatcctgttgttttagtttttgcagtagtagctggcaaaaggtttgggctgtactgaagccaggattcttggctttacttcaagatccatttgatcctaagctcttggacataattattttcgatgtgtcaccttgcactgatagagatggagatgaccaaaccactctagcaaaggagataaaggaacgtaatccattgcattttggatttgaggtatttcgtttccatttatgacttgcttggtctagcatcttgacatatcactccaatcaaataactaatattagagtctctcccgtggaattattatgttaccactcgtacggttctaccaaacaagtagactaaatgagtaaatgggtcctttagcataatcatttttttgggtcaattttgggttcaagtgcaat

SEQ ID NO: 24897 - DNA, 163 bp, Zea Mays
taaaacaattagatagtttgattcattggaaatccccaattgttgatgtatcaacagtacattgtatcagatcatagtaaacgagttgggtaacttactagcagattttgcaagttatcgatgacatcgagtgcaccagcacaatctgcagctgcaacaagct

SEQ ID NO: 24898 - DNA, 2287 bp, Zea Mays
atatgaatttcatgatttaaatcatattatttttcattaacgggttatgaacaaggtgatctattcttataattcgagatgaactgaattttgtttttctttcttttactttagttacatagtcatgtatcaattatttttgaactaagccatacctattttctgtctctggtttttctgtggtaaggtatcttactgacaggtgggtctaagcccatgtagcactgaaagatctcagtggtgaagttgctatatatatcggaaattaaagcaatgttccccagtggagttgctatgtatatatcaaaattaaagcatgggcacattataacttgtttccttgttaatatttcataaggcacagaactcatggactaagcttgctgtggagatcgacagtccacaagctatgtctctggaccagttagccgatccagccaatagcacctgtgcacaagtaatccactcaaagtcagagatatgtagccacagatggctaccaggtagcagcaacagaaactgcaagaagcaaaaatacactaatgatgactttaagggaaaggacttggagataggtggccctagaaatttatatatggatcaccaatcttccccaaatgagagacccatcaaagcagcagatcatgaaaacaactccaaggagtcaatgatagaaaatttagaggagccaactgttcgagctgctgacctaattggttcaatggccaaaaacatggatacccaacaggcagcaagagctgcagaagatacccctaatttctcttccaaagtgccagaagggaaaggtaagaatgaccagcatgataattatgttttgccatcacttgagctgagtttgaagaggtcgagatcatgtggagatggtgccaacgatacagtcaatgacgatgaacagcggaatagtgcattaaggcgatcgaatctctcggcttttacaaggtaccatacatctgcggcttccaatcaaggtgggacaggattggtaggtagctgttcgccgcatgataacagctcggaggctgtgaaaacggattctacttacaacatgaagtcaaattcagatgctgccgcaataaaacaaggctccaacggcagtagcaataacaatgacatgggttccactacaaaggatgttgtgacaaaacccagcacaaataacgagagggtgatgttgccctctgctattaaggctaatggatacacgtcaacattccatcctgtgcagcagtggatggttccagataatgcgacagcagggaaagcgaaggctgatgaagtggccaacaatgcaggcagaaatagtcatcctggtgacgtgcagagcaacctgacgcaacaacatcgtccaacccttcattacgtccattttgagaatagtggatcaggtgccctgcaatgtggttcctccaatgtatttgatcccccacttgaaggccaggctaccaataactatggtgtgaaagccgggagcaactcaggcagcaacaaggggcagaataatgggagtacagctggtgcgagcacggctgctgcaaatgctggacggacagatacagagatacgggctatcgataaaagtggacctggaggtggcagtgggagtggcaatgacacatatgtcagacggcttgctgcgagcatgacaccacgacaagaacagctaaagaaatatagagagaaaaagaaagatcggaactttgggaaaaaggtgcggtaccagagcagaaagaggctagccgaccagcggccaagggttcgtggacagttcgtgaagcaagctgtgcaaaatcaagagggagatggagagagatgacccccccccccctctggcttcagctcatggttgttagacgtggcggttgatgattcttccttctctggtgtgatctgatatgatcgacaacacaccatccttccttttcttcattggtttcttcacatctagaatttactgcctgaccgggaaaaaataagctaggaacttctatacatgtgtatgcatttctaatcatgtagaagaataagtgtgtcttgactctagataattttaggtagagtcatgctcgctctcctacattatgtgatgtaactgaagtgttgttgtgttgtcatgtatggtcttggatcactttctgtcaatatattactagcccacaactactattaatttgatgagatgtatataattaaaaatattgtaatagtccttcctttggtaggtagacaacaaacaatcttgaattcagtgcatacataaatcactgta

SEQ ID NO: 24899 - DNA, 1528 bp, Zea Mays
tttctctaatttaaaaactccagatgaacctgcgtggaatattactcgtgcggatgaacccaaccaacttggccggagggtgaatggtgatacggtgaaggcagacgccgaaccaaaccaaaaggcgaaggcgaagaagaccaaccaaagcaaagccaacgggatctccctctcattccagaggactccgcgtcgtcaggcccgcttcgcgtgcgacgccggcatatagggtttcgccggcgccggcgatggacccaccccccgtgagccccgatcgctgggggcccagtcagggcgctggcgtcgggccctccggcctccgccgatatggcctcaatttctccgcctccagcctcctccaggcccccatcgcggccctccttgagtactccggcgtagtccagtccggccctgccctggcggcgcaccacccgtccgcggggccctcgtcgccgttgtcggcgtcggaggtcgatggtcttctctccgctgccgccgctggggacggggaggtttcgatccggattcagggcggcccaggcgacacggaggccacgggcgggccggatgcggggacctcgtccgaggatttgatcgaggcgaccgccggctctgaggttgaccaggcctccgctgcgggcaggggtgcaggcgctacggatgcggaggcaaacggtggcggggccggcacgtcggggaacgggggcggggaccgcgcgtaccagcgctacgacgtgcaccacgttgcgcggtggttcgaacagatattgccgttctcgctgcttctactcgtcgtcttcatacggcagcatcttcaaggtttctttgtcacaatttggattgctgcggtaatgttcaagtcgaacgatatattgaggaagcaaactgccttgaagggcgagagaaaaatatctgtactcattggtattacagtaatcttcatgattcatgtgtttggcgtatattggtggtacaggaatgatgatcttctcagacctttgttcatgcttcctccaaaagatataccaccattctggcatgcgatttttgtcatcatggtcaacgatacaatggttcgccaagctgcaatggctgtcaagtgcatgctgcttctgtactacaagaactgcagaggtcgtaactaccgtagacagggccaaatgttaacccttgtggagtaccttctgcttctttatcgtgctttgttgccaacttctgtttggtatcgtttctttctgaacaaggaatatgggagtctcttctcatctttaaccactggactgtatctgactttcaagttgacttcggtagttgaaaaggttcagtcattcttggccgcggtgaaagcactgtcacgtaaagatgtgcattatgggtcttatgcgactgcagaacaggtacttgctgctggtgatatgtgtgccatttgccaggagaagatgcatgtgcctgttctccttcgctgtaaacatattttctgtgaagactgtgtttccgaatgggccttatcattttgtgaagaagcatt

SEQ ID NO: 24900 - DNA, 1810 bp, Zea Mays
aaagcccaaccccgaacaggtagatttccctcaaagaaacaaaaaaaataaaacaaagataaatcattggggttgggggattgcaattgcaagttgccgctgtgcggttgcggtcgctcccctcccgactctggccagcagcagcgacggtgccggcagtcgattactccacgcggcggaggcggcggtagcccatcctttcccgttttctgatccagtcctactgataccgcgcacagcacgcctgctctattaaagaatgttttgcttgaggggctactggtcgccttcactagctccagtgagggaagggcctgttcgacatcatataaagttcaattctgtagtggtttgtggtgctaggggaccgagaccgagatatccccgtgtgtggaaaactcgtaagaaaattgggactatttccaagtcgcagaagcttgtcgaatgtattaaaggtctgtctaatgtaaaggaggaagtttatggggcacttgactcatttgttgcatgggaactggagtttcccttgatagtagtaaagaaggcactgaagaaacttgaggacgaaaaggaatggaaacgaataattcaggtcattaaatggatgttcaacaaaggtcaagggaagacaatgggaagctattacaccttgttgaatgctttgatcgaggatggacggattgaggaagcagaagagttatttggaatggtgttctcacgatatatggagggtttgcctcgtacatttttcatgagaatgatttctttctattacagcgtggaagcgtatgataagatgtttgagatttttgctgatatggaggaactaggcgtaagacctgatggttctattatcaggatgctaggtgatgtatttcagaagttagagatgatggacaaatatgaaaagttaaaaaagaaatacccaccaccgaaatgggattatcgacacatcaaaggcaagcgcataagaatcagagtttatcctgatagcaaccctgaagtggcggcaaaaggagaccctgacactgatgagctcgaagagttagaaagcacacaccttaataacgaattggatgaagcagcaagctcaggcctcgacaggagtgtattggacgatgcagcttctggagaccttgaatatataacccatgtcgtcatacttccaagacatctctgttttggtttgacatcccagaacccatgtcgtcatacttccaagacatgggcatcgctatcttctgaagtattttactacctagaatgagtagaaactacatgccaggctttgccatcagcagtcttttcaagacatcatggtggtttcaccgcgatatgtgttcttcagagtttggttacctgattcacttgcataaggctcatgcctttttgaatgcttccagccaggttaaaaacatagcgatggcattaggacctgtagtatctgagtgctttcgtgaacatatatggttgattgttgaaggcaatgtcctggacatcagacagggcagtagccattactatggtcctgtttggcacagctactgcttgttgaaaaagcagcttatctgagaagctgatgaaaagcagcttctgcttgttggctgcttttagtgtattctgagaagcagctgaactaataagctgctgtagaagctggctgtttggcaggacttctgcttaaatttgcgaagaagctgaaaataagctgaaaataagctgtgccaaacagggcctatatcatccggtatggtcctttgttcggcatggaaaggcgccatattttcaggcatgaaagactctattgtgt

SEQ ID NO: 24901 - DNA, 506 bp, Zea Mays
aggccgagcaagttagttctctttcaagaaaacaacaacaacaaaaaaaaacattttcaccctcctccatgcgttgcatctcaccagccattgacattgctttctcaagagcaaatatttatctctctctccccctttttttaaaaaaaagaagaagaagagaaagaaaaacaaccaccactcgattgcattgcattgcattgcaaagaaaggttttttgaggaagctggattcacacacagccatgcgttgcaatgcaaacaaaaggccgcctccgctagctggacaagaggatgggtgaatggccggagtcacccatcatcgccgtcgcatcgttctgaatgtgagctcaggataggccgccggttctttcggattggacgcctgtggcagcatcccaggtcacgtctagtctgaatctcaaccatattccagtcccttttccatgccaacatcactacgctatcacacactttccttatgtcagcttggtgagtgatcacagg

SEQ ID NO: 24902 - DNA, 2504 bp, Zea Mays
cactgcagtcaccttccccagacgacatgattaacaaaaggaacgggaagaattctaccagacttgttataagtgcagtggcaacagtgggagctctcctattggtggctttaatgtgtttctggggttgctttctttacaaaaattttggaaagaaagatatgcgtggtttcagagttgagctctgtggaggctcttctgttgtgatgttccatggagacctcccttactcctcaaaagacatactcaagaagctagagactatggatgaagaaaatatcattggagcaggaggcttcggaactgtttataaacttgcaatggatgatggcaatgtctttgctttgaaaagaatagtgaaaacaaatgaagggctagatcggttctttgatagagaacttgagatattgggaagtgttaaacatcgttacttggtcaatcttcgtggttattgcaactctccttcatcaaaacttttgatatatgattatcttcaaggtggaagcctggatgaagtgctgcatgaaaagtctgaacagttggattgggatgcacgtattaacatcatacttggagctgcaaaaggcttgtcttacttgcatcacgattgttcgcctcgaataatacatcgtgatatcaagtcgagcaacatcttgcttgacggcagttttgaggcccgcgtatcagactttggacttgcaaagcttttagaggacgaagaatcccatatcactacaatagttgcaggaacatttggttatcttgcgccagagtatatgcagtttggcagagccaccgagaagaccgatgtctacagttttggggttctggtacttgaaatactcagcggaaagcggcctacggatgcatccttcattgagaagggattaaacattgttggatggttaaattttctggctggcgagaaccgggagagggaaatcgtcgatctgaattgtgaaggagtgcacaccgagaccttggacgctctgctctctctcgccaagcagtgtgtcagctctttgccggaggagcggccgacgatgcacagggtggtacagatgctggagtcggatgtagttacgccgtgccctagcgacttctacgattcagagtagcctcctggacggacaagccacagtggtgccgctagtttcccgtggaggcgcattcctttattctttgcagatattgtgtaaatgcattgccgcggtgtttgtttggtctcctccaatcggctggttcaacgggtgacatttttgcgtctgtgtttatctgtcatgctacaagttggctatgtgctgatttaataagagagaacttaccagtgtgtgtttaaaacattgatcttttggggttgtttggttccgaaggttaaattttagtctcatcaaatcggatgataacccaattacacacacaaaaactaagcagtaagatgagtatattaaacctaattaatctacaataaattagatttaatgaatttgtttcttagtttagttttcaactatctaattattttctaattagattatatttaatactgttaattggctattttataattagattatatttaatactgttaattggcgttcaaacataatacatacaccaaactttagaaccaaacaactcaacttcgaaatgctttaaaactgggttcgttacagacggcactgatacacgacggatgagacttcaatatcgttcggaacacagtagccacaacacacgctactcaagacagccatgataccggtacaacacagttacacggacgctggcattttatggacacccggcatgtgaagaactacccgatcgatcaacactaagacgaagacggcacaccatcggttgtgggcttgagcatactagccggagatctggatagacttgacgtcggccttcttggcctcctccttaggcacggtgacggtgagcacgccgttctccatggacgcactgatctgctccgtcctggcgttctccgtcaggcggaacctgcgcaggaacttgccgctgctgcgctccacgcggtgccaggtgtccgtcttctcctcctgctccttgcagcgctcgccgctgatctggagcacgttgccgtcctccagctccaccttcacctcctccttcttcagccccggcacgtcggtcttgaacacgtgcgcctccggcgtctccttccagtcgacgcgagcgccggcgaaggcggccgtctccgagctggtggtggtgcctccgaacgaggggaacaggctgctgctgctgctgcttccagagccgaagggaaataagccctggaaggggtcccagaggtcgagggagaaggggtcgaatgcgcttccacggcgaatcagcgacattgttgctcgagctcgagttttgagtgacgaggggggattgggattgttgttgtttcggcgactcgggtatgtgcttttcttggctgctctaggcttctagcttctgatgaggagcgtcgacgcgggagcggc

SEQ ID NO: 24903 - DNA, 1042 bp, Zea Mays
tgtagcgttggtgaagcttcccctccctaattgtgctagtgcagttatctttgttcttgtcaatcaatggcgtaataagggccttgagaacatgtttgagcatgaagaactatttggtggcagttggattggagcatattctgctttgtgcttttcttgtggctactttgcatatgaccaactggacatgctccgttaccggctgtacaatggatggattcctggaattctcatgcatcacttgatcctactcatttgctttacactagctctgtataggaatgtcacaatcaactacctaattctctcccttgtatgcgagctgcactccatatttttgcatgtaaggaaagtgaggcgaatggttggatttcgagatttcgacagaacaatggtgaagctggaatggttactcaactggactacctttgtgacagcaagggtgatatgtcatatcttgataacttacaagctcgtcgctgatgctcacaaatttgggaagggcattgagcttccactagctcttcttggtatggcaggaatgaatctgctcaacatatttctagggcttgatctacttaaagcattcacacgagaaagaaaccagcagagccatcaggattgaatgtgcttttcttgatggtggtgtactcaaaattttgagaaggctgtagttccgttcaagtagggcagagagatatgtttaagtcttaattagcaactacactggaggcaatttttgtatgcattctttatgtataccaaaatgtactaatgctaagatctctaccagaaagggttgttgctagtattttcatccatgtaggtataatattcattagcagaatgcaggcgggtacctggatgcaggatttacatacatattgcaattagaaagaagtgtgtcaaaacctttggtctcaactccctaacctcatgtaaagtaaacccgaaagcaaaaccttgtggattggccctgtgaggctacaatgctcttatttatctttttaatagttgataatttcttgctgcaaagcaaata

SEQ ID NO: 24904 - DNA, 406 bp, Zea Mays
ccacattcagcaacactaaacaagagtcaaacattacctgacccctcgccgtctcagaccgctccctgaccacctcccgaccgtggggaccccacatccggttgaagagggctcccgcggattccttcaccacagggtcctcaaccttgtaaatctcgcgctcgaaatcctcatcagattggtcgaagacctcatagtgccggcacccttcgcaggacagcgtgttcaccaccccttcgcaggtgaccagggaggcataggacataaagccctccacaatggcggggagcgccagcaactcctcctgcagccactcgaggcagcgaagtctgggctcttgatctggcacttcgaagttagcggtccgtgcgcccagctcgtggtacgagtccataagctgtttgcg

SEQ ID NO: 24905 - DNA, 4359 bp, Zea Mays
cacttaattctagttctacttgtagcagcagcacgggtaccttcctcctcgtgatgattaattaaaacgcacgagcaaggatgacgatgcactatagaggcatagagccacagtgtaccgcagctcgcgacgagccagccagccaacgaccgctctcaccttcttcgtcctcgcagccggagatggagcagtgtagcacgtaggagtagttcgggaacgaggaattcgctttgccgtcggcgacgggagacgacggacggacgctgcttcctctggcctgggcgtctggcggcctgcacacctgacacctcgcctcccacagccctttcggccgccttttggctttgcaggctttttgtgcctcctgctgcttccccgtccctccccctccgcctcccaccggcacccccactctccacttctccagtcggccgggcactcctcccttgccccggcctcacaccaccacacgtccacaatgctgccgtcctccagatcgagatctgggccgaacgagtcccccatcagcaggggcaggccgagcacggcgtcctccaaccaccgcccctccacgccgtcctccaaccaccgcccctccacgccctcctccaaccaccgcccgtccacgccctcctccagccaccgcccctccacgccgggcggcaccaggaggagcagcgtcggcacgccgtccacgccgcgctcccgcagcaacggcgcgggccccttcaagtccgagcccaactcgccgccatcggccgccgcacagaagccccgcctctcgttcgaccgctccccgagatccgtggacaccaagcccgtcgtcgagcgccgggtgcccaagatcggcaccactcctgaaaagcagctccggagggaggccgaactgcaggcacagcttgagtccacccatgaggacctgaagaaggccaaggatcaactggcattcatcctcggagagagggaccgtcttgtcggggagctcaacgaggccaagagagtcgctgatgagactcacgagaagctccaggatgccctcatggccaagaggtgggccgaggaggccactgagatcgagaagttccgcgcggatgagctggagcaggcaggcatcgatgaggcacagaggcgggaggaggagtggcagagggagattgagtgcgtgcatggccagcacgccgcggacttggagacgttggtcaacacaacggaggagctggagaggctcagacgtgatctttccatggtgaacgacgccaagaaagctgcacttggccatgcagatgatgcaatgaagatcgctgaggccaatgcggagaaggtggagatcctctcaaatgaagctgctcgcttgaaaggcttgcttgattcgagtgctgccagcgaagagagtaaaagccgtgaagctgagcttcttgttaagaatctgaggtccgaggtttcatctctgaaaggcaaacttgagaaggcaatagtccttgaagagaggttggctgaagcagaaaaaatcattgaggagcttaaatcagagatagctgatgcgcagaaggtcaaagctgacatctgtctgcagttagaagaatggaaggagaagtcaggatcacttgagatgaaattggtgggagttactctatctgagaagttaaaaagtgactcacttgcctccacgactgaagagctggacaaggtcaagtcgatattgcaagatagagaattggaaattgatgttcttaaaggaaagataactgccatggaaattgaggtggcaaggcttttagcggatgtaactgattcaaatgagcatctggatgcatcacagcaagaggtgtttgggctgcagactacaatagatgttctgaggaacaagcttgatgctgcagaactagctgcctcagaggctttggacaatgagaggactgctatcacaaagattgaaggcctagctgaggagaaaatcaaactcattagtgagctggatgatgctagagacagagaggagagagagaaaatggcaattgaggatcttactgctgcattggataaggcatcttgtgaagcacaggaagcacatgataggtttcagaagaaagaagatgattatgaacatgctcttgcgcagataggtgatctgaagatgtccgcgaagactatggaagagtgttatagtgtaatgcttgatgaggcaaaacacgacataactggcctacgggaaactgtggagaagctagaagctgaagtgagcaagtgcagagaagaatgtgaatgtaaggagcttgaccttatcacggctagcaagcagtctgaacaagaaattgctgctcttaaagaagaagcccagcatttatctgcatcactgcaagttgcagagcacgagcttgaagcagtcaatgaagagagagaaaggtttcaggagaaactggcgtgcacagaatcagcagttgctgaagccaaccacgctgtgcaggaggcaaaggccgagaaggagaggcttcaagagaagcttgcacacacggaatcagaggttgctgtggccaacatggctgcacatgaatctaagattgagttcgacaggcttcaagagaaacttacatacacagagttggtggttgctgaagccaacaaggctgtgcaggaggcaaaggctgagagttcgcatctgaaggagcggttacttgacaaagagaatgcattgcagagcataacccaggagaatgatgaattcaggatgcgagaagctgacgccatgaagaaaatagacgagctgtctgctctgcttgctgaagccatgacaaagaagcatcctgaggaggaagaaaagctggtggttgttgatgaggcacacaattctatgcgtgatgaagttatctgttctgttgcagaaaatggagatacggaagaaactgatgataaaaaaccaaagcttgaagttgaagcagtcgatatgaagtccaatggtcaatccaagcatgaagagaaagatgacagcaaggtggaacaagaggaactgaaaactgagctcagcttgcaagagagcaagaaagttagcttcgacaaggacacatggacaaaaaacaaaaaacaagaaactgaatcgcccaatgatgagttaggctcgaagaaggttagcagcagcaccgagaacgcaagcagggccattataccagaggatacggcgactaaagtgtcagcctctccaacgaaaccacagcatcagaaaaagaataagcctctgctgaagaagtttgggagcttactgaaaaagaaaaacagcaagtagccgaacagtgaccgtactattagtgttgttttggatttcttcttatccttttgtttgacgaggtgttgtgcttcctatgcgtttgatcccagtgcctatatttgtggtgattggagaagtttgtgggtgtcgtgatttttttctctctcactttcttaacttggggcctatatggtgttggctgctatctacacgtttatggctgtgtaaatggagttcctcctgatcagaatggatattcgtttctgaaactgtgcagctccttgattgattgtaggttaatgtgatgtaaggcgcccgtgacctaacctggatataatatttattaactagaggactttgagcatagaatgttatctgcaatccagttgataccataatgttgaagcttgtgattgcctttgcgagttgtagcctcctaatctgttctggttgcttgccatcgatcagatcaggtgcagaaaaaggtgcagcaggtgtgattggattggaatccctcgttggggttggccatcgcttcttaccacactgacatcagagggttggccatcgcttcttgctacactgacagcagaggaagtatcatttcatttctgccaacacacaggattgttttaatccactcgaggcttcgtatatcttgtccgatgcattatcctcttgtgcgtgtcctgagtcctaacggtacggcaccgctgtgtcgcttatgggtccaaccacgtgctgttccaagcgcaaacgacatatgaatacctctgttggatggtttgagtcgtcgacttcgaatatgggtgctgccttgggggcgcagccgaatgtcatgcggatgatatcgtggtggtccctcaacatgttctgaattgaaggcggtgggaagcatctgagagaggccataatcccaacaccatttacgtgtagagaaagctcacgactttatacgaagttacctatccaagctgtttggttctcgtgtggctaccctttacatagggacaataataaggattagtaagaaccttctgtgatttttgatactttggtaaaaatacgggtgcgtcattaggagtttgcattctctacca

SEQ ID NO: 24906 - DNA, 2426 bp, Zea Mays
gttcctaccatcagagttcaactgtatcacccatccataagcaattccttttgttgaaatttatgagaagacatatgcctctgttaagtctcaggaacttttttgctgggaagccaattccttactgatctgagggacaacatttttgtttgcctgatataaggtgatgaaggtggctggataacacgattatgggtattttcttatcgaggtaaagtgtgaaagggaaacgcgaaaagaaacgtgtcctggtcccaagtcacctgccatactgaacacgattgatcgcagaaagaaacacgttctggtctagactgacagttttggagctggagccggccatgcgctcgatcagagttccgctgcagccacgacctctctcccgaacgcgcacgaggagaccaggtggaacatatgcaagcaggttctagagcaataaccccatgaatccagatcgggggtctgcatctacacgggcgtgtactccgcaccgctcccctccggccccgaccgccgtgtgctcgttgtagccggggtcgacctcaaccacgacgacgatgcggtctcctcgccccaggctcgacctcctcgctgacctcgccctgctccacctcaactcgcgatgaggattgtcggcacgttcacaccgcgccgttgcagaacgttggagcctctcagaactctagaagctgcctaccaccacgcaccctaagataggggcatatctgtgttagtcgcctgcacacatactgaaatatgggcatatccaccatgtattcttctcttagttatgttagataagacttttactctgtcatttactgatctggtctgtttttagctccattagcttgttcacaagcttatgttagagaaggcgttatggcttttctcaagattataacatttctgaataactgttctgcgtaggcatggtaccatcttcatcatgtagctgggatgagctggcaccatgaaagaattcaagtggttaaatcatgcatctgcagaaatattgtactctcaaatggtgggttgctgcgtcatgggagtttgggtgaaggcctgaaggatgtgatgcaaaacgtcgatgcaggtctgggatgtccgcctcattatggatcaaaattcatgacgttctaaaggtgtcggatgagtacctatatactccctcccagaaaacaaggcgcctcattacactattggaagctggacgacatggatgactctggcaagatgcggtgggagcacgacgacatggatgactccgaccatgagttcgacaggaagcctagcaacagtacgcagtagcaaggttgaccagaggggcagtggagactaacccaacaccccctcctccgaccgtcatagcgcttctttcctctggcttcatttcttacctatgtatggatggtcttcaccactggttacatctagcaagtcctcctagggtgacatgaaggagattgtcatgctgccaaagcacatcaaggacaatgcaaacaaggacagaggaagaccggacatgccatttccaggtggtgacatttctattctcacgcgcccacccaacatttttgcttttactaaatgactatgtgcgcgaatgctttgtggatgttgagagggattatctgtgcttgacaaaacagtatcccagacttgcaattactccagaattttctaaggttgggcattttgtacattgaacttttgttgctgatcgatattcaatgtggcttttggcattctctgtcactctagctaggtccttggatgagccacactattgacatgggtttaggatataatgcacatgggttagttcatctctttttcttttgcacccaagtatgccattttggggatttctccactatgtatgtttaaatgagcacattatttagaagccttttattatcatgttgttatgttctatgttgtttactgcttgcttggtgtaatctctagacccgtggatctaattgcttttgcaagggaaagagatatgccttctgattcagataggaccttaaatgaagacaagcgtttcatatcttgtagtatgccacaggagcatcaaaagatctttgaattgggctgaagaaaacatagaatatagtgtaatcttatagtataaaatttagagtctattgtcacccatacatataagtcttgtgaacgtttatggaaccagggaataagacattgttctgtatggccagtctgttggtagcagaccaacccttgatctagctattcgtttcaatcatgaagagatgtggtattaatcatagataagggatgtttagttccagagactaaagtttagtacgtgtcacatagaatatttgaatctcattttactatggatttatatatcatagtgacatttgtcgttatgtattgatgttttatactcatat

SEQ ID NO: 24907 - DNA, 1403 bp, Zea Mays
catccctacagccagccagccagggcaaaccggcaaaaccccaacgcaggagcaacacagcgtcgccggcggcgatggatcccctctccgtgctccgcgactacgctggccgcaacgagctggacaagatcatcttctccggcgacgagatccacttcggctctgactacaccttcccggcttccacccccaccgccttcgcctccaagcagtcaggtcgcccctacccgctctccgctgccgtcttcctcgcgcagcaccacgacctcaagcacaccgacttcatccaggccgcgcgcctccgccgcatcccgcccgtatcgctccccgaccgcaagaccttcctcgacttcctccgcttcggccacaactccctcccctccgccgacccgctcctcccctccgccttccagccgcaggagccccacctccatccgccctcgcctccgccggaggaccccgcagctaccgaagaggccaccacgggaaagcaaatccgcgcgctcgagcggcccttcaaggaccgcaactcaatcctcgacgcccgcggccgcgactttctcgccgtcttccatgccgccgtgcgccgccaggacgagcagctcaagggcggcggcaaggatgcggcgccctcttcccgccccaactctggctccgtcgctgcagccctggccaagcccaaggtgctggacaggtccctgggcgacggcgtcgtgcccatcatccttgtgcccagcgcctcgcagacgctgattacgatctataacgtcaaggagttcctcgaggacggggtgttcgtgcccagcgaggagaggatgcgggcgaccaagggagggaagccggagagcgtcacggtgcagaagaagctgattcgtacggagagagctggcggcgctgggggtgccgtctccttcgaggttagggacaagccggcttcgctcaagtcagacgattgggggcgggtggtggccgtgtttgtgctcggcaaggagtggcagttcaaagactggcccttcaaggaccatgtagagatcttcaacagaggggatgatgtgtggctgtcgtggttacaaggtcgaagcagcaagcatcggttcaacagagcatgtacatgaggaaggaatcagcgatagcaaaccaaagtcctcgacttgctcaataagactacggaaggaaaagacgttgatgcccttgttcaaatttatagcttatatgtatatgcttgagggtatgattgtaattttgctgaagctgtatctcgtgattataaatagaagaatagtaccatgcattggacacgctttttggtcggagtcggagtgaatcgtctctctctgcctacgaagctacggtctttctcttcaccttcgcattattgaacgtaaagcgaagggaaatgtacc

SEQ ID NO: 24908 - DNA, 796 bp, Zea Mays
ttatgcttcgcaatagcggtttcccgcaacctcgatcgcgcacagaggcccattccgccgaggagtggcacgaggagagacgacaggtgcggggatggggtcagttttgctgccaacgctgcggctgaagagtgaggtcgacgccgccatccgcgacaccctcgataaggtcctcgttctccgatttggtcgcgccaccgacgccacttgcctccacctagatgacatcctggataaatcttcttgggacatatccaagtttgctatggtagcattagttgacatggactctgaggagattcaagtttacattgactactttgacattactttggttccagcaaccattttcttcttcaatgcccatcacatgaagatggattcagggacacctgaccacacaaaatggataggttcttttagcagcaaacaagactttatcgatgtagttgaggcaatattcagaggtgcgatgaaaggcaaactgatagtgtcttgcccccttcctcctgagaggataccaagattccagcttcttttcaaggatgtctgagaaaactgcagctcatcacgtgcacacaatcagctacctagcccaaggtttgtatttaatcacgttcatcaaatatgacgggtatagatttcttgtttggtgttaataccttgctactagtttatattgagttttggcattttacacaaactggacctggtgtgtgtgtgtgtgtgggtgggggttggggggcgtgcccccatggcattgcatttaagaagaagcattttacacaaactacag

SEQ ID NO: 24909 - DNA, 2676 bp, Zea Mays
ccaggcatggcatgttcgggcacgtcaacgtatctcacggcaagagaaaaataggttgaatcttctgaaaattggtgatcaagtagcatatatgaagatggttgaggagagcaagaacgaacgtctgaaaatgctccttgacaaaacaaatgagcttcttgaaggaattggaaaagctgtacagcgacaaaaagatgctgagcatgttagtcagcatgaagggagtgaagtgccaaaagggtcagagtctgaggattgctctcaaatctcaggcgtcaagagtgaatcacctggggaatctccttcagatgacgatgcagactttgctggctctgcagatgaaagtaaattcaatgcaggtcgtagacttgattttactgtccattccattgaagaaaaggtgacagaacaaccatcagctctcgaaggtggggaattgaggccatatcaactggagggtctccaatggatgctttctttgtttaacaacaatttgaatggcattctggctgatgaaatgggtctgggtaaaacaattcagaccatagctttgatagcttatctgttggaaaataaggaggttgcaggaccacacttaataattgctccaaaagcagtattaccaaattggtctaacgaattcaaaacctgggctcccagtattgggacaattctgtatgatggtcgtccagaagagaggaagcttttaagggaaaagaattttgatggattgcaatttaatgttttgctcacgcattatgacttgatactgaaagataagaagttcctaaagaaagttcactggcattatttgattgttgatgaaggacatcgtctgaaaaatcatgaatgtgctcttgctcgcacactagtttcaggatatcagatccgccgcagactacttttaactggcactccaatccaaaatagcctacaagaactgtggtctttgcttaactttattctgcccaatatttttaattcatctcagaattttgaggaatggtttaatgcaccatttgcatgtgatgttagtcttaatgatgaggaacagctattaatcatacatcgtctgcatcaagttttgcgtccatttttgctgaggaggaaaaaagatgaagtggaaaaatatctccctgtcaaaacacaaggctcagatcaaaggctctgcagaatctgtcaatgcaacttaggaaatgttgcaaccacccctatctatttgtagagcactacaacatgtaccagcgggaggaaattgttagagcatcagggaagtttgaattgcttgatcgtctacttccaaaactgcagagagctggtcacagggttctgcttttctctcagatgacgaaactgcttgatgttttagaaatatatttgcaaatgtacaatttcaagtacatgaggcttgatggatccacgaagactgaagaacgagggaggttactggcagattttaataagaaggattcggaatatttcatgtttctcctcagcacacgtgctggaggacttgggttgaacttgcagacggcggacactgtcattatatttgatagtgactggaaccctcaaatggaccaacaagctgaagaccgtgcccatcgtatagggcagaagaatgaagtgcgtgtgtttgttcttgttagtgtcggctccattgaagaagagatcctggaccgtgcaaaacaaaagatgggtatcgatgcaaaagttatccaggctgggttgtttaacacaacttccacaggacagacgagcattgctgcaggagatccttaggagggggacaagctcgctgggaacagatatccccagtgagcgcgagataaatcgtttggctgcacgaactgatgaagaattctggttgtttgagaagatggatgaagaaaggaggcttagagaaaactacaaatctagacttatggatgggaatgaggttccagattgggtattcgccaacaatgatttacccaagagaaccgtggcagatgagttccagaatataatggtcggtgcgaagcgacgtagaaaggaggttgtctattcagactctttcggtgatcagtggatgaaatccgatgagggatttgaagacattccaaaggcgactcagaggtcgaagaagactgcttactcatctgacatccaagttgagtttagtgaaaggaggaaaagacctaggtctgtagaaaacagcgcagacggtgtgagcaacccgacgtggacgcctgacaaaggaagggctggagtttcatcatacagcaaggacgagactgaagatgatggcgaagacgaagtcattactagcggcttacaaaagggaaacagtttcacatggaataccctaggaagaagaaggtcaagccacttcagttcgtcatcggactcgagagggcgcccaacattctaatggcaacatacatgaatgttatggcctcgacctgttggttgatggaatacccttgtagagcagggctgcgactatgactgagtaccttcaagcttatgaactttattaggattactagtatactgtatggacttgttggcatgaatttgtaactcctttaaatattaattgtttaaacaactggtggtgtttgctatcataccgcgcctacatgtttttatttttttgctaatcaaagtttttgtggccaggttttattggtg

SEQ ID NO: 24910 - DNA, 752 bp, Zea Mays
gttccctttaggcccactcccggactggttactttgtttgctcgcaccggtaccaagccctgcagctctagggctccatttgttcgtaaggggtgcgtcccgtttggttcctttgccgaggttctgaaggcggcgacggctatggaggggaacaatggcatccgtgggcggggagctggccaaggttcgggcttggggaacggcagctttcggggtcgtggagctggccagggaccattctcgggacgcaatggaaatgggatgggtcgcggcttcgtcggtggacatgcgtcggtccctgggcatggtggagacaggtgggatcttggccgaggtcgtcaatttcacagaggaggcgagcacttcaacaacgttggacccaacaggtttccaggttctttttagaggtacacactggcttagattctgggcccagctacaaaaggatgaagctgatggagttttaataaagaatgtctgtcgtcgcctggaatcggtggccatgcaattttgtgttaattttggttggaggttttctaataggattgccttgtaatcatctcactggttttattaagtttaaagaacctttagtgtgttagtgtgtggctgtgtggaggggtatgtcccttcattgagcagtgtgatataacaatttgtgttggctctaacctcttttgaggggaaagccggaactttctctccattatcaaaaaaaaaaaatcaatacccttcattccacttgctcccaa

SEQ ID NO: 24911 - DNA, 2605 bp, Zea Mays
tgtatatatatagtcaaccatcaaagatctgtcacgcacgcatagcatggcgtggcagaaccgccattgaagcgggaagaaattcgaagaaccctcgaaatcaggagaaggaaacaaatcatcctcccatcccgagaagagatggcaacaccaacagccaacagaaggtaggggacatggcggaggaggcgtcgccgtcgccgtcgccgcccaagttgctctacattgccatcgccgacggcggggtccgccgggcgttccggtacacgcgccccgtgctgcagagcaccctgcatctcatgggatgcaagcctcgccatgccttcaagattagcaagagagtattcaatgtgatgaagagtgaattcttggccacatcaaagtcagatggggcaaccaaacaagaaaattatcctgcctttggccttggagatggtacagatactccaaaaatgttggagagaagcaatagcagcgtaccatttgaattatacaagaaccagactaccgttgttgtttcaagagaggagtttgtaagtgttgtatgtgatgccctctctttgtacaagtatgttggacccaaccagaaagctgacctgcttcttgcttgcagaattaaagagagaaaggaatcggtggcaatactcttgtgtgggacaagtggatgtggcaagtccactttatcatctttgctgggtagtaggttgggtatcacgacagtagtttctactgattccatacgacatatgatgagaagctttgcagatgaaaaacaaagtcctcttctctatgcatcaacctaccatgcaggtgaatatttggatcctattgcagttgctcaggcaaaggcaaagcgcaatgcaaataaacccacagttgtttctcatccaaataccagtggagacaaagatgtgacttcaggtgacaaatctcagcatggatcttcagaattacctcctagagctgaattgattggcaacaagcaaatggcagtagaaggctacaaggcgcaaagtgagatggtgatcgacagcctggacaggttaattacatcctgggaagagcagaaagaatctgtgattgttgaaggagtgcatctaagccttaactttgtgatgggattaatgaagaaacatccttccataataccatttatggtatacattacaaatgaggataaacacatggaacgatttgctgtacgtgcaaagtacatgactctagacccagcaaagaacagatacatcaaatacattcgaaatattagagctatccaggaatacctatgcaaccgagctgacaagcatcttgtgccgaagatcaacaataccaatgttgaccagagtgtggctgctatacatgcaacagtcttcagctgtcttcgcaggcgagcagccggggagcaactgtatgacctcaacacaaacactgttgctgtagtggatgaggaatacaggaaccagcgtgcagctaacaccttgggttctaagggcatgtttcagttgatccaaaggaaggggtcttcaaggaatctgatggcacttcttaacaccgacggttcagtcaccaaagcttggcatgtaagtgcaagtgatggcaatgggaatcttaatggtatcacaaacaacaagaagtctcctgaaaatcctatgctggatccctcacaaatcgggaaggcagaagccgtcaatctccagtttggtccttttgggatcagtgcctggatgagtgacacgggtggaaccagccatactgggagtgtggaagacctgaggcctgatagtgtggagactggtggtagaaattattcgtcgtgctgcagttcgccaaagatgtcagattccacctcgaaggagcttatggaggactactcagtctatggcagtgacgaagaagctgacgaccctcgtgatgctgaaactgatgatgacctaactgatgaagaaagagacatgcacgagatagatgcaggctctgtagacgagcactcaaccaagtcggatgaggaatacgaggacttagccatgcgtgatgtgatggagaatggtgactggtctgacgacgaccaagctgtgggcaaaaccaagaactcaccagccctggagagcatccatgggagtggggcagctgaagatgatggcataaagagccggtaccaccacaacctggacctgttcctgaaaatgtccaaggaggtagctggcaccagaatgccttgcgcgtcatagtgccaccagggtggagagaaggccggcgacacgctgctctggtcccagtgggtggtatgtttcttgggcacctgcttttgtgatgctgtgagcttgtgctgttgagtgtacaccggtggctgtggctttgtagcatgtacctgtccaaactacaaaatgctctcacctggttgtaaagagaggacctgatgctttgtcatatcatgtagtaggagtattatgtttgacaataatgtcctggccctgctgctgatgaagtcacctcacgtgaactatgtgccatatcatgcatgtcctttggttgatcaatgtttacaaagatgtgtcgtaagactgtcttcagcagttcaaataagaccatcttcagcagttcaaat

SEQ ID NO: 24912 - DNA, 145 bp, Zea Mays
ccacaagaggctggaaagcgtgagccactcgcaaggtgatgctgatggacgaacctgaagatggacagacggagcaagtatcggaacaaaatctgatcgccaagtggacatcatctaacaaacactaacatagtgtttattccag

SEQ ID NO: 24913 - DNA, 1376 bp, Zea Mays
accgactcaccgtatacttggcggatttcgcccacgcccgcctctgccgaagaccagccgccgctgtcgacggcgaactcccgcggcgagtcgaccgccgtctcagaccctaaggcctaagccctagttccagcccacccagttccttaaccatggaggatgccctcgcgccgccgtctgtggccccgactccctcccccctcgccgccgctgccgtcctcacccgtcgtcggtcacacctcgacagtgcctccttccgcacgctctcccgcctcttctctcactgtctccacatcaacccgtcgccctgtggcatctcgccgcccgtgcccgagcccgtcgccgcggacttcgtcggtggggaccccgacgattccccagaaaggcctaatggcgctgatttcgatcggctaaaggatgtgcaaatcgaggcggcggatgcgggaggcccttcgcttcacgggactgtccatcaaccggccgcggcgaactctaccctcgacctggttgaggctgaggctgaggctctgcagctcgagggtgcggacgcggtaggggtcgtagaaagcacctcgtgtatgaccagagccgaggctggggaatcagcggtacttgtggtagaaagcacctcatgtaagaccactgctgaggtggaggagtcagcggttggagctggactggcgatggtgggtgacgtatctttgaagtcggtggagtctctcttggagacgaaggttgacgaatcggtagaggtagcagtgggtgatgatgaaggctgtcttttgtttgaagcgatgctgacaaacttcacagggttgattgatgatgttgatgctggagcaataccaacacagaggtgtgcagtttctggaggtgacctgcagaatagcaaggcatctgaggatttgaaacaactgggtgataggattgaagaaggagaacctcttagaaactgtgataatgggcagaatgatggtggtggtttcgaggaaggagagattgagggcgagtttcaggatttgggttcagaagaatctggaaattccgaacatggagacgaagatggtgaagatgagaaattggaagacaattccattagcagaggctcagggccaaataaatcttgtgattatggcacacaattcgggaatttgcaatcaattcctgaaacaggaaatgatcatcttatactgaacagggatgctattgtcagaggtgatgcacaaatatctgttaccagggctcaagccgtcacttatgatgaagttgtggattggaatgagactccgctgcctgacaatgagactgtcaaccctgggaagaagagaaaacgcattctgacagaagagagaaaagctaaaaaaacaaaaataaaa

SEQ ID NO: 24914 - DNA, 1222 bp, Zea Mays
aatcaatctagactctttgtttgaaagtggtgtcaaattgatctcaactagaaatggaactggaaggtcatctgttcttcattcccaaccgaagtcaactgttggaacacctgcttatattgcacctgaagttctgttgaaaaaagaatatgatggcaagattgctgatgtttggtcatgtggtgtaaccctctatgtaatggctgttggtgcatatccttttgaagacccagaagagcctaagaacttccgcaagacaattcagcgcatcttgaacgttcagtacgccattccagactacgtgaacatatctccagagtgcaggcatctaatttcgaggatttttgttggtgatcctgctatggcaagtccttgtagttataatcgtgctttgatcctgatacagtaggttcagaagatacgttgtttcaggtttggtcatatttatccgattttgttgtatttatgtgttatataaaatatgcagcgaataacaatcactgaaatccggaatcatagttggttcctgaagaaccttcctgctgatcttatggatgatgatagcatgagcaaccaatatgaggagcctgatcagccaatgcagaccatggatcagatcatgcagattttaacagaggccaccataccacctgcctgttctcgcagtataaatgttctagctgatggactggacatggacgacgacatggatgatcttgactccgattcggatcttgatgttgacagcagcggtgagattgtatacgcaatgtgagtaacatctcagtaaccatctcagtatctcaccagtcaaccaaagaaccaatcaggcatgggacaccctgatgttgtacactctgccaaagacctagcatccttttgtaaaatatctccctgtagttttctcaaagaagcgcaagcccaacctgttctggggaacacggatgctgtagtcaaactggggttattcagattgtaaaactggcctcttgcttcctgcttactctcaggcttcgacttgtgtgttgctgttgaatatgtacttacaagaaacttctacggagtactcatgttgatctgttcgaagctaacatcggaaagagcatttaaaaattctgttggtggctttcattggaacttgtgcctgctaatgggttgggttgcaaggctgtctagaacaggtcacataaaatagggatttgtactgtagataatactattt

SEQ ID NO: 24915 - DNA, 257 bp, Zea Mays
gtcgatctaattgttatgttacttcttgcttcctcctcactacctgatactaccgcatcaaattaattccaggtcctcaaaacaagaaactccaccgtaccagagctgtgcttcagataagatccaaagacccttacttggttccctgcattgattttcagtcttgttgagccaaccaaggtgggcggatcatctcctcctgtggctgttgttaactgccgtattcggaaagcaggaagtgcgggttggtgtcacca

SEQ ID NO: 24916 - DNA, 451 bp, Zea Mays
cgagtagatatcgtagcactcttccatcatcgtctctttcttttgatgccaatctcctccctgctcgctctcccgttcagtgcatggcgtccatgcgtgcgcttggatggttcggcgccgcgacaggtggaggaggcgccgccgaaaggagggacgggacgccagccgcagcagcaagcatcatcgcctcgtgcccctagctagctagtatacactggcacggcagtatcgtataatacatattattatactagtataatgtaaggtgtcatgtcctttattttgaacttaactggattagtaccagatggagttttggacatgtattgtggtgttggatccgtctagctatatatgtgatggatctatatatgtgtctgtagctatttgtgggcttgtatgaattttgtggaatgatgaataatatgtgaattaacaaatatgtttacgt

SEQ ID NO: 24917 - DNA, 1333 bp, Zea Mays
ctccagcatgctctggagctcaccgtctcaccgagtccaaaacccagaaccccgcggtcccgactctcgccatcggcgactcgccaccgttcatcccgcctcccgaattcgcagcttgtaaatggttaccgcctctctcttctccctcccatcgctccgtgtcctctcccgcacctctgcccatggcccccggttccagatcctcgccgctaggaagccagtggagtcctccaccgccaccagcggcagccgcagaggcggaagcaagggggctgggcttctgtcggtgttggaccgcgcgatggcggacgaggaggagtaccggcgcgcgcgcgcccaggtgcagcgcaagggcgtggaggtggaagggtacgccatcgaagggatctcggtgggcgggcacgagacctgcatcaccgtgccgtcgctgaacgtggcgttcgacatcggccgcgggccgcagttcgccgtcagccaggactatctctttatcacccacgcccacctcgaccacatcggtggtcttccaatgtacatagctacccgtggcctctacaacttgaagcctcctactgtgtttgtaccaccctgcatcagggatgatgtcgaggatctgcttcaagtccatcgtagaacgagtcaaattgagctaaaagttgaattagttgcactagatttgggagagacatatgaaatacgtaatgatcttgttgccaggccatttcaaacgtaccacactatacccagccagggttatgtcatctactctattcgaagaaagttgaaaaaacagtatgctcatttgaagggtagtcaaataatgaaactgaagcaatcaggaaccgagattacggataccatactgtacccagaagttgccttcacaggagatacaaagtctgattttattcttgacccaagaaatgcagatgccttgagagcaaaggttctcataactgaggcaacgttcctagatgaccatgttgatgttgagcatgctagggaacatggccacatgcatctttctgagataatggagcatttccagtggttcaggaacgaaacaatcgtactcactcatttctcaaatcgatatagtcttgaggatattcgccaggctgtttccaggctacaacctaagctaaattcaaagacattctccagtttccaaaacaaggtggaagaaccgtgtattacaatgctttggggaactggacagcgggatacgcaaagtgcatatactcatgctcatggagtcctgcatagaatggaatatgatcgacaggccctgaagtggcatatgtttctttggatcaacttcttcacttacatc

SEQ ID NO: 24918 - DNA, 1340 bp, Zea Mays
cgaggaaatcgagcagcggcaccagggcccaggccaatcccaggaaaccggaagctcgaaagctgccaagccctcgccgtcctgccgcccacggcttaccgctgccgcctgccggccaccccacccaatgaaaatccgcatatactgtagtactccgtttcgcccgcgccgcccatccgttcggctgcctcgcacgccccaaaatcccctgctgcgcctccaaagccagcagccggcaggtcccgctacaaaagcaggcggcatgcgcgtgcgcgacaggtagcagctgcctgagccagtgcgcttcggtgagcagacaggacggcataggatagagatggcggccgcggtggagggggtgcggcaccgaacgctggaggcgaacggagtgcgcctgcacgtggcggaggctgggcccgaggagggcagcgccccagtggtgctgctccttcacggcttcccggacctctggtacggctggcgccaccagatgtccgccctggcggcgcgcggctaccgcgccgtggccccggacctccgcggctacggcgactccgactccccgcctgatgcgtccagctacaccaccttccatgtcgtcggggacctcgtcgcgctcatctccgacctcggccagcggcaggtgttcgtggtggggcacgactggggagccaccgtggcgtggcagctttgtctgcttcggccggacctggtgcgggcgctcgtgaacctaagcgtcgtgtaccacccgcggcggccggagatgagcccgctccaggccatcagagctgcctgcggcgaagaccactacatgtgccgcttccaggaatttggtgttgctgaagctgaatttgctctatatgacatcaagtgggtgtttaagaagacatttggcatgcgcaagccagctcctcttattctgcccaaggacaagagcttctttgactctcttgattcagatggaacttgtcctccatggctatcagaggaagatatttcttactatgcagaaaaatttgcgaaaacaggctttactggaggacttaactactacaggtgcatagacaggagttgggagctttctgcggcatggactggagctccgataaaagttccgtcgaaattcattgttggggaccttgacattacatacaacgctccgggggtaccggactacattcacaagggtggcttcaaggcaagcgtgccaaatctagaggacgtggttgtaatggagggagtgagccacttcatcaaccaggagaaacccaacgaggtggaacaacagctcctggaatcaatggtgtaccttgtaggagaaggaagccatctcaagaagc

SEQ ID NO: 24919 - DNA, 5494 bp, Zea Mays
tttcgctctcacgaacccctctggcctctggccctctccaaccttctctcttccccgttcccccgtcgcctcggcattccgccgccgactccgacgagggggccccacctgtcatcctcctcccccgccgccgttcgccggacggcagcgcgacgaggagccgtttaccccttcctgccccgcggcatccgcgttcgcgttgtgcgccgctgatccgagcggaccgcttcccgcgctgatcgctttctccgttcgacccctagggtttcggcgttcccctgtctccccgcgcccccttggaggcagcaccagagatctcgatcttccgcggcctcggtcgcgctacgcagttgaccccgctcgatttatcaccggggaattagagaggcgttttccgggggagtttcttcgcggggaagaggggccatggcctcgagtctgctcaccacggacaggagatggggtgctactcctgcaaggaaatctggtatgactgttctaggaaaagtcccaaaacctattaatttaccaagccagaggttggaaaacaatggtcttgatcccaatctagaactggttccaaaggcacccacacctggggcagcaaagcaccatccacaacaccaaatgcatggagttcctcgtcaattctgtctaccaagaacgatggaagttccagttcatctagccacttcaatggtcgaccgtcctctggcggaggctcaaggccatcaacagctggaagtgaaccacttggttcacccaatgcttggggtccaaattctcgcccatcttcagcatcaggcacatttccatcatctcatctaccaatggccacaaatcgtccccgaagtgcggaaacaagacccggaagttcacaactttctcgatttgcggataatgcttcagataatgtgaaagcgtcgataaggactattgatagaccggggtcttcatcacatgggcctgggttcacactaagtactggtgatttcccaacacttggctctgaagcaaatagtcaacgaggccatagttcgaaagggcgcccaatttctagttcgggtaaagaggtgtcgcaaggtgaacaagtgaagagcctaacaactggaaatggtgaattaatttcacaatccaataatcaacctgttgatatcatgaagacagagcagcatgcacacactggaggtgctcctgtcctcgccacaaatgtgccaaatgaaggcctgcaaccgcggccatatccaccaaattttcctatgcctcatccgcagtttgattcatggcgtgcacctcctggtcacccccctgagggaatgtggcatagaggactagtgccaggtgggccatacagaccagttggcccccctggtagttttcctgtcgaaccatttggttattatggtcagttcccacccaactctgaagttgcagcaaggcagggcccagggcatggtggatatcaggctaaaaatggagatgtgtatcatcctacgcctcctaattcctatattatgaatcagcctgttattccagtcagaccagtttatcagggtccagtgccgtatgatgggtattatggccctcgagcacatttcaataatgccaatgttagagatcctcattttgttggaggtcctggaatattaaatcaattccctaatcagaatgacaggtttcaccctggacatcctcaaaacagaccaggcagacatgaaacagttccaagggagcagctggaatatgataaaatacatgtgtttcatcgaggaaaccctgggagtttgcatgataattctgatcgtctaggaggttcccgtgaatttgaaaggaatgcgcagccagcatcgccacttcttccacatcctgatggaaaccggactgatgtgaacatgaggacagatacaagggacacctttagtgaaagtgaaagaaccagggtacttacaaaatcggtgcctaatcagagaggttcggttggtacagaacatttgtctgtttatgacaatgcacattcccatcacagagaaactggcgatggcactctgcgcaagaaattcaaggaggatggttcagctgcactgcatcctgtaattaagaagaatgcagctttaatagagaaaattgagagtttgaacaacaaagccagaaatgttgatgcacgtaatctcccagaatcagcttcgtccaaggaattcaataagcataaaaaaagcactgatgtttcatctaatgatgtcatgggtatggcatgcaaatctgacccggcagtttctgtttcctgtgtttctcctgcggtgcagagactaccaaacgtgcccatcaagggtacaattcttggtccggcacatccacagttaactgaatttagcaaagctgaaaagcttggtgattcaattagcgatcatgtacataggaaaagtgattcttcaagaaacagttaccatggtccttctaaagataggccagctaataaattcggaagtcatggacggggagaaagttccacaactgatctgaggaataatatcgatcatggccaacaacctgagattgcttcgcagctgcaacctgcgattgtacctgatgatatgccagcttcactcgattatgagtctcagcgtgcaaaaatgaaggagttggctgcagaacgtgcaaaaaagttgaaagctgaggaagaggaacggataaagaaccaaaaagcaaaagcgctcgcaaagttggaagaattgaacaggcgatcatcagtacttcagaagaaatcaaatgatataaaagtagaaacttatgatgcacatgataagcaacatgctggacttgatgtgactgctaaacttgacacttcaactgaaccacatgatgttattgcgcctgataggcttactgatcttctgcctcctaatgatcccaatcatactatggttcatatacaggcccagtctacagcacaatcacatgctttagatggtggcaaagaccctgatgctcatgcaacctcgtctttggtcaagaacactcacagcaacatggagcctgttgtgcagaagagtatctcgcagttgcatgacatcactgtggtaaaggccaagcaagggtacaggaaaagacatgtgtcagaagagaaaatttctgatgagaaggcaagtgcttcaataaccactagaaatattacgaaaaatgttgatgttctcatcgacacagtgacggctgttgttgcaccacatgatgatccacctactcagaacaagaagggaacccgacatttgagaagtaagaaaaagttagatgatgctccagttacttctaaacatccacctgtggtgttgaatgagccgaatacagtgaaagtctctaccgagccaaagacacatactggtggtgttatcatcagcagctctattgttcccactgaaggtactattgtaactgttggaagtataactgttggtggaatttcacttaaacctatgaatcaggagcgggttaaatcaccagatggaacaaataatactgaaagtagccaaccaagacctcagcaaacgagaaaatctggaaagcatcagcatgttcttcggcctgttgagaagccacatgggaatgatggtatcttgtgtgcaccagttaagccaccagtgccgaatgagcactctgatggagccatgccgactgcagcagtagctgacctcactaaaccagtagggaaagccataaatgatggggagaatgtgacaagaacaaagagggctgaaatggaaagatacgttcctaagcctatgtccaaagaactgcaacaacaaaatccaagtgatgataaggaagcagttgataagcccagtggtgctaaatcacatcctgcagccgaacccaagaaaactagcaaagcacatgggggtaaatctaatccttcttggcgcaagaggaatccagatgaatcagctttggtggcaccaaattctgttgagcaagcagacgtctcttatgaatcaaaggaggttcagaacttcacctatcagaagcagcctgttgaacttggcaagcaagatacacagttaaaattcagtgtagatgctgctgctgaaaatagctcagctccagttcaaacagttccgctatctgtcggtggcgcaaaacaacatagtgcagctaacagacaaaggcgacagcatgttaaggctcaaagaaatgaagcaagtggctactcaaatgagagcaaaggtagcgagggcaagaatgatgttgtctatcaatcagcaacacccgtcatggattcgaactcatccaatcacaggaatgtgccaagatctgatgtgaaaaacagcggcgtagtttcacactctagagcctggaagccgaaaaccaattcccatcctcaggacagctcagacggcaagattgctgttgacgggcaagtggattcccatggtggtaggcttgagatgaatacgtccaaaggatctgatacaattacccatctagtgaccagtagtgaaccgacgaaaaggagtgatggcaaagaggtctcacacagcaaacatgagaacctggcacgggaagatggtaaccagaagggtgagactgaacaggagcaggctaatcctacactacgtcgccaaggccagcccaatgcaaggtaccacaggggaggtgggtcacacaggggaagggggggttatgacactgggaggccaaaccatgtcacaaatgtggagaggcggaagggtggcagccatcttgaataccagccagtcggaccccaaaacaaagctgcagacttccaacagagcctgggcatggaagaacgaaccgaggggcctcctgcttctggacaagcgttcaggcagcgtggacacaacagggggctacgcccagcaggccgctttgtccagcgaaaccctgcttctacgcctaccactaattctcaccaaaatgaataatcttccgcggctgccacatccactgagcttcaggaactcgcgcttgtggtggtgtttcacaacagataggtttggatgcgcggcaggtgtccttctacgactaaactctactggtggtgagcattaggatcctgtaatgataatagtctttgtcccaagggcacctggaccctgtgattgtgggaatttgcctttgttgggatgcaatgttggaacgtgtactaacagagttgttgtgtttgagaacttggtttaaatgttagcctgtgatgctaatgagaacagaaagtgttggtttttgcccaacttcctggcctcagtggataatatgctggcatcaccatagcacgctggcgttttatattgttgtcgatggtgttcatggcaatttgctttggatcgactggattggatcgccgaaataatcaaatcgtatgtggttattttgataaacggggtggtgatcatcttggccctgtttactgtttagcaagctgtttaaatccatagcaaggtcaatgctaaaagctgttatgtttcaaatttattccttccattcc

SEQ ID NO: 24920 - DNA, 2212 bp, Zea Mays
cggtagtatataaagcgctgcaaaagtgcggccacaagctccaagccacggcccaatcgccggctgacactcacaagaacctgcctccctcggtctggatcgctatctcttttctagcggctccagagggagggaaagctagcgcacagccgagagaagaaagcagagagggagggagaacaaagagagagagaaaaaaaaaaccagagaggttgagcaagaaccgaggcggatccgccttttgtccctcctgcccgagggctagcctgccgccgcccccgcgagagatcgagaggaggcgctgttcagttcaggggggtgagaagccgtgggggaagagatgatgcgggagacgtacatggacgtgctgccgccggtggaccacatagccgcctcacggagcggcggctggttcccgggcgcggcgcgtctctggacggcggcggagaacaagcagttcgagcgggcgctggccgggctcgacctctgccgcccggactgggagaaggtggcgcgggccatcccgggccggacggtgcgcgaggtcgtcagccacttcaagagcctccaggtcgacgtccagcagatcgagagcggcctggtgcccatgccggtctacggcgccggggccggctcgttcaccctgcagtgggacggctgctacggccccgcggactcgaggcacaacggctaccgcttcggaagcggaggctgcgggaggcggcaccacggccgcaccccggagcaggaccggaagaagggcgtgccgtggacggaggaggagcacaggtgagtgtatgctgctgcatacgatacgatacgacttctgttatgttctgagagcgattgctctgcgtcgtcatgcggaagattggcgggagtttccgtcttggatagatagttgaatttcgccatcgttcagttgggtttacatcatctgagtacatttgcaacttgcaattaatcaactgtcaacagttaatcgcatttaatccctggaactttccttatcgagtaggatccgactctctaggacagtcatgtactactagcttgttgcacatatgatggccagcaaagcaagaactgatcaaaagttagtagcactgaacaagatcacgttttttttgtggttgatgttcttggggccaggctgttcctcttaggcctgaagaaatacggcaagggggactggaggaacatatcgcgcaactacgtccagacgcggacgcccacgcaggtggccagccacgcgcagaagtacttcatcaggctcaactccggcggcaaggacaagaggaggtccagcatccacgacatcaccacggtgaacctgacggacgacgagcgggcgccctcgccgtcgcggtcctctctgatcaccaccaccagccagccaaacgcgccggctccggccgcagcggtgataggcgggcccttctcgtcggcggcggcggccgaggccaagcagcaccagcacggcgctgggaacctgccaccgaaccggacctccgtggtgccggctgtttacaggatggacgattcgcaggaccacggcctgcagtgtggccctctgcgtcatcaactggtcgccagccaccacagcgttctgttttaggcgcaagcgcaatcccactttgaggcgcgccatggtcatggatccatccatcaggtgttgtctagtgtgtgtgtgtacgatgcgtgtgttctttgctgtagcttcagcgcctgtatcgaagtgattagccttttggggagggggggcgtaacggaaaggggatcttcggttccacggtggtccaggtccacaatttgttgttggtgatgccgagaacgtaacaaaaaaaaggacgccaagaattctgagtggacttggcattcaatcatggaccctgcttttgctcgccgtggcccgggatgatcagcagaacctaattctggatccttcttggtcggctgatgtatcccttgagtgaccttggtgaccatctcatcctgctgctgtctctgaagacggcgacgcgcttgtattggagggtttcagagttcagatcacattgctgtagtgtagtctagacatgtttacccatagtacgtaatcagtttttttttttggcactggcggctgccgaaatctgtgtctggacaggcttcatttctctcggatgaagagaagataaaaaacgaaatcgagtttgcgatgaaaaaaaaa

SEQ ID NO: 24921 - DNA, 541 bp, Zea Mays
ctccctgcccctcgttagcgttctaccaacggcacgttccttggtcttcttcctcgaagacgccccagccacggctccccggtgttcggccctggtcgctctcgcttgtcctgcggccgcgcctcccacttctgtgttctacgcccgcgtcctagctccctgacgtcgatttgcttgcatgtggcggtgagttcttcctcctactctcccgttgaagctactaccaggtcgtcgggctacatatctctggcctgggcactgctctcgcgctcgccgataccggtcgtcttcatcgttcgtgcgatgatcgagccgagttgattatgatacgataattaatcacgtgatgcggaagacgacccaagtcgaccccagaataatgagagagtggacatctccgcaagacgatgtcgtcagtcggacgaacctgaagatggataatctgacgaatgccaagacaaaggatggtcgccaagtggtcatcgtctaacaaacactaacgtagtgtttattccaggcaagccccggtgcatttaccccc

SEQ ID NO: 24922 - DNA, 2318 bp, Zea Mays
cttcagaggaaagcaaagtcagtgtctgtttgccacgagtgccacctctgcaaattaaatctgcgaggccaatcaaaactgtaggtgcagttagtgacgaaacaatggaccgaaggaaggtgataatgcaacgaattgaaggtgctctgtggacccaagagcccgtaagggttgctcaagaaggcaaaataactgtcagtgctctgtggtttgatgtaggtggaatcatattttcctctacaggggatgtccaagaatttatgttgttatatgtgaatcttaagtgcgacataacttcttagatgttttcccttacactcaaaatgcaagaaatatgcaaagcttggttgagaggtaccagagcatcacagcaacaggtcaaatggaaagcaaaaatctacgaagccagtctacctttctctttggatattttgagcaaaaaatctacaaagtcatatctatgaatctattagagatgttatactacctcttcaagtgaatgcatcacattgaaatgtaaccaactaaccaaggatagcatgagtgtgtaatttgagcatgagtaaggggcgtgagtaaacagattaaacctttttaagtaaaaacatatcccaacctctgatctaatactaaaataaatatttttatgcttaacaggtaatggaacattgggtttccttgttaaaggaagagatatgtctactgcggcatgatttaatttaaggtaaggtttcatgttcaagatgacaaccccatgaatgaattgcatcttgcttgctaatctatatcatgaattcagcaaaaaaaaaaaacttcagcaaatgttcatcctgcttgctaatctatcatgaattcacagtgaggccctccccggtgtacatttcattccaaaaatatctatcatgaactatctaagtacaactccaacacggcatgacaaacatgcgaagtaatacattacatacaaaatgctgacaaagctgtatgaagcctttaattgtggcactttgttttcaatctctcaattgctgcacaaataattgaaacagaaaaaccttagaactgactgttaggtatatagggccttactggtatactactgtctactattgcagtcaagtgtttcaatgggcaataaaagagttttgaaacacttcctacatggtaaagccaagtagactactcccttcgtcttaatatataatgtgaaaccgcttttataatacaagggatactctctctgtctctagatgtcggtaaatcgatgcagtagtactagtgttgagagaggaaattaaatatgttccttggtaattgaatcagaggtggttacgccttatatatcaggaccaagggagtagtaaacatcaccaagatactcaacaacaggaagttaatactagcaaaacagaaataacatccacacttgtgtattagctctaactgttagaacaatcacgaaacttcctattctaataatcaagaaacttttgaattaaaatacgatttaatgaggcatttagactaccagacatgatgaaccatctaacatataaaaaaactgacacatgaatcaaagcagatccactggagggggaacagaggacatgagactggagagaatgcatgtgcttgagaaaggtcttgaattgtggtattaccggacatgttccacaaaggcaagacaactgtatcccccttcttatttctaaactcgttcagattacacaacaaactaatgtgagacatcttttaccagatgcagatcatgcagcaagaaattcactttcttaaaaataaggtcagtatcaatgtctcataatcttccttgataacaaaaagggggtctgtgacagaagtaaaatagaagataacaatacattttcttgatgtgcaggaaagcatacttaaatcagcaaataaaattcttcaacagaaggtattttgcaatatttctcggaaatgaaattctcaacttacataatagcataaactgcaggcacaaatttaaaaaacagatttaggcaggaaatatgttaactacattaaattattaaaaggcaatttcaaaatcccgagctttattttggtatcttggggtccttttggacctttatctccttcttaatatattttcgcgcagctctcttgcgctttcgagaaaaaaatcccgagctttcaatgtcaggtaatattttttatgtatacaggaatgcatcctgaaagcagcaaacgaagttctccaacagaaggaaaatgagcacaatgaatttataaacaacagattggtcttttctggtttcatctccattggctag

SEQ ID NO: 24923 - DNA, 1711 bp, Zea Mays
  misc_feature (1282)..(1381): n is a, c, g, or t
ctccccgttctcccattctctctctcctctcccgagtccctccccctatccccccctctccgcctccgtcgctagggctccattcccctgcgcatccgccgccgccggatcccgcctcgcctccgccgcagcttcggcatcagaatcaccggattcggtggtgtttctcggctgcctcagcttccgccggcggaaggccccaggcggcgctccctgcagccctccggccttcactgagtcctctagaagccaaacatcgttgatacttagaaggcagctgagtatatggtatttgtgggccattgtgctgtccatgcgagcggagagcatgcgtggcacctgtgcttcgggtgatgcccctgaccagagtagctgccgatgcattcggtgtgctgacaatcgcactgtttgctctgtttgctgctctgggcctcttctgcatcttccagtcggtctacttcaggtgtcggattcggagaggaccctccttccttccgcttggttattttaacggcccatgggtgactcgcattgctctgattctgatcacaatttggtggggagtaggtgagatagtgagattgagcttcttgaagaaaaagttgttctccagcttaacatggcagaggaacatatgtgatgtgtacatactttccaacctagggtttgcagagccagggatcttctttgcgtttgcttttctgctccatggctcgttacaaaagagggagctgggcacattaaaccaaagatggaattggaagaccatggcctacttgttggttttctgtattccagtgttctcggtgcaggcaatcctagtgtttgttgggcccaggtttgttagagaggagaaccatgatctcgggagaagaaagattgctaaatacttcatacggacctacacgccggttggagataccagtgtttgcacttacccattgtttggcaccctttttcttggacttgtagatgctttcctgatgagctatgtatcatatgttggattacgggtgctgtccttggttattaacaagtcactgcgaaggagagtttatctactgatgctgtctgtgctgtgcttccttcctatcagggtgcttctcctcgggttttcggtgctgctcaagccaggacatgttgcctttgagggccagagggacatagcagaaatggtgccttatgatgattactactatgaaggcacatcgcttgtggccaaccagagtttccgagaaatcgagcggaattctgacacttcaacgaagccgggatccatatnnnnnnnnnnnnnnnnnnnnnnnnnnnnnnnnnnnnnnnnnnnnnnnnnnnnnnnnnnnnnnnnnnnnnnnnnnnnnnnnnnnnnnnnnnnnnnnnnnnntttttcccccaaactagcttaactcatcattagcccagcactctaattccattctatcaaagtagcaagtagctagatcttgcactggctgatgagctgtgttctggcattggctggaagaggctgtgagttggagttcacttttggttggttttgctgctccacaactcataatatctcccagccaataggttacaccatggactaggctggaatggggcctctgctgtgtcgtcgcctactattccttagctgtttctctttgtgacagctgtgccactgagtatatattatatgtatatttgcttgtggccttgaattaaaagcagg

SEQ ID NO: 24924 - DNA, 2778 bp, Zea Mays
atgccccaccaggcaccaggttgctgggtttgggcctcacggtccagcagatgccagccagttgccacgcgtttcatcagcccgacccaaccaaagccagaagacacggtgccgtcagctgtgctcccggcgctcccgcaccacaagcaagcgcgtgcgcgccgtcaagtcgcctctacagcaacttccaccgcgtactccctccctccctcgtctcgtcttcgtctccaggtttcgcgggggccaaggtttctgccggagcagtcgcggtctgcgctgcggcacggcgacgaggtggggatggagtaccgcgacaagctcgtgctggcgcccatggtccgcgtgggcaccttgccatttaggctactggctgctgaatatggtgctgatattacttatggagaagaaattattgatcacaaattcttgaagtgtgagcgtgttacaaatgaatctcttgggactactgattttgtggagaaagggactgacagtgtagttttccgtacatgcccacaagaaaggggcagggttgtattccaaatgggcacatcaaatgctgtgagggcacttaaagctgctcagatcgtgtgccgtgatgtttctgctatagatatcaacatgggttgtccaaagtctttttcacttagtggagggatgggtgctgcattactctccaaacctgagcttatacacgatattctgacaacactgcggaggaacttggacacaactgtgacatgtaaaatccgtcttctgaacacacctaaagacactgtggagttggcacgccggattgagaaaactggtgttcctgctcttgctgtccatggaagaaagattaaagatagaccgagagatcttgccaagtgggatgagatagctgatgttgtgtcagcgctgtcaattccagttatagctaatggagatgtctttgagtatgaggattttaagagaattaaagatgcaacaggtgccgcgtctgttatggttgctagaggtgctatgtggaatgcctccatcttttgtgccaaaggaaaaacaccttgggaggatgtcaaaagagagtatgtaagaaagagcatattgtgggacaacgatgtgaagagcacgaaacataccttgaaagaaatgataatgcactattcttgccttgaacttcctgaggggaaaggcgttataaagtgtgatacatctgaagatttagcgagactatacggggaagaggactactataattttgttgttgcaaataggaaatgaatacaatttgatgttgtgagctctcatgtgtaccaggtatctatttccgaatacattgggtctagagctagtgaaaaaggaaataatattatgtgaaactgatgaagttgatagtttcatgtagtctacatgcggtactttttccttgcaaataacaattacttgcaaaataagcatgtttgttgacatgggtttcaaaactaaaattggttccagttccttggccaggtagccactcttaataggggcttgcatgctggtagtctgtaaactagcgattagagtttgtaaatgtatgatactgatcaagaagtcaagaactggctaaactaaatggtattttacctggacccagcaaaaccggtgaaacttgcctggaacttgaagaaagatgttcacttgcatgattaaattgcaaatcagaggtacccatggccacaatgtaatttcgaaaggttttttcatcataataaaaaattgcaataattcagtgatcaatgggtaatggagcagaactctcaacttcatgattgattattcgcttcgattaaagccagctgtttggactgctgtagctgcaatccatagagataaaacactgtagaagcaatagaagcctacggattaaagtcaagcaaacaggctagacctctctctttctctgaaaaatgtactaccaagaacctgcatatctacatacaatgacacctctcctcacctgcccgtgacgctgagctgccttcgccccccccccccctcccccttcgccgccgctgcctagatgtttcatttcatctttgtgcgtgtgaggcacacggcacgataaggacgaatgttgggtggggctgctccctctttcaatggaatgacatggtcaatatcacgttgaggagggacttttgtgtactcctgacagaattcagagtattgttgcagtaaggcttgaatagccagacgaagagtgtggtgcctgcagagacaagctgttgagatgcagaatgaaactagaaatgcctttgttgagaagcttgttcattatccttttcagttgttcagtgtacgcatcctgagatgtacaatcctttaatgagaggagagtatcatcttctaaggagtcaagggtgttgttcaaggcatgttcctgaatagagaatgcagtgcctgttatgattgccccagatcttctgcttggattcctatctcaccctttattgatgggattaggaggaattcctgccaccaaggacaacgggatttgccattttggcgctgtctggacttaacactgaagctgctgatctttctcttgtactggtaatagttaggtttatacctgaaattaatcaaacaccatttttttgtaacaaatactaatttatttgctttctatactatggaaattttgtcatgtattgttggtggaaatactattgcgcttttgaaggaattgaaagactttgatatgttgactactattatggccctatggtctaagaaatattaaatgttttcatg

SEQ ID NO: 24925 - DNA, 571 bp, Zea Mays
ggctgcgaggcagggaactgaggaaacgtctcgaatggtcgaacagtagtttgctcgctattatccatggcgacttctacggctgctgccactgcactgctccgccccaggccggcagttccagccaagaggaggtgcctccatgcggttgctgggtggacgacgatgaggaggaggggagctgcaggggtcgtgcgagctttcttcaaccctctcggggatgagcgcatcctccgagaagccatcaaggagccagtagcattcatgggtggtgtgtttgctggcctcttgaggcttgacctgaatgaggatcctctcaaggaatggataagtcggacagtggaggcttctggaatagctgaggaaaacagctctgaagaatcaagtgaggcagatcaaaatgatgcacctcagcaaattgagattgagtgaggaatgtttggtactataagttactacgtacagtacatacacagttcctccaagagaccaagatacatctttgaccagactttggctgtggtaggtttaaggtactttccaagacaagtttctgtccatcattttcatg

SEQ ID NO: 24926 - DNA, 3362 bp, Zea Mays
aaaaaaccgaactaaacacgccctgtatgagttcaatgaaattcctaaacaagaagctacctacttttcacgttgagaagatcaaacaaacatcgaaccagaacggctgaaccgaaccggcggcggctgctcgcctgccctgaccagtacgcggcattaaatgcaagcttgatctctgggcatcagaaactcgaaagaaatagcccagacagcccacgatcggcccagtctcatcgcaaacgcacgcgcacgtcgccgtcgccccgctgtaaccctacctgccccccgaagcttccccgtccttctccttgcggcggccgcgggcggcgcggccagtcggcggccacccgcccccatctcctactttagcctcccaacctcaccgccgctgctcgcctctcccccgcccccttccccactccgccccgtatttcttctccttggcgctcaggaggacccctcaatccacctggtgggatctgatcgcaatcggatccctctcttccgccgcggccgcctctccggggaggagccccgggctcgaagagacggaggcgagggtagacgacggaggcgaggaggacgacgaggcggaggaggggaagcccatgccggccgccggttcccgccgattcactcgcgtcttcatgcccaaggcccccaagccgccgcaatcccaggaccaggccgaccgcgccacccgggtccttcgctccgaagaaaacggcgccgccggaggcaccccaccgctgaggttgtccccgaggacgaggacggcatcaggaggtttgggatagtatacaccaggaagaagggcaagcgatccaaggtcagccctctcctgctcccgcaagagccagaggccccctgtgacctcgccgctgcgattccatgctcctcctcccgggagtttgcttcacgaactggcttcttggatgcccatttctcggccctggtagatggtgtctccactcactctggggttcagacgctcgttgtccttgttgatacgtcttgctctgggagctctcaccggctccttggatttcttctacccgtgctgtggtggatgcgccacagtaggcagcggggaaagttccagaaccttgccactttcattttgtctgctggtgtggcggttgcgtttgcatcccacggggtgcactttgtcaagctccagagtgcctctgcattgttacataggcctcttgcgcattgtgggtggtgtgcgcttcatggttccacgaaatctgaaccacttttgtcagtcgatttctcagcacttccttcatacttttggagcttgcattatgccgtagctcttgattcgatgtatctgccacctatgattcggcacagctggctgctggttgggggatctgaagaaatctatcctcacactcctttgtatgtggattctggggctcagagcagtggttttgccactacgaacatggacagcaatgaaccttgcagagtggttccaaactacatgccccttgaacagggtgctggtctagtggttcatggtctgaggctaaagaagcatcaaaggcggaggagaactatgaggcatccccaaaattggcggtgtcttatagcaagattaccttacaatggaattgggatgaagcagagcacgtctgccatgcaaacaggagtaaagctgcggtcaagcaggcaagaatctcctgtggagcctgtccaacctaaagcagcattaggaatttctcttgatttgcttgaaaacatggacgaaagtgatgtttcaactcccatgggatcaactaggagaaagagatctttgaagagccctgttgagagaatgaatgaaaagctggccttggctgaggtgagacaggacatagattctgttcacagcaaagcaaaccttttagtttttcaagctgataggtgctggagggaggaaggtgccgaagttatgctagaactatcagaaaccaataagtggtgtatagttgtgaagatacaaggtgttactaggtacttgcttaaaccttcagatatgaggtcatatgtcattaatcgtcatactcaagcctacatgtggacagttgatgatgcatggaagcttgagttcactgataggtgggactggctgttattcaaagagttgcatgttgtgggctgtgagcgtaattctcagggaaaggcaatcccaattcctggggtacatgaagtttctggtgagatggaagggattgttacagatcctttcttacgccctgtgccagactatatcaggatggtggatgatgaagttgggcgagctctctcaagggattctatttatgacatggactcagaagatgaacaatggctcattcagttgaaccattcagattctgatccaaacagctctcaaaggaatcatatctcttacgaagactttgaagtgttaataagcatatttgaaaaggatgcctacaacaatccccaagggaaaaatgatttgagcgagcttctttccagatatcctgctttactaaaggatgataacgtgcatgctgtgtatgggtattggacgagtaagaggtccaagagagctgcaccattgctaagggtatttcagggcgcacccataaggcgaggacatctaccacaaaagtctgccatgaagcgaaagagatctttcaagagacaaaaaagccgagctggccgtggaaagcatgaagctttattgcaagacaatgctgaagatgaggcagctttgcagagagttgcccaagctgatcgtgcagcaaaacgggctctagaaacagctattcaactgcgcaacagagcccagtctctcatgacaaacgcagagctcgcagcatacaaatccatcatggctctcaggatcgctgaggctgctaggatatctgactcttcccgagatattgtttgtacaatcctcgactaaagatggatatgggctgatcgatttgtgtggagggcatggggaatactctttttttttctttggttgcatcattgcccatgatgttggcttttcgacaagctgtggggctattttttcgccctcccctcgggttgtcaactttgtcaagccaattttgaggtggaatgcttgaactgaaaactgtaattccttgtataaattaaagtagctagctaggttctgtatcttatgggatctgatatgtagaaatgatgaaaggaaaaggtaaaaaaaatgcatgagatgaagcgaaatcaagcatctgtttgcatcctttttgtgtgtgtgtgtgtgtctatatatatatatatatatatatatatatatatatatatatatataagcaaaataaagcttatatttgtattggataaattaataagtaatgaaatatatt

SEQ ID NO: 24927 - DNA, 2743 bp, Zea Mays
cctgcatcggctgggctctcgccaccgcagcaccgccccgccgctcgccgaccacgcctcccgccgccgcagagctccagctctcactcactgctctcgcaggcgtcctcttccttccgcttccgcttctgctggagacggtatccgtctggacctggaggactggactgggctctcctttcgctggtcatatggtgccatcggaaccacagactgtagttgagaacaagcattccacaagtgtgggtgccgaagagcttcttttgacaaaagatgaaagcacatctaccactgtcgtccaaggtgcaggctccttaatgtcaccaaaaggtgttcaagaggaagctagctttatgggtaagggtaaaggtggagaacaacagttgggctaccagcccaatgtgtatgtttctcagccacacacacccttttctggaggatactcgaaccatttggatcaatgggagggatacccatatgctgtgagtgcagagggacttgatgctgcataccctgtgacgtatggagcttattcccctttgtcagccattggagatagccatacatatttctctttgctctgccccttgtcaaggccttgctaccagccacctgcttctccaaacatgagatattcaagtcctgtgactcctagcttctatcagccttttggttcttttaacggagttccaatgcaaccgagtagttttcctggattttttgggcaaggaaacatacccctgacttctagaatgcatcaggagtccatgtctaattctggatcacacaaggcattccagcaaggtggtaaatttggaggcagtacacaaagttggagcactgctagttgcaaattcggtaccttcaaggatgagaagtgctctcctgactttctgaatgagcaatgccgtggcccaagggccaccaaaacaaggaaagaagtggggagctcttcaaccgaagacaaaaataagaatgtcttgccaatagctgattctgataaatacaaccaccctggttttgtgactgagtacaaggatgccagattttatgtaataaaatcctacactgaagatcacattcacaagagcataaagtataatgtttgggccagcactcccagagggaacagaaagttaaatgctggttatcatgaggcaaaagcgaaggaagatcattgtcctattttcttgtttttctcggttaatagcagcggtcatttctgcggtgtggctgagatgattggacctgtcaattttgacaagagtgttgattactggcagaatgaaagatggaatggccaattccctgtcaaatggcacattgttaaggatgtcccaaacaacattgtccggcacatcatcctagagaacaatgagaacaagcgagttacaaatagcagggacacgcaggaggtgaaactgaagcagggtctccagatgttagccatcttcaagaaccatgaagcccagacaaacatccttgaggacttcgacttctatgagcaacgagagaaagctatgctagatgacaggcaacaacagaagccagagtgttccgatactggcaagcaggtgcaggccagtgcaccggtggatattgtgactgatcgaagaggacatgctgaaaacagcggaagtgggaggcctcttgaaggaaagcgggtgattgctcgttctccattcatgactaatccagagcagcagctgggcccatttctgaagccatttcagggatgagagaataagagttatgcaaatatttgcagccacaggttcaaagcagcctctccgcatttgttgctcagacctcttatgtggagtctgacactgggcccttttgtacagcatggtaggctagagacataggctttgttttaccttcagttagctttgttttttaccttcagttaaacagactacagctagttacagagattcctaaattgtcaccgttttcctccgctcactgctttgttaactttttttccactgaccccctgaagaattgtgctcaatgtagccaattagccaggaaaaaaaagaaaaatactattttctattagtcccgaccaaattctacatgttagcttggactgacgctatcagaactattgccattggaacaattcattgtcaggaaattatacatgctatatgctcaagcaacgaagtatttgtgcatattccagtaggagggttataacatgaacagaccacctccagtaggaggcacattccagtagcaggatcacaagaacattacaagaataggaaccctgcatgatgtttcgacaggacatagactagccctaaaacatctcaagagtctgaaaacgcgaactaggtatatttctaagtgcaggaatatttcaaagacaacaaggcttacacctgagtatacacacatacagccataaactcaggtgtgctttctacttcagctgagcgaagtttggacacatgataaatacactcaattacgcttccatggagttcatttcaactctcttgtttgattcagtcggtagtcatcggttgggacatgcaacaccgaaatcgggccttgcggacagtgctcaggatctccatctcagcatgctccagcatcctcacaacttcagtgaatggcggacggacatcaggatttggatcccagcacctggtcatgatctcagcaagggtgggcaggcagtcctggggtatagctgggcggacacccttgttcaccacagcgaaagcag

SEQ ID NO: 24928 - DNA, 3355 bp, Zea Mays
cctcctctccttatcctcctgacctcctctgacctctgcccccccctccattcccatttcccacgcggcaggcagctagccctacctctggtctcctctgccacctcctcccctgccacctcctcccctgcctagggtgcgccttcctcgccggacgccggcgcagggtcgggacgcttccgctgccgcgcgttccacgacccctctctgggagacgaaactcggcgccggcttggtagatacagacctgggattgccttttcctagttcagcatggagggcactctagttcagtctgcggttgttccaaccgtttacagaagcagctcaggtcggttccgtgtgcgtgcaagggccagaaccaatgctacaatggtgcgaaatatgccaacaaggactcttactcttggtggtttccaaggattgcgtcagacaaactttttagacacgaggtccgtgatcaagcgtgactttggatcgatcgtggcaagtcagattgcaagaccgcgtggatcagcctcaagaggggtggttcgtgccatgtttgagcgcttcactgagaaagcaatcaaggtgattatgcttgcacaggaggaggcaaggcgcctgggacataactttgttgggacagagcagattttgctggggcttattggtgagggcacgggtattgcggcgaaggttctgaagtctatgggaatcaatcttaaggatgcccgagttgaagtcgagaagataattggacgtggcagtgggtttgtggctgttgaaatcccattcacacctcgtgcaaaacgtgtattggaattgtcccttgaagaagctcgtcaacttgggcataactatgtaggatctgaacacttgctccttgggctacttcgtgagggtgaaggaactgatgttcgatatgatgttcaggtcataagaatggttggggaaagcacagaagctgttggggctggagttggtggaggaagcagtggccagaagatgcccacacttgaagaatacggtactaatttgacaaaattagcagaagagtcgtttggtagacaagatcagattgagcgtgttactcagattttgggcaggcggacaaagaaacaacccctgcctaattggagagcctggtgttggaaaagactgctattgctgaggggcttgctcagcgtattgccaatggggatgttcctgaaacaatttgaaggaaagaaggttattactcttgacatggggctccttgttgctggaactaaataccgaggagagtttgaagagagactaaagaaacttatggaggaaattaagcaaaatgaagacattattctctttattgatgaagtgcacacactgattggagcaggtgcagcagaaggttgcattggtgccacaacactggatgagtataggaagcatatagagaaagatcctgccttggaaagaaggtttcaaccagttaaggttccagagcctactgtggatgaaacaatacagatcttaagaggacttcgtgagagatatgaacttcatcacaaactgagatacacagatgatgctttaattgctgctgcacagctgtcttatcagtatatcagcgatcgtttcctgcctgacaaagccattgacttgattgatgaagctggatctcgtgttaggctgaggcatgcgcagctccctgatgaagccaaagagctggacaaagagctgcggcagataaccaagcagaaaaatgaggctgtacgtggccaagatttcgagaaggctggcgaattaagggaccgagaaatggagcttaaggctcaaattacagccattattgacaagagcaaggaaatgattaaagcagagactgaatctggtgaagtcggtccgcttgttactgaggcagacattcaacatattgtctcctcttggactggaattcctgtggagaaagtgtcatcggatgagtctgaccgcctcctaaagatggaagagacgctgcatacacgtatcattggacaggatgaggctgtcaaagctattagccgtgctatccgccgtgctcgtgttggcctcaagaatccaaataggccaattgccagcttcatattctctggaccgactggagttggcaaatcagagcttgcaaaggccctggcggcctactactttggctcggaggaggctatgatcaggcttgacatgagtgagttcatggagcggcatactgtctccaaactcattggatcacctccaggttatgttgggtacactgagggaggccaactaactgaagcagtccgtcgccgcccgtacacagttgttctctttgatgagattgagaaggcacatccagatgttttcaacatgatgcttcagatcttagaagatgggcggttaactgatagcaaggggcgcactgttgatttcaagaacacactattgatcatgacatctaatgtcgggagcagtgtcattgagaagggaggtcgcaagattgggttcgaccttgattatgatgagaaagacacaagctataacaggatcaagagccttgtgactgaggagttgaagcagtacttccggccagagttcttgaacagattggatgagatgattgtattccggcagctgactaaattggaggtgaaagagattgcagacattatgctgaaagaagtgtttgacaggctgaaggccaaggacattaatctccaggtgacggagaagttccgagatagagttgttgacgaaggttataacccgagctatggtgccagacctttgcggcgtgctatcatgaggcttctggaggatagtctggcagagaagatgctggctggtgaggtgaaagaaggtgactctgccatcgttgatgtggattcagatggcaaggtaatagtcctgaatggtggtagcggtgttgctgagccactggaacctgctctcagtacctaaccgaggttaaaatctttgggccgaaatggccttctttacaagtcagctgggctcttcgtgatggtaaagtagactgttattacttggccgctccattagttgctttatctttcattgatttttttttgttggaagtgaggcagtagggtcactatggaaacgaatagacggagaggcattagccgaaatgaatgtttttcagtttgatgcacttgtattattaggccttgctagcaacaaggtgcagatgcctctccgtttgctgttgtactttagtgtaacttaccttccgaatgtattattaggcgttgctagcaacaagatacggaggttatacatttgattttcagtaaaaaggtagactctttgttgcgccgcagctgttttattgtctgcgcactgcagtgttcgttca

SEQ ID NO: 24929 - DNA, 1104 bp, Zea Mays
  misc_feature (1104)..(1104): n is a, c, g, or t
cggcaagccaagcctatctcctatctccagcagctcctccagacctccacctctctatggcgcgcctgctcctcttcccatcccaagcgtgcgtcgatcctggccgccacctcctcctccacccgccggtctccaggccccgtgctgtccggtctgggcctcctcccgccgcgccacgccgcaccggggtcgtctctcttcccggccgttgcccaccgcccctttgctggaaccaccatccatttcttccttgcagatcatcaaagagaggatgggtcgtttttgcttcagaaaacgtacaaggatgaaaggagaagtgggaatttgcttctgcgattcagtgcactcccatattgcactatggcttggttgagcactgctcaattagcacaatctagtgttggggaaaagctaaatatggtttatgaggtcggggagctgtttgagctgggaattcagctgtcttatctgctcatacttattggactgcttggagctggtacattttttgttatccgtcaggttcttgttcgtagggagcttgatctttctgccaaagagttgcaagaacaagtgagaagcggtgatgcaagtgctactgagtattttgagcttggagcagtcatgctacggagaaaattttatccagctgctatcaaatatctgcagcaagcaattgacaaatgggacagagacgagcaagatcttgcgcaggtctacaatgccctgggggtcagctacaagcgagagaacaaacttgacaaggcgattcagcagtttcagaaggccgtggagctccagccaggctatgtgacagcttggaacaacctgggtgacgcatatgagcagcagaaggacctgaaatcggctctcaaggccttcgaggaggtcctcctctttgatcccaacaacaaggttgcaaggccacgcgtcgatgacctcaggccgcgcgtgagcatgtacaagggtgtgcctgtaaaatccgaaaagcgatagctattcttttttggtggtaaatcatgcatctgtctagtccccagaatagcggttgtttatttttgaacggtagcatttgtaaacatgatgagatgtgtagtagcatgn

SEQ ID NO: 24930 - DNA, 3147 bp, Zea Mays
gaacgcgtgtgtatggatgccgaattcgaacttcacgcgccttgtcctcctatgctcccgccgtttcttcagtgtcgttcgccgaactgctgaaactttgtctgcaattaaaaaaggcaccgtgttggctacatccacatttcctcgttggtttgctgatgtctttgcgtttggatcagtgcctctgaggacgtatctccccgatggcgacgttgatataactgtactggggaacacatggttaaacagtacattcatcgatgatgtccgcagcatgctccagtcggagcaggaaaactgtgacgccgagttcaaactcacaggcttgcagttcatcaacgctgaggttaagcttataaaatgtgttatcgagaacattatagtggatgtctctttcaaccagattggaggggtgtccacgttctgctttcttgagctggttgaccgtcagattgggcagaaccatttgttcaaaaggagcattatgttaataaaggcctggtgctaccatgaaagtcgcatattaggagcacaccatggactgatatctacttatgccttggaaacacttgttctttacatattcaatatgttccacaagtctctgcatggtcctcttgaggcactttataggtttttggaatattttagcaagtttgactgggatcggtatggcattagcttaaatggtcaggttgatttgtcatcattaactgtggaacctacagatgtacaaggcgaatcattgcttggcaaagaattgcaacaaggctatttggataggcttgttgtaattccaaatgagtttgacggatgtggcacacaatttcgccagaagtttttaaacataatcgatccactcaaggcgaataataacctcggcagaagtgtcagcaaagcaaacttttatcgcatacggagtgctttctcatttggagcacagaagcttggtcaaattctcctgttaccatcagagtacattcgtgatgagatttatggatttttcgcaaacacactgaagagacacggaaatggtgaaagaccagacgttgacacttgtagttcattccatccctctcgtggtcccgagagtgcgcttactgaagacggatcgaagtttaaattttgttgcatgaatgagggtgaaaacggaagttcatgtcaatgccattcatcgaaactgcctgacaaggattcgagtgtgacagatgcgcataaaaattcaggtaagtatttgcctggtcttgttcaggatatttcttggaacaaaatctggttcatggaatatgcatctgatttcaaagaacatacatcaactttagcaagcttaagcagccactcaccctgttctcaagataatagtaatggaagcagtgatgagtgcttcgagaattatgcagcagaggaagatttacaccagaatgtgccgcagcagatttatccagagcatccatcacatatattgacaaactcgactagtgcaaatatcttggatttttccagttcttgttttggtgatgagtcagattggactgctccccgcgcaggaaaaaagctactcccacccttcttgctgtcaaatatgctggatctctcaggtgatctggagttgcacttagggtgccttcgcaaagttcagtaccacctggagtcattgtttgatgaactcctgcaggctgttgaagaagcatgtttagctgatgtgctagatgaggattctttcaagatgtcggacattatcttgaagttgaaaactagcactagatcctcaagcctgtcactagtttcatctactgatagcgagagaaggaaactatctcatgtgtattgttcccatagcacaggagacgatttacaactatcacatgctgaggttcaagtggatatggtttggcagcagaatgtgccattgtcccccaacggatcaacatttactccatctccttcaaacaattcagataactatcatgtttcttggttttgtttctctcctacatcgcatggaactggcacatacattcccaacatgagttatcatacatacagggaacgtatgatgcttgaaagagaaaccatacgagcaagaaaacaacgacagaggtttcctgatcgtcggtattactcagctgagcaaggatttgccgattcacaaactgaagacagcgtagctcaaagtggaacaaatcaatcgccgactaagcaaaacagtgcacaacagagtggttattcgagcaagagctcaatttcggatggagattttgttcgtttcaaggagcatgttgcaacaaatggtggaaccaaacaggcagtaggaagagattttgttgagaagggaagacacacaacgccaccatcatctccgccaatgacagtacttttacaaaatggacaaggaaaacctacctgtcagccttcctcacctgtcacagcagatttgttcaatgcggcgaaaagtttggagttcggatccttggggccattctcattgggacttccctcaacctcgacacagtttgaggaagaattcccagcgcttcctactagaaagagagccgaaggccccatttcagtggcgcccagcgctaaggctgttgaaaccaaaagcaggtcagaagagagtgaagagatgttccgactgagaaatgaatctgatttccctcccctccaagctggctgccgctgagactgacaggacgtcgagataatccatgctaatcgtagtggtagaagttaatgacgggacgaggctcggagatacagcaggatgtcggataggtgccccggcaggattttcgtccgacagtgtagcaagtttggatgcttggctactcacctttgtgatgtggtggcaatgtggtgtcgtgtaaaacaataataatcctcatctcacctttatttcattttattagatgaatccttagataaacaacacccagaagtcggagtgagcaatatagtttcgtctttagcatagacagtccaaaaaaattggataggggaagtagaaaatgttccccaaaaaaggaatcgtgattctgtagatttttttaagcttttgatttaaaaatagagaaatgaagaaaaggcatttaggtgcagttgtttgttgtatcttttctattgcttccatgcatttcttttaccgag

SEQ ID NO: 24931 - DNA, 668 bp, Zea Mays
tctcatgaaaagatctgtggctctaaagaaagggctgcccattcttggtgttttcaggttgcccaatctgccctatcttgattagtccacgttgtgtttgtcgtcgatgtttagacacattttgctcaattccttgttacatttaacgctgcttggcatcgtccattaggagctttatcgctgttggagtggatctagctgttatgggcgctggtcttactgtggccattcctgctgctgtgaagtttacttacctgctatttttttctgagcaaagtcggttaaacttgtgattctttgtatgttcaggtgcccggtgcgtggctactcttctaaatgaaatgaagcgtcggggcaaagactgcagatttggtgttgtcaccatgtgtatcggatctagaatggggacagcagctgtgttcgagctgtgttcggcccggctggaggtatcgaccatcactcgtcactgtaacccgatggtgatcggtgatcgtgagcttccatgttattgcattctgatacttgagacttttattatgactatgtatgagatattgtctcttattagtactgggatgatgagatgtgtcttattatgactatggatgagacttttgtgatgtaattgatgagacttttgtgatgtaattgatgagactatgtattta

SEQ ID NO: 24932 - DNA, 630 bp, Zea Mays
attcgctggagccaaacatctggctcttcttacagctccattccagatgtgcccagtttgcctttccaaaccccgggacatggcatttggttgtggccaccagacatgttcagaatgtggaccgcaagtcacagattgccccatctgtcgaaggcccattgacacgagagtaaaattgtactaattatttttgggtggaactaggtttaactgaagcacatgccaggagtagaatccactaaaataaatctctatttgactgttaacgatgtagtgtgaattaatttaataaatcagacgtagagaaaaggaggatacttgttctttgcttgtatcctgttcctacattgtgcgttgatagatgtgaggctacttccattatctgatactggacaggcgccctacttcgctgcggcgattacatataatgttgaagtatggttatggtttgtctgtaaactggatggtatttggcttgttagtatggataacctagcttgtatataaagagacaatcattagtagatgatgtggtttgctaatatgaataactaaacactccctctattcccgtttataattcgtaccattccgtcttattcatcttttttttttgcaaaaaataaaaaa

SEQ ID NO: 24933 - DNA, 1064 bp, Zea Mays
cgaaaattgtctaggacatgagcagcgttgccaacggttcgcgtagagccagtccgcggatccacacgaaactgcacacgacgcaggcactcggcctgccgtgtgtccctttcggccttcataggcgcacttctccctcccgctctcgcgccgccgccctcgtgcgtttgagcgagatccatacatccccatcccattttgcacccggattggcttcttcttctactactgcacttcttttgtgtggctgcaaagttctgtaattctagaggagcaagatggatattattatcatcatctcacttgtcattcttttggcactaggagctctctttgtgatcccaaagtcacaaaataaaggtaaatcaaagagaaacgacttaggagctggaacgacatctaggagctttacgacagaagagatctctaaacattccacaaggaaggactgttggatcattatcaaggacaaggtctatgatgtcactccttatgtagaggaacatccaggcggagatgccattctaaataatgctgggggtgattccacggagggcttttttgggccacagcatggcactagggtcttcgatatcatcgaggatttctgcatcggtcagttgaaggcttcatgatgatgacaggatagtttgtattgaatttattacgggacataaatttgtgagaagctacattttatctatgtttgagcattgcgaccatcgagcatatgaatgccagtataattgttccacaactgttattaggcctgccctgagctgtgatgtaggagatcgttttttttcccctctgatggggcaatgtgagctgttcgaccactggttgttgtgcttgcacatttctgttgttggacaagactgaaacgtttttttcccaattgttttgtttaaatcaggactcgtttctcatgatcacttctgaagggatgttatggttaagatgttgcaagtttgattttaacttggtcgttgaatgcgttttacgatttgttgctctctaaggttaggtggtgtgcaaacatgaaagtgaaacaatttcaagag

SEQ ID NO: 24934 - DNA, 460 bp, Zea Mays
tgcacgtgaattcagagatggctcgaatatactccctctatctcaatatattgttcatttcagttctttatttttgtgtccatatttaaataatgacaataaatctcatttatataaaacacatacatcaaatatttaaacgaacagggcttgaatgagaaccacgcacatcgggagctctgcatgcccacgaccgcgcagggttcggtcatactcatacacgaagttttggttctgtttggcttggcgccttattcttctctgccctagcttgtgcacgcgacccatctgccgagttgtccgcttcagaagctgccttgaagctgaaaatagttgtaggggtgtagtttgctccaagctcatctccaacagtgacaaactgacaatcaaaagtcacatgataagtaatatacactgctgtccaaggtggtacagtataagcaccaatcttgtatgaaag

SEQ ID NO: 24935 - DNA, 323 bp, Zea Mays
gcttggctcaagccagtatggaccagcagagaacctcgctcttcctcgtctccgatatgcaggctggaagggagaaaatggactgggttgcacgcatgcaggcgggctcgtttcctcgtgtccagtcaacgtatctggtgggcctggacgtcggtggcgcagcaacccatcacaagttataggtccatgttgtttgacctattttacttttatatgagaaaactgtgggcatatcacttttcttggccactcaagacgaaactcgctgatgcacgtagcactttgatacaaatggtgcatatattatactccctccgtagtcg

SEQ ID NO: 24936 - DNA, 1417 bp, Zea Mays
ttgaatgcatcatcttagtcatcagttcctgattttatttcgcttgtgggcaagtggtgatcggagtttgtctctgtcggcatttcttatgatccgagaagtagcttcactgttacctgactgtttggatcactgtttaactaaatcctacaatacataccttgccagtaccaatcttgtgaatgacagaaacacaaagcatatttattttctgatggactgcctggtagagctgtattctcttgatgttcagaaatcatatgagagggcaataatctccgtggagcaactgaatgctattcttagacaggcttctaaaaccaaggaaaaggaagatctcaggaagatagataactggcaatatattagttgtgtcaacctatgggttcggtttctgtgttgtcactataaggattacaatctccatcccttattttctcaagttcttcaagtaataagaggagtggctcacttattcccaggcacaaggtacttaccgttgagactgaagcttgtgcagatgctgaacgagctttccacttgcagtcagatgttctatccaattccatcgttgctctttgactgcctagaattaagagaagtttctcagaaagaacaaacacaaagaacaaagatcaacttttcgtcgttgttgaaggtgccaaagaacctgctgaaatcaagggattttcaagaggagtgtattctttcagcgattcagattctatcagcacattttgcccagtggagttaccatgtttccttcccagaagtagccaccattcctcttgtcctcttgaagaggctacatgagcagacaacagtcgaatcacttcgccgtcctattaagcgtttgatagaccaggtgacggagaacaaggattttatagaaaggaaaagagaggttgtatccttttcaccaaatgataaggcgtcagttgatagcttccttcaggaggagaaggtcagcagaaccgcttcattcactcggttctatgcatccgtagctgaaaaccgtcaaccaaaatggagaaaaacactttaaaataccaagggaatttctgagagacatctcacatctggaatcggttggtttccaagtgagggccacgaagaaccacatcaatgtagaacattttagtgcagatatacgccgaggcagctattgtgtaacctctagtgagactgattcctacgagtcctcgagtgctcaacaattttgtacgattgtaaccttaattccgaagtgagttgtcaagtgatgaatgaaatttgctgttgcttttgaatctgttgtcactgtgcccgtagtacagagtatggactgttgtcatttcctactatgggggaagggatttaatcttactcaatccactctaatccctgttttagcttatcaatttgatttgtatgggct

SEQ ID NO: 24937 - DNA, 4402 bp, Zea Mays
acgtactctgtcaaacgatacgccgcgatgcttccagacgagcgccatccccttcctcgcctcacacgccgtcctgttggtcgtgcctctcttcaacctttttttcttgagcattagcgagagccccttacatggtgcagtgctagcatcgttgctggcgacctcggtgaggtcggatctgcaaaggttgcagctagcgcgcctacactacatcaacatggtgtggcatctcctttcgcagatccccaacatgctacgccgccggctgcctcattggaactcctgtgcaccgcttgcctttcttctcccattcaacccgcaggcgttccctggctcaatagcgcaactaggggatgtccgccgctacctccatataggaaacgacagatttagattttcaggtgatgcgtggtcgggatcccggatcaatcaaaataagtgtgaaataagtgtgaaatttgagaggctgttgaacttccagatcaggtaccaaccaaaaaaagtgacccttttgacggcgtattgcgtgggcaaggcatgccagtgcgacaatagagaaactaacggggagctctgttcgttctgctgattgcttatgattaggctcgcagtggtggtagctgggagagcttgggactggccagacgcgaccaactcacccatgtaataagacaacttttatacatagccgacagtacgcaacctcatgcgcaagatccttaatgaaaccaaagagctgcagcagataaccaacgacaagcagaaaaatcaggttgtacgcatccaacattttactttcatatttgctgaagatgtcaacaaacaaaatagacaagcagcccagacaatggagatgatgtatacgataattgcagatgagttcaagtcaatggacaataaggacatgcgccctgaagattacttgaacttcttttgtcttggaaaccgggaagaaccaccatctaatggcagcccagaatcagagaaatctacatataaaagtgcagagatagtctgtttttgcattttccttattcttaagggtatggcttagctcaacccttctgattacaccaaaactgaatatggttttggcgcacggaccttatgggaagctagagaagcatttgaagacgcagaaattactcatgttgacgatacagtagatcctgttagagacatggaaactattagtgaagagctcagactaaagttttcgttggattttgttgatttacaagatcagctgtacaacacttaaaccttttttcgacactattctgtttctattttctgcaggatatagagttcatgaaaaagaaacttgaggaccttgataagccaatgaagaggaggaatgataagctgctcaaaattgagcatgaattatattgatccagcacaatgccgaggagactggagactaaacttggaggtgctactgaaggatgtgactttgagtcaaagggtaaaagtgataatgagatgtgtgtgttgtattttcattcctcgggacaataatgttatttgtaggtagaagttattgtacatctgttatgtgttttctgcctgatcgtcgtttatgcttgcctcttgaagtaacaggtagcacatggagagcttgaattgaattcaagcttggatatgattggaaaatatttgtattagatcacctagaagggtgattgatgcttgttattggccaagcaggtaggtatcacatttgtctttcttttgctgttgtaggttttttagttgtaactgtcttttgtgttgcttgtttgaatctgggctggaagaaaaaggtgcaaaattgaatatgaattggtcttggaaaattcaaacacattgattttaaatattatgagatccttatgtttcttgttctttagaacaactgcatcctatatgattactcatatgggctttagtttcaagtggattatgtaattcttttgtttcagttcattgctgcacatcttggcatgactgcattgtgggctacaatgtctctcttcatgctttggtgatgaacatttgacgcttagtttcataatagaagtattgtattaaacatataaggtagtgagtgaaccagctctttagttgtctacttctatgagtgtaatgaccatctctgctaattcttagtttggtggttcagtggtactatctgatttcatagtgtaactttgatttaacagagatatatatgtctgcatgagacctatttaactgagccagtactagacacatgtaataggaatctacatgtgttgtcactcgacaatcgtaaatgattagtgaatttaaaataactgactctacatatgccatatgggctttgtagtagtgagattcgatgttccctgaaacaatatgcactttatgtagcttttgaatgatgattccttccatttgcagacaataggtagtcagatgaagattgtaaaaaacaagcatgcttaacccttcaagaatgcacagtttgagcttgaatttggaaaggggatatgccacagttcagagttttttgaacagaatttctggagcagttgttcctataaaataatattttaggtcttgaagccaccaccgtttggattgacatgatctgtggtattctggtgatctcattatagcagacttcatttcttattgtgcttatacagtagtgtagcgggaagagaattcacattgcatgaaatcatgttgatagctaagaggtggaagttgaagtaagccgggaagggtgaggtattgggaactgtggcatttaaagttcagtaggcagcagtaaactgtagtggtgtggtcgtgtacataagatgtgcacattttgaactcaggcattctttattgagtgctgctagaattacattgagctccctccacttctgatacttgcctggttttgcgtcaattggatctgtttgtccgtcctcaacactgttgtctgtttttgctaatttgggcattatctatgacagaagaagaacgattatgaattatagattaaattgaacataatgttgttctaagaacaaaaacagattatttcactgaatattttctcatcgcaagatgtactaaatagtaggttcactacagtcttacagaagccaataacccacttgatcttgctataatgatgttcttagaatacttatagatgtgttggctggaacattagctctgacaagatagaagcttgtttgttctgttatttagtcatgtctgcccctcaaactactgaaacctaaaatctgaaactgaaaatctgaaaatataaaactaaaaatatgaaactgaatattgtatgtcatgtttgtgtcatgttttcttagactgcattgaactccaacagagactgagaaacatggaattatagctagaacttggatctatggctgtgatattcttgcttgcggaaactgggaattatagagagacggaaatactttttaaattagaatctaactacaattcgatttagttcaagtcaatattcagagttctactttctggaattattcagagttcagttattcaaagttattaatagctatacttagccacccatgatgtagtcaagaaaaaaataactgaactcttctgcttataatttcaactatattaatagatattgttatcaggtgtttaaaaagaatgtggtcatcttgtgtgacatttgtgttcttaaattgttgctctgcttataaccttttttacaatgtactcatcagttctatactcgcagccaaaatctatagtgggaactcctgcatacattgctcatgaggttcttctgaagaaggaatacaatggaaaggttgctgatgtgtggtcatgcggagtgatgccatacgtgatgctgaaaccatccatggttcttgaaaaacctcctagctgaccaaatggatgacaatacgatgagtaagcagtacgaggagcctgaacaaccgatgcagagcatgaatgagttcatgcagatcctggttgaggcgaccattccagcagttggttcacgtggactcaatcagtttctgaatgatgacattgacctcgacgatgacatggaggacctagactcagatgccggtcttgacctggaaagcagtggggagatcgtgtatgctatttgacaacattgaatactttgttgtgtcgtaggttaccaagataattagagacaaggggcaggttgttgtgcttgcaagtatctgttgcagctgttgttcatgcctgatgttgatgcctcttttcatactgttgtgtttggatggtgtaccaccagtgttttacaacagtttggcccttggaattgctattgctaaaacttggttcctctgagaagaccttttgtttttgtattcccagtcgagggacggtgaagtactta

SEQ ID NO: 24938 - DNA, 6306 bp, Zea Mays
aactccttcatgacattctttctttatctcacttctagcggagtaacattctgctatgtttcttattgcgttggagaagacattgatgatttggagtacacacctaaacccgaatttgaggggtattttagagttaagaatgttcaaactgagttggatctacttaaagcatggttttctcacatgcaagaggttaagcctggcatttatgttacatacaacggtgacttttttgactggccatttttagagaagagggctgcacaccatggaataaaaatgaatgaggagattggtttccaatgtgacaataaccagggcgagtgtcgggctaaattttcttgccatcttgactgttttgcttgggtgaagcgagacagttaccttccacaaggaagccaaggtctaaaggctgttacaaaagccaagctaggttacgatcctctggaggttaatccagaagatatggttcgctttgcaatggagcagccacagacaatggcttcgtattctgtatcagatgctgttgcaacatactatctatacatgacttatgtccatcctttcatcttttctcttgcaaccataatacctatgtcacctgatgaggtactgcggaaaggaagtgggacactttgtgaaatgctgctaatggttcaggcattcaaggctagtgtcatttgtcctaacaagcaccaagctgatcttgagaagttctacaataaccgtttattggaaagtgaaacctacattggtggtcacgttgagtgtcttgaaactggcgtctttagatctgatctccctacaaagttccaacttgaaccattagcatatgagcaactcattggaaatcttgatcgtgatctgcattatgtcattgctgtagaaggaaagttggatattgattctgtcacaaattatgatgaagtcaaggatgccatagagcaaaagcttgttgcattgcgtgatcacccaattcgcgaagaacgccctctaatctatcatctggatgttgctgctatgtatccaaatattattttaaccaatagactccagccaccatccatagttacagatgtggactgcacagcatgtgatttcaatcgtcctggaaaaaattgcctcagaaagcttgaatgggtctggcgaggagagacctacatggcaaaaaagaatgactattatcacataaagaggcaaattgaatcagagctgattcaatctggtggcattgcatcgtcaaagccttttcttgacctctcaaaaccagaacatttacttaaattgaaggatcgtttgaagaaatactgccaaaaggcgcacaaaagagttgttgataaaccaattactgaagtcagagaagcgggaatatgcatgcgtgaaaattctttctatgtagacacagtgcgtagctttcgtgatagaagatatgaatacaaaggtcttaacaaaacatggaaaggaaaactcgcagaagcgaaagccagtggaaattctatgaaaattcaggaagcgcaggatatggttgttctatatgattctttgcaacttgctcacaagtgcatattgaattctttttatggatatgttatgcgcaagggagcaagatggtactctatggaaatggctggtgttgtaacatatactggtgcaaagattatccaaaatgctcgattacttgtagaaaaaattggaaggccactggaactggatacagatggcatttggtgtgttttgcctggctcttttccagaaaactttactttcaagacaaaagctgggaagaagctaactatatcttatccctgtgtcatgcttaatgctgacgttgcaaggaacaacactaatgatcaatatcaaacattgaaagacccagtaaacaagacatatacaacacacagtgagtgttccattgagtttgaggttgatggaccttacaaggccatgatcttacctgcctctaaagaggaagggattctgataaagaagagatatgctgtcttcaatgaagatggcactttggcagaacttaaaggttttgaaatcaagcgtagaggtgagctgaagctcataaaagtttttcaggcggaggtatttgacaaatttcttcatggttcaactttggaggaatgctattctgctgttgcctctgttgctaaccggtggttggacctactggataatcaaggaattgatattgctgacagtgaattgcttgatttcatatcggagtcgagcacaatgagtaaatctttagttgactacggagagcagaagtcttgtgctgtaactacagcaaaaagacttgccgaatttcttggagattcgatggttaaagacaaaggactacattgccaatatattgttgctcgggagccacaaggcactccagtgagcgagcgtgctgttccggtagctatattcgagacagatcctgagatcgcaaagcattatttaaggaaatggtttagattctcctctgatgcaaacattcgatctattgttgattggtcttactacaagcaacgcttaagttcagctattcagaaaatcattacaattcctgcagcaatgcaaaagatctcaaatcctgttcctcgagttcttcatccagattggttacacaaaaaggtcagggagaaagatgatcgatttcggcagcgtaaactgcgtgatatcttcagtcccttggctaaagaagaggggctgcataacttgaataggactggagatatggaagatttattaatttcaaacaaggatttgaggaaaaatccttctcatggtttagacattgacaaagaaaacaatccaaatggagcatcagtgggatctggtttgaatattagtaaaaaacaacaaaactgtatgactgggttaaatgttccttgcacttcacaaatccaaaatgctgcttcttatgaaacagttgataagggtactgactatcaaggatggcttgatgctaagaaaagaaaatggaaatatgtccgtgaacaaaaaaaacgtcgaaggttgggtgctgccgccacttttgacgatcctaacgctttgctctcggccagacatgccaatcagctacctgtcaacagtcggaatagatctacatttttccagaaacaagaattggccctctttagatcacattggcagataatccagcttgcttcaagtacagtgcctggtcacttttttgcgtgggttgttgctgaagggattatgttcaagattcctattaatgtgcctagaactttttacctaaactcaaaggctcctgtcacagaagagtttccaggaaggcgtgtcaaaaagattctcccacatggtagaccttgtttcaaccttattgaggttgtaacaactgaagaacagttcagggctgaaggcaaaaaacttgcagctcatctagcagagccagatgttgagggaatatacgagacaaaaattccaccagagctcaatgctgttctccaaatcggatgtgtctgcaaagtggacaagtctgcaaaaagacgaagtatacaagatggatgggatctagccgagttgcaaatgaaaacaaccgccgagtgctcatatctggaacagacattttcatttttctatttataccacagcttgagtgaaggaagggctgtatatgtattttacttccccacgtctttccgaatacatgcagtgattgtcaatcctttccgtaacaaagaaatatctccgtcatttcttgaaaagcaatttggagatgcttgccaagcccttggttctgtccctgagaatctgtctttccatgtggactaccaaacatcaattgatgctggaagcaaatacgcacaaagaatgttacttgagtacaggcaacaacattctggacctgtcgtaggcatcatagagtgccctaagctccaagctataaaggtagctatacgagcacttgatgatttgccatgtgtaaccattcctagcaatgcacgtgacaacaactatcaggctcttggctggcaagcaacagctggccgaacaagtatgcagcgttgtgctgcatcaacccaatggttcaatgaacggatttcactcgctaaatatgcacatgtgccactgggtaattttgaactagactggcttctttttactgccgatgtattcttttcaagggcattgcgtgatcaacagcaggtactatggatatctgatgatggcattcctgatttaggaggcacttatgaaggagagacatgttttgctgatgaagtcattcagcctgcacttacttatcctggtgcatatagaagagtttctgttgagcttaagatccaccatttggcggttaatgctctcctaaagagtagtcaagtggacgaaatggaaggaggatcaatcggtagctttggaaacgacgtgcctccgggttcaaatgccactgaaactgactttgatgatgctagcttatgtatacctgctttccaggtgctaaagcaacttattcaaagatgcatttcagatgcagtgtcgtctggaaatgtatttgctgatgcaatattgcaacatctctaccgctggctttgcagcccacgatcgaaacttcatgatccagctctccatcgtcttcttcataatgtgatgaagaaagtctttgctctattgttggccgagttacgaaagctgggggctaatgttatttttgcaaacttttctaagataatcatagatactggaaaagtagatttgtcatctgcacatgcatattgtgacagcttattaaggaccttgcagacgagggacctcttcgagtggatagaattggaaccattgcacttttggcattccttactgttcatggatcagtataactatggcggaattcaagctaaaacacaaaacgtagactcttcagatggtgataatgatattgatattgtctcaagctggaacatggcagaagatttgcccaaagatacacaggatcattttgtcttaatcgtatcagaattcctatatattccgtggaaattcatgaaggaacaagtagctgctcaagctaccataagggatgatacctcatgcactccatctgtaacaatcatggctgctgagaatcttgagggccaggtgatagaacacctccgtgacaagattagcaattactttgcagacaagcttctaagaactgtaagtgatatacttcaccatttcaaagggaaaagcaaacatgagtcagatgaacctgcaaaatctgatcctcacacgcataaaggcgatgctgcattggagttcattaagcatatctgtgcagttcttgctcttgatcaaaatgttcagcatgatattttgagaatgaggaagaacctgttaaagttagttcgtgtaaaggagtttgctccagaagcacaattccaagacccatgcgcctcattcactctgccaaatgtgatctgcagctattgcaacgattgccgggacctggatctctgccgcgactcggcactccagggccaggagtggagatgcgcggtgccgcagtgcgggcagccgtaccaccgcgagcagatggagaacgcgcttctgcaggtggtccggcagcgagagaggctgtaccacctgcaggacctggtgtgcgtgcgctgcaggcaggtgaaggccgcccatctgtcggagcagtgttcctgcgggggctccttccggtgcaaggaggagccttcgtatttcctcagcaaaatgcgggtgttcctgaaggtggcggtgagccaaaagttcccgctcctgcaggactgcgtgcagtggattcttgaagccagatgacgcgggctgctacttcaacatagttcattagttcacctgatcgctaggttgtacaacgtgcacaggctgtagctccgaagagtgtataaacgggtgtatagcgctgccacagttcattgtagctctgccctgcttgcaaaaggttgttgttgtattgtagatattcaaaggtggatggcgagaaacgatagtaaccttggtatcgaaacatctggataactagccctctcgtatgtgattgctgggcatagactattctaagttatgatgtgggcatgtggttgcataagcggtttcgatgacgtgaatagaaatacacgcgtcggaccgtatgctgccagcctgccagtacactgaccttggccacgtcatactagttgtctgtttctgttgccaatcctacactgtattatctgcacaaaggaaaatgaaacggaggacgttgtgctttcgaggggccaggactcgttgggtggatgaagcacgcgtgcccggtgacctcagccttta

SEQ ID NO: 24939 - DNA, 1897 bp, Zea Mays
tttttcagtccacatcttctaacaatacgtgaacggatttctgttggaaatgatggaggccctgttccagtacgactgttgagtgatctttttgatggggctaaggaagctattgatgaagcaatagaattggaaaatggatccctaacgcattttgaggtttttactgctctctcatttcttctattctcacaagaaaatgttgacattgccatcattgaagcaggtcttggtggagctagggatgcaacaaatgttattcggagtactgaattagcagcatccgtcataacaacagtagggagggaacatctggttgcattgggtggctccctgcaaagcatagcaatagcaaagtctggaatcattaaacaaggacaaccagttgtgattggtggaccattttcagcagttattgagcaaattattcgtgacagggcattcttgacacaatctcctgtgatatctgcttgtgatcctggcatcaagagctttacgaaatgcatagattgggataatgtccattgaaatgcatgacataaacctccaactgctgggagatcatcagcgtcagaatgctgtcacagctgcttgcacggctctctgtctccgtagtctaggatgggaaatctctgatgcttctatccaagctggcttgagggagacccaacttcctgggaggagccagtttctcacagcagaggaagcctcggttcttgggctggatggtgcatctactgtactaatcgatggagcccatactgaggaatctgcaaaggccttatcaggcgtgatagaagctgtcagaccagaagggcctctagcgcttgttgtcggaatggctagtgacaaggagcatcttgcgtttgctgagcagcttctctcaggtcaaaccccagatgtcgtgctactgacagaggcgagcatcgccggaggaagctcccgtgcaatgccagcctcatccctgaaagaagtatggattgccgcggcacgccatcgtggcatcgagtacgtggacatcggtggcatcagtggcactgaaaccctggagcacatcgccgatctgttgggcagtccttcgctgagttccagaaggaagcccatggtgatcgggtgccaagacatggggccgttctcctggaacctgatcattgctgcctcccagctccttgagagcagaggcagggccccaggcctcatctgcgtgaccggctccctgcatctcgtcggggccatactgcaaaagctgggacggcattagaggcgccaaccatctcatctttcatagtaccatatactagactggaagagagtggaagctacactggactcgtagtggtgtaccggcgagatggatcattcgtgtggtgtacattgcgggactgtttggatggaatctaccaaaatgcctgggccaggcatccatcccaggcgcccgattttgaacatttgggccaggacccaggatgcatttgactgaggcagggctcccatccaaacggacggcaggcaagcaaggcatctgtgctgatgggatattgggatcacgtcctgcgttgctgccaacttgttcgtggctctttctaagctgacaataatagattgtaaataggctgattatctgtactcctacaaaacacaccacacggaaaaaagagcacggcctaggcacggcacgactcgaaatattttagtgttgggccagcacggcctgatatatcgggctgagtttgggccgaggtcacgacatatttaaggcaggcacgaaatgactcatatagagacacgaaaaggcttatatatttattaaaaccacacttcattccatactttcatgtactttataaaaacacaaatctagagataattctagttagatgttttttgtagctttgaa

SEQ ID NO: 24940 - DNA, 231 bp, Zea Mays
ttctaatccaccatttgcatctttttttctcgaataggcaagagaattgcatatttttgtattaataagagaagcaaaaacacaaaagacatagccaagaggccacataagaattacagagggtttacaagaggagagaaacataaacaaacaaacagtcccaaacatacaaacacacatgaaacacagtagcacttaggcagcaacatctggcagcgacagcccgttggc

SEQ ID NO: 24941 - DNA, 4357 bp, Zea Mays
atggcctcacccacggtcgcctccccgatccgggcgagccccgtcgacaaccccaccgtcgcgccctcactggcctcctgccgctgcgccttatcgctagatgctcgacatccccatccgcgcgctcgaggcagaggccagggacaccaagatgagcccgaccgcgaccgcctagccatcagctccaaagaagaagccaggggaccgatggacgtcagtgttccgtcgtggtggcccgctagatccatattcagcaagaaagatatctcgccatgccggcccagggccgcagcccgtcaccttcctccccccgcacccgccgtgacagccgcctccccacgcccgcttacccgactggccgcacaagatgcccacagtggcccccatcgcgcccacccgctccccccatccaccgcgacctcagccgccacgccgacgccatccccgtcctctagcgcgttgtcgccgtcgtcacaccgccaaaggtgcctgccccctgctaccgaggtcgacgaccagcagcggcaagctgccgagctcgacgacacgcacgccatgcttggccatatggacgagtccatcgcctgctacgagaaggggctccagatccagatgtccgcgctcgatgagcgcaatccctgcctccctgagacctgcaggtaggtgacaatgtcatcaagggcccctccccctttgtcgcttctcgatctagatctcgcctctccctaaagcacgggttgcacctccccccgtcacccactccttccttggcttctcccgggaaacgaccttcagtctttacaggtgattgacaaggtttaggaggaaacttccaaaagccggtcaagtatggagtgcttaacatcactttggcaacttatatttttttacatgtttgctttgtttgttaacaacataatttatgggctgacaatgtgatcatgtattctttctggtagtcttcgtgtcactgcttgcagttgcaggggagggatcatggctttcttttattttccatgtgcaatgtttaatttaggtgatgaactccaaagcttatcccattgttttctagcaagagctaagcaatactggatggagaacatttatctttttaataacgagtaaaagcataatggcatgcttgtgtttagttctctgtttgttgaccaatcgctatatttaatcttgattttttttatctataacttgaatttcaaagattcaatattttttattcagacattttctcttctctagatattcttttatgcaaataacgcggttacactagatcagccaacattctgggaaataagctatatggtcagagtaagaggttcaagagttgatagttcaacaactttaactgagagcaaatctacaagaaaaaggaaacaagcaacctggaacctacaactgcaggagcttgcttgaaagtgaacaatcaaggttgtgtgtatatattatgcccgacatttttgaaggatattgcgagggccattgtatctgctggaaaaatcatttcaacttgtcgaacatggtattaggatacgaattggagtggtcaacagaaattctggacagatatgtcaaatttcagaatccacgatggtcctccaagaaataaagatgctcttgatcatctattgagaagtggaatactaattttttgctgcagcgtgatggataaaggtttttgcgtattcttgggtttttttcctttcctttttggctacacacaactctttttaaatatacattcagtaggtggcaatgcctcctatttccctaaaaatatagcgccaaagagttcaaaattgaattctcataatctgctattaggaaaagaggtcaacttctatattttttacatcaggtaatttggctataatacaacggcatgctgaggtcaacttctgtatttttttctgcaagtaacttggctataatacagcggcatgctccattctgaagctggtcaagaaataaatatagcacttgcaatattttccagtagtcaaacctctccattacttcaattctcgttctcatttttgactatgttcttcatgtcagttcaacataataattaagaggtcgcttgcccctgagacggcttcatggtattttatttgttttttacaaagtattttttaagcgctaaacttacagtgcactttctctattcgttttggtgctgcttataagtcttttgtgttttagatccatcgaagatggcgcttaatctcgagagctagggagatgaaatgccttttgtacatgatggaaggaaacaaattacgtacatgtatatgtggatcgaattgactgttgcattctgcctgtatttaagcaacggtttccacccaaaacgtctataatttggtccttcctagatgtgtcaaatgtgtttactgcactgcgtttgcttttgtggcagcgccctaatagttgtttataaagtctgatgttaacaaactattgtcatgctatgtaatatatagtcttaacatgttggtttgttgagtgttcgaatatcagttttatattattatgtcaggtgttattagtgttcaattttttaagttcttgttgtacatcctatcattacatgagacaatgttgtgatgtttacaatattgtgttatgtatgttatatcattttggtattatagtataatttaatttgtatcagtttagttctgtattggttgttgccaaaaaaaattatgagatattaaggtcgataataatgttcgtttttatataatcgttttgcactaatattttgttaatttttttgtataccgttgcaacgcacgggcacctaactagtatgagactatgagtacatcaagtgcattcccttagaactcttgttgtgtaaaaaaatgtgtaacatgtcttggtacagagattaatttggtttgtgttttttagactgcaattatatctgggttctcagccttgccatggttagtcaagcccctctatgattttatcaggtttcaccaaaatactgaatagccttcctatcatccctttctttctgtatatgatatatgcatttaattgcaatgatgtactgttgctatttccgtacacagttgattcaggtggttgattatatggtggttcagagagctcgaggtgaatcacagagtacatatagatctctccactccagtcactatgttgggaatcctcagcctttggaggaatcatgagtgcatacttcagtggttctccagtcacttatggcgtaagatttgtctttggtgttacagcacttttgccactgttccgagtagcagagaaggacaactctggcaaactgtgaagaaaataaaagattttcacaagcggaatcttcagaatctgaataaaggagttcgtgggaatcagttgtaccaaaaactggttcagttttcgtattccaagcatactactggaagttcacactgatcggcgacaaactctcgcccaaggagaagttgaaggaggatcagcgtgaacacccactgaaagagagatggagttgaatgagaaatctgaaaagaatacgcaagaggtagatgagaagttccaaaacacaaacttgtatctcaagaacttagagatggagcttcgggagttacaagtgcttcataagcaatcagatagatctgaaagttttactgtgccaacacatgcacacactggtggtgcctgcatctagctattcagatcaaagcctgacaggtaccatagggcaaagtgaagaagaaacagaagagttgagcaagatcacgctagagaataaggatattcagcttgatatcaatataagagtgtttgatggagccgaccctatggagctgcatgtttatgattttaaaggacctggtgtaaccttatcaatgtacaatagcgatgagtttattaggccttttgctaagtcctccatggatatggctctttcaaaaaagtcgtctcttcatctcagcaccaagaatacaatcatcaagaagtatgacgacaggcatggatcatctatgtttctacaagctcgcggtcacatttattaggccttttgctaagttcatggatatggctctttcaaaaaagtcgtctcttcatctcagcaccaagaatacaatcatcaagaagtatgacgacatgcatggatcatctatgtttctacaagctcgcgcgaagcgatggcgatggtgggttttgatgttcaggacagaatcaatggccgcaccttcattgtttaaaaaggcgcggcctagggcgtcgcctaggcgacgcctaggcgtccaggcgtcaattgttgctaggcgtccgcgccgcccagggaagatcgagtatggcg

SEQ ID NO: 24942 - DNA, 2018 bp, Zea Mays
gctccccccgtcgacgtgcgcatcccgtccccgtcagtcgatcgtcccatcgaagtggcaactggcaaggctagccgcctagccgttccgtccgtttgggtagtaccgacctactagctactgcacccgcacggcggcgcgaggagcgtgtgggtaagcttaggtgccatttgtgggtggctcgtggtggtggtgtgtataaaagcagtcgtcgttcgtgaagcacaagctgccccccctcctctccctcttctcgtgtcagcgcctggaccaaagacgatggccgtccctgttggtcgcctcgccgcctccacgctcctccagctcctcgtctggctcccgctccccgcgtccgcctgcgaccgctgcgtgcgccactccaaggccgcatactactacacctcctcgctcaccctcgccggcggctcctgcgggtacggcaccgaggccgcctccttcagcgccgggctcctcgccgccgccggccccgcgctgtaccgcggcggcgccggctgcggcgcctgcttccaggtgcggtgcaaggacaggaagctgtgcggcgcggcgggcgccagggtggtggtcacggaccgcgccaggaccaacggcaccgacctcgtgctcagcagcaccgcgttcgcggccatggcgcgccccggcatggcccggcgcctcgccggcctccgcgccgtcgacatcgagtacaagaggtaaaacacagtgacagacgaacacccaagcgatggaaaccaaccgcgccatgcctgctgtcatccgtacccatcatcataattcatacagatacagtgtagtactagtaggaaggagtagcatagatagaaccaaaacaggacaggaggatgaagaacggttcggcgcggttggttgacgccataaactctctctctctctctctctctctcgccttaaataaatgaacggccgaattggaacctactagcaataagtttcgtcagcgccgcgcgcgcacatgtgcagggtgccgtgcgagtacaagcacaggaacctgtcggtgagggtgcaggagaagaggcgctccccggggggccctggcgacctcgccatcaggtttctctaccagggcggccagaccgacatcgtcgccgtcgacgtcgcgcaggtgggctcgtccaactggaagtccatgacgcgccacagcggcgggccggcgtggagcacgaggcaggcgccggcggggccgctccagctcagggtggtggtgacgggcggctacgacggcaagtgggtgtgggcggagcgcgaggtgctgccgcggcggcggcgcgccggcgaggtctacgacacgggcgtccagatcaccgacgtcgccctggagggatgcttcccctgcgacacgcgcgagtgggagtgatgcgcatgtggacgaaccacgccagtgacggcagaagcagaagcagaagcagaaaaccaaacgctgaagcttcgactcaactgaagagcctgcctgtagaattgctctagctagctcctccgtgccactgcccttttgggcttgcctcaaaggtcaccggagacgacgagggagacgactaattaacagacgctgacagagtgacgcgcgagaggagaggagagttccgaaccccccctctccgctgtactgtacatgagctgctgacgtgtcggataagtagtagtaggctagcgtcccggcgggtgctggaaagaataataataataatgtaacgaaagatggccggcatgaggttgagggagcgaccgagcgtgaagcaacttgggcgccatggacaatacagttgggacacagacacaccggtcgtctccacttgcttttgcttacggttccttttccattccattgcctggctttggctagcttagttagtggtcagtcagaattggtggacggtgctgccagccgtcaaccgctccaggattcaggcgagcgaaagctgcaccgcacatgtaatgcagcgaccgatcggagacatgcctgtgacgcaggcgaggccggc

SEQ ID NO: 24943 - DNA, 2037 bp, Zea Mays
attaaaggccgtctcccaaccagacaaagctagtactagcagtagcactgcgccgcagcaatggtggtttccctcgccgaataaatctcaccggtcgcgcttcttggcgtgttcctccgctcgcctgggcttcgatctccagccctcgcgtgagcgcgggtgcggccgcggcgccgtggtcatggcgacggaggagtgggagctgcgggaggaggacgcctacgcctacgagttcgagttcgacctcgagaaccccttcaccagccccgccgacgagccgatcgccagtctcctcgacgccgagggccaccacgcgccctctatctccgccgcggcctcggccacccgccgcgccgccgccgccttcatctccaaggtgcgtttcggcggcgagctcgccgtgcacccgcgcgtcgcctacctcgcgctcaactacgtggatcgcttcctctccaagaggcaattggcgtgcgagcagcagccgtgggcgccgcgcctgctcgccatcagctgcctctccctcgccgccaagatgcagcgcgtcgcaacattctccaccgccgacattcagagggacgaagacttcatgttcgacgcggtgaccatccgtcgcatggagcgggtggtgcttggcgcgcttgagtggcgcgcgcgctccgtcacgccgctcgccttcctcggcttcttcctctccgcatgctatccgccgccgcagcaccccccacaggtagccgctgtcaaggcgcgcgccgtcgacctccttctccacgctcagcctgaggtgaagatggcggagttctcaccctccgtggtggcggcggcagcgctgctggccgccgccggagaggtcgccgccgcgaacctccacgcgttccaagccagcttggccgcctgtccctttgtaaatagcgtgagcatgagctttaaaccacgcggttttttttatttccattataagccgctttaaccgtcactaattgacgtaattacccgtgccacgtcaaacggacaagattgtccaggtcctttgggactggccgcttctggtgttccagttattatactaccgctcttcatcttttttaaacctgttttcctcggggtgtggagctaatgtggcaaattgaccgcccagtaaaaccttgctgcttttctcgctttcggcattaacaatgtgatcatcgtaatctacctcatcattttgacaaattgcacccctcatgattacctgtactgtaatgcgagatctgcagcaacaggtagttctcgtgctaactgtatgccgttgcgcaggagaagctgcgggagtgcggtgaggtgctggcagcggcgggcggcgtcgggcgggggcgagccgctccgagcgcggacacgcctgtgacggtgctcggtcaccagcgcagcgccagctccgcctcggagaccgactggattaacggcggcgacgcgaagaaacgctgcatgggcccaccatcgcaatgggggtaggcggcaggccgcaggccgagtcaagcgggtattgtcgcagctggatcgaagagtcggagattttactgcagccctgctcctttttttccaaattgtttttaccctttttcttttcccaattctttccttctactttaatgctctcgaggtaaagtgacgaggagtggtggtggtggctgtcatttactagtattcctttttcctagcatgtctttattttagcctagttatggtaatttttgcggcggtgctttggaaggtgaggacggtggatgaacatactgggatggaagagggggatgatgtgaaatggtaaaaaaaataaaaccaaaaggctggcatgttgctttgtcacctctgccgatctggtttctcttgcgtctgctttcgatgatgatttctcattatgcggtcgaatttctggcatgatatttctgttttgccattttcttgccgtgtttctatttcatagcccactgtagtaaaagttttaaccgttctaaaaacaattctttcaaaaccacaacgactgtagctggacctaaaaaa

SEQ ID NO: 24944 - DNA, 2622 bp, Zea Mays
tcgttcgtcataaatggagctacttccaagtgtaatgcaatagcaaacatggaataaatgggaggtacaaccatgcaactcaagcacgcctggttgactgacaccaaaggaaaataaccatgcatccagatcgatgactcaatactcagcttcctcgtcctcatcttcaacttcagctccgacttcctcataatccttctccagtgctgcaagatcctcccttgcctctgagaactccccttcttccatcccttcaccgacataccaatgaacgaatgcacgtttggcatacatgagatcaaacttgcggtcaatacgagagaagacctcagccacggctgtgttgttgctgatcatgcagactgctcgttgcaccttggccaggtcccctccagggactacagttggtggttggtagtttatcccacacttgaaaccagtagggcacctgtgcatgagacagcagagaaagacattcatgtctcgcgcagctatcttttcagtggaagattacaatctataatctgatataacttggtaagagttgtgagcatataccaatcaacaaactgcactgctctcttggtcttgattgaatggacagcagcattcacatcttttggaacaacgtcgccacggtacatcaaacagcatgccatgtactttccatgcctgggatcacattttgccatcacacttgatggctcaaacacagaatttgtgatctcaggaacagagtgttgttcatggtaggccttttccactgagataattggagcatacgaagagagcataaagtgtatgcggggataaggcacaaggttggtctggaactcagttatgtcaacattaatagctccttcaaacctcagagaggtagtcagagatgatataacttgtgatataagcctgttcagattggtgtatgttggacgctcaatgtcgagggacctcttgcatatgtcatagatagcttcattgtcaagaagcacaacaacatctgtgtgttcaatcaaggaatgtgtggagagcacgctgttataaggctcgaccacagcagtcgagatctgcaatgaaaatggtttcagtacagagttcttgtacattacaatgacaggtaaacctcctttgcaagcttttgttttccgattgagaaggcaagtatatgccttcatttaggtatacataaatagtactgttgcaaattaacactttttactcacttttgtctcaagcatacagatttagataattgtacaattaaccattatgtagccactccgcaataacaagaattgatatgaatattcttcactcacacattttcacggtctagactaaatgttagcctaaacgtctaactggctaaacaatcacctattgtttagctatttattcaggctaaacgatcatttaaatggattaaatgtggtcaaaagggataaatggacacatcaagctgccatgcagcatttacacggcgtgtaaacgggctacacggccgtataggtgaagtagacatacatgggcttgcagcattgcgtgatatccaaggttgaatttcatgaagatccttcaagatttatttttactacaatcaatgataggtgaatgtaggctagggaaaaatatactccacttggatacataggtttttctatgcacttaggtatacattatgtctagatagtagatacatagtaaaattaatgtatctagaaaagtcaaaatgtcttatagtttgaaatggagggagtatttctgtatgcaagctatgtcttattgcaagaacaaataaagagttctgctcactgacacaagcggctcaactctaatatccgtaaaatttatatttttatcgtggctcctccagaaacatgacaaaaacagcatactagttggaaagagaaggtaaaagtccaaaataattagactagcttttcaagaaattgagttatgataaaacaacatactagctgaaagtaggacatatttagacttttcttgtaaagttactatcagatattcgattaatcattttattgaaattgagatttttgttgtatatcaaaaattcaaaactgatggcgagacagactttttttgttactattactagtactactttatattggtagtcttgcgaaatcacgatacagatctaccattgaagtgatttctttttaatgtttcacactgaatactatatttttctggcaaaaaccgaatcaaacttcccatgcaatctagatgcaatctgtcatgggcataatagggagtgagaggcaacagccaggctaggataaggctagagaataagattgagatgagctaggataaggctagagaataagattgagatgagagaattgtggagagttagttagcagcagataagtccaagaaagtaggagttagttgagagtttgtaggagaagttggttagtcatagggctatttataagccgcatagcagcaaggaataaatcaagcaagatcattaccaaatcaatctctctctcttgcaatctccctctcaagcgcctagggctgctaccctagaaccaagcctacggcagaggggtataacctcgccggagaagacagctatccccatggacc

SEQ ID NO: 24945 - DNA, 672 bp, Zea Mays
  misc_feature (671)..(672): n is a, c, g, or t
cagttggggagttttctgccttttcttctccccttctctgttttccttcaccgcgccaccgggggcgaatcgcggacgccgctcacctcccccatctcctccccaccacgtcgcaaacccatcgtcaccatcaccgcctccggccgcggctcccatcctcgcgtggccgtcgcgatccactacgagcttctctcgtccggtcttccgagtctcggctacctgctcctacgtcgaatcctcgggccctgctgtcgccaccgccgaatcctgctgcactcgccgcagccggggaacgcggacggcctgcgggagcttggcgcctcctccttcgcgttgcgtcgtcacgaggtggagaggaaaatggcaaactggaattcgatgctgtagagtagattgtcctttacctactctaagggcaaaaccaacacatgacaggaagagctatgttgtcgttttcttcccacgaacaaaaacttattcttgggtagacatgctacttgttcttccaatagaggaatgtcctttgccacttgtaaatggaactcatcgtaaatggagaaagctggtgaaggatttgaacattcctcgacgattcaacatgcaaaatcttgccgtttttatgataaatttaattgatgagcttcatatcgaggctgtagttgatgatgctnn

SEQ ID NO: 24946 - DNA, 2219 bp, Zea Mays
tgagtgcgctgtgcgggctacgctctcttaggccaactaggatatcaactaggaggagttgaggaggaatggctgttggcggaactcaaccggtcctcaggaagtacctaggtgccctcaaggacacaacgactgtgagcctggcaaaagtgaacagtgattataaggaattggatattgcaattgtcaaggccacaaaccatgttgagcgtccatcaaaggagaagtacataagagaaattttccattccatttctgctgctaggccacgggcagatgtagcttattgcattcatgcccttgctagacgtctttcgaagacgcgcaattgggcggttgcgctaaagacattgatcgtcattcatcgtgcccttcgggaagttgatcccacttttcgtgaagagcttcttaattatggcagatctaggtcacatatgttgaacatggcctactttaaggatgactctagtgcagaagcttgggactattctgcatgggtgcgcatttatgctttatatttagaggagagactcgaatgtttccgagtgttgaagtatgatgtagaaacagatcctccgaggactaaggatcttgatactgttgatttgcttgatcatctgccacaattgcagcaactcctttttcgtcttcttgcttgccagccacaaggagcgtcatcttacaatgttataatccagcatgcactctcaatggttgctttagagagtgttaagatctacactgcaattagcgatggaacaatcaatctagttgacaagttcttcgagatgcaaaggaatgatgctgttagggcacttgatgtatacaaaagagcaactaaccaggctgaacgactttcagaatttcatgaagtgtgtaaaactatacacattgggcgtggtgagaaattcctgaaaatcgagcagcctccagcatcattcctgcagactatggaggactatgttagagatgctccaacaggtcaaaaacaaaagactatactagcgatagaatacaaaaaagagccagaggaggaagaaaaaccggcctcccctcctcctgctccagaacaggaaccggaacaagagcctgagccagaacccgaaccagtgaaagaggaagcaccagaagccgagccggacttgctgggtctgaacgaaccgagccctgctgcgaccgcgatagaagagcagaatgctttggcgctagcaattgtcccgatagatgatgttccgggagctgctcctacttttgagaacggagtcacaggctgggaactggccctggtgacagcaccgagttcgaccgagaccgccgttgccccaagcaagaaactggccggtggtctggacttgctgacccttgatagcctgtacgacgaggcgaaccggagagcgagccagccggcgagctacaacccctgggatgcaaccgcgtctgccccgatgatgaccaccatggcgccggcgatgcacgatccgttctacgcctcgaacgggtacgcggcgccgcacggcgtgcagatggcggcgatggctcaccaccagcagcagcagcaggttttcatgctgcagcagcagatgatggcgccggcgccggcggtccaccacccgatgcagatgcagcagaaccccgcgaaccctttcggcaaccccttcgcggccgccggcgcgcatccctacggcgccgccggcatgccgctccacgccgggcccggcaacgtctacacggggctgatctgatctagtaccccacgcggccacgcccggtggccagtttcttggttgcgttagcgctactgttgccccaccattcattctttttgtccaagttttcttggtgccattgtgagaaggaaatttgtagcacagacaggcaggcaggcaggtagaggcggtcacggttggttatttataaatagcagcgtcgggtggtgtcctgtacgtaggaggtgagtgcatgtatattatacaacatagagtttggccacttgttcgtgtgcacatgagagtcgattctcgtggcggcgagactcgtcaggacggcccgtcgagattgagattggattattcttggtgaacatacgctggatacggttgaataatgcaggcattcttttttttagcagctgactttgtgtgatccaatggaaacaagtagatcgacatctcatcatgaagctggaaagtcgatcctgctcttgccggtgctagtgtgtg

SEQ ID NO: 24947 - DNA, 1411 bp, Zea Mays
ctcagaaaactcaccgcatctccatctataaatgagcccctcttccaagcctcaattcccttttcccctcctccctcgctaaggttcctgtgcagcagccctgttgcatgccatcttcctagcttagctagcaagaatctcttgccctccttgcttcctgatcctgcgcccttggatcaccttccatgtgttcttggccttgttctctcgtgcatctgaccatcagttcttaagagtatatttccattggaagcaaattttagggtttcctggaagagactctgccaacttttttttttttttgccctggtgcatctgcatcaacttgttcgtttctctctcgtaaaaaaaactcactgtcgtaaacgttttcgtcaattgatccatgatagactaacgtggtgtagatgtcacaaatcctctccgaggtgagtcaccgctgcagatttatgatcaactcaacgctccggcgaggcacccatcttgttctctctttctccgttgtgttcctctattggttctatgtgttctcagtaagatcctaaccaccaatacaacatactagtatcatatccttggaaattataagcctctacatacaacaacttaattagtcagaggaaagctttcaagtctagatataaccccaagtatcttttgaggatgaccctgtccggtggggcctcgtctgggtctagtcatgggacccgtagcttggggtcagagggtgacatggtgcaccggatggagctcatgcgcaagagaaggatggagtcaaaccgggagtccgcgaagcgatcgaggcagcggaagcagcaacatctcgacgacctcaactcgcaggtggacaagttgaggacgacgaaacagcaactcatggtagcactgaacatgaccagccagaactacgcggcagcagcagctcagaactcggtgctgcgcacccagatgatggagctgcagagcaggctctgcgcactgcgtgagatcatatgccatatgtacgcaacaacaacgaatgtccatccagcaactgtcatgggcggtgctgctacctaccatacttttggcgaaactgcgtggaactctggcagctgcagcatgcaaatggtcgaccacttgttgcaccagtgcttctaggctctagctacgtacaaggaggtagaggccaagacaaacaaaggcatgcatatatatgtattccatgttttgtaagtagtgtgtacgtcatttgatttaatgtataaaagggtttgtgaaattaattgtgcacatggatgtgggttaaagccaacattattgttgttgcctttaatttgctcatgcgtgaaaaaacacatggcaactggcaacttgtgttttgttcacaactattgctaactacaatattaatgatgatgatcaagtatcc

SEQ ID NO: 24948 - DNA, 681 bp, Zea Mays
ggggaagagatgcagttgcacacacagcaactgcatctgacatctggaggctgcggggtgaggagtgaggactgaggaggcaaggaaaagagtgggagaggatctatccctacgagggttctggctccagaagtggctgaactcagacaaaacagaagactgcagaagaatgattgactacctcttgggccttgtgcatgaaggcaaactcaaatacgagatggagtccatttctttcggcgagttcagcttggctctggagaaggccctgggcaaacatggaagccagccgaagcaagttatcaagttctgagaccagggcgggttagaggatctgagagcatgcgattgccatcgatctgtatgaatgatgaatccaacagttagctatgtcaagtgccagagttttaaatacaaataaagtaaaggcagcaatgtttaatggaattgtgaaatcagcagcttagctatatttgagcgctgtgttgattttgcaatgaaatcagcagcttagctatatgtcaagtaaagggtgcgtcaatttctattgcatctacagtgttattcttttgcagccacagctggtcagctgcagagcgcatcgtaaattctggacatgtcaattcttttgcagccacatgcccacagctacagtataataaacaagcctggaatgcgtag

SEQ ID NO: 24949 - DNA, 2734 bp, Zea Mays
gaaaaataggtgcccccatcaataaattgcaggctacttgcgcatcagagggacggtgtgagattcttatacaatttgtatagaaacaatcatggcggtgttcttggagatgacatgggtttggggaagaccattcaaactattgcttttttgtcttctgttattggaaaaggcaatggccatgggcaatcaacaaacaaaggaaagatgactggtcctgtactcatcctctgccctacttcggtgatccggaactgggaaaatgaattttccgagtgggcagaattctctgttgctgtctatcatggtccaaatcgtgatttagttcttggaaaaattgaaaatcaaggactggaggtactcattaccagttttgacactttcagaattcatgataaggttttatgtggtatctcgtgggaacttgtggttgttgatgaggcacatcgtctcaagaatgaaaagtccaagttatatacagcatgcttggggataacaactcaaaagcggtttggtctcacggggaccataatgcagaataagatcatggaattatttaatctatttgactgggtcgtgcctggctgcttaggggaccgagaacactttcgagcttattatgatgagcctctaaaacagggtcagaggctaagtgctcctgagagatttgttcaagttgctgatgcgcgcaagaagcaccttgtttccattcttagggaattcttattgagaaggacaaaagaggagacaattggacatcttatgcttgggaaggaggataatattgttttctgcaaaatgagtgacgttcaaaaacgtgtttatagaagaatgctgcaacaacctgatatacaaatccttattaataaggatgtccgctgtagctgtggaagtcctttacctcaggttgaatgttgcaagagaactgaaccagatggtgttatatggtcttatcttcacagagagaaccctgaaggctgttctatatgccccttctgtcttgttcttcctttcctcgtcaagcttcagcagattagcaaccatctggagctgataaaacctaatccaaaggatgagcttgaaaagcagaagaaagatgctgaacttgcagctgctgtctttggtgcagatattgacttagttggtggtactgctaaaagtgagaacttcatgggtctcagtgatgctgagaactgtggaaagatgcgagcactagaaaggcttctgtcattatggactggacagggtgacaagattcttcttttcagttattctgtcaggatgcttgacatactagagaagtttctcataaggaagggttattgcttttcacgcttcgatggaacaactccgatgaatgcacgccaatcactagtggatgagttcaacagaagccctagcaaacaggttttccttatatctactcgagcaggtaatttaggtgtaaaccttgttagtgctaaccgcgtggtgatatttgatccaagttggaaccctgcccaagacttgcaagcacaagacagatcatttcggtatggacagagacggcatgttacagtatttcgcctacttggtgccggttcacttgaagagctcatttattctaggcaaatatataaacagcagctttccaacattgcagtctctggaaaaatagagaggcgttactttgaaggtgtgcaggatgacaagaaatttcaaggtgagctctttgggatctgcaatcttttccgtgacttgtccgataagctttttactagtgagattattgagatgcatggagaacatggcaagagtagtgcaacagaagcaacagggataagagaaatagtcgatactgatttatttggttcacaagagaataggaagtcttccacagcaacaacacatacggatgatcagaaattggttgattttgggatagtttatgcccaccgcaacgaggatgtcgtgaacatgaggacagacggaagagagaaaggtggagcagacgagactgtccagagctccttagaggagctgcttagtaagaatgaaacaaagcacactgccatggaaaaatcttattcatcggaggagaaaagggaagtggcaagatcttattcactggagcagaaaaagaaagagtttagctgcatcgcatccttcatgggtatggatgaccttgaatttagcaagtggttgctatcagcctcaccgcaccagcggtctgaagtgctgcaggactacaggaggaagaagaaaaatcagaaatgatgatgcaggtcctcggagctaaccggctaccgcaaagctttgacgtagtgattagcttgtgtagctaattgtggtagttatgacaagggaatggtagtaaaattgacccgtggcaccgatcagtatgtatgtctgcagccccgcttattttgaaccttatattggtgcaaactgagctcagcaaggccttggtcactctccctggccgttttttttcggtcaggtgaaatataatctgtattgtgtctgttagttcctgttcagctgtctaagcctttgtgtagcgagtcttatcatgttaggtggcttgcaatgttaccttggtctgtactaatcatttggatatcgtagtcttctccgtactaaaatataattcgttttagattaaatatacattcattcggtaacttatgaatgtagtttgtctgtgtgtggctacattcattggaacgagttatttacaaacattacactccct

SEQ ID NO: 24950 - DNA, 2526 bp, Zea Mays
ggcaaatttcagcctgtatttccccccgtttaccaggcgttcgctcgctttccctctccatcccccctatctcgtggcgacgctggacaccgcgccgccgccctacgccgtggcgactactggacgtcgccggcgccctacgccaggtcttcgccattccattctctggagacaagcacccaacagataccgatcaggcattcaagaagtaaattcttcttctattgtgctgaatatatctgattctacatggctatggtgccaagtgattcatcacatcatggagctgtggacaatagccctaatggattcacccagggtcggcgtgaggaagctaggaaacttgggccatcatggtatttcagtagaaaggaaatagaagaacattctccatccaggagggatgacattgatttgaagaaagagtgtagccttcgaaagtcgtattgcagttttctacaagatttgggcatgaagcttaaagtgccccaagtgacgattgctacagctacggtattctgtcaccgttttttccttcgtcaatcccatgcaaagaatgatagacgaataattgccacagtttgtatgttcttggctgggaaagttgaagaaacacctagacctttgaaggatgttatcctggtatcttacgagcttattcataagaaggattctacagctggccagagaatcaagcagcagaaggaaatatatgataaacaaaaagaacttattttactcggggagcgaattgtacttgtaacacttgggtttgacctgaatattgaccatgcttacaagcccttggttgaagcaataaggagattcaatgttggtagtaaaagttcgcttcctcaggttgcctggaattttgtaaatgatggactgcgtacttcgctttgcctgcaattcgagcctcatcatattgcagcaggattttgatgtcacaccacggcagcttgaagaagttagcagtcaaatgatggagctgtatgttcagaaccgtacaccacaggcacaacaatcacagggaagcgaagctgaggggagctctgctggtgtgcgtaatcaacattcatctgtaaaatctgaaggaaactccaaggaaccatctgctcatggatatcatccggcattcaaaccgtcgaatttgcatcattcatccttggcaggtgctccaggtgaccatgacagtgggcattcaaattcagacaagcatgtttctggccacaaaatgcttcaaaatgataatggtaaccatgtcggtagcaaagaaaagaacaagagtggaggtaaatcggatgctggtatggatagattttgtcatgagaaatccccacctggacatcattattccaaggtcagccatgagtctcataatccagtggaagaacaaaaaccacatcaatcacatgataaccccaatgaaagaatagatggcattcttggtggcaacgaagttcctggtgtgtcgacctccaggatcgatgcaatgaataaaattgacaagggtaaggtaaaagcagctttggagaagcgaagaaaaacaaaaggtgatattaccacaaaggtagacgtgatggatgatgatgatctacttgagagagagcttgaacatggtgttgaattggctattgaggatgagaagattaagcaggataagatgcagaacttgtcccatattaaggacaagaagattacgcaggataatatgcagaacttgtcccatattaaggacgagcaggataacatgcagaacttgtccgacattaaggatgagaagattaagcaggatgagaggcagaacatgtcccatgctccagtggatcttcaaaccactgaccaagtaatggagaatggtcaccatgtcgagcctagtgtaccaacaactgtggaagacacggggtttccattggacaacaaagaacatcctccatttgataagcaaaatgatgttcctgagcacgagtcccagcagcttgaacacacattgaagcacgacctccctcagctggtaggggggcctgagcaggatgatggaacagactgtaaaaggcctaagctcgaagagtaggttctggatgatgctcactttattttggacagttttcctggagactggtgaactgcatacaacttggcacggagttggtgagcatggctttgccggtgccttgctgtgctgtgaaatatgccctacggctgattgcagtttacaattcgagggaggtcgtgctagcaaatatttttacgttcaaacgaacattggaatatatggaccaaaacatgctcacgcttctgataacggttgcattcgttccttaaatatgtgttccatgaaagtgaagcaaatgattttcatcccatcagggttgcatgcacctcatctcaatagaaaattaaaaaaacagtatttttataacttttcaacaatattatactacaacttttgtacaaaaaagctgtcgaggaaaacctttgtagaaaagttatttggaaaaaacttttgttgaaaatggttttttt

SEQ ID NO: 24951 - DNA, 2717 bp, Zea Mays
gttcctcagacgacgaccgtcaatatggtgctcgcgttcctggttctactgctgttatttgctcctgttgccgtcagccaacaaggtttcctgagcatcgactgcggcctggacgccagctacagcgggtacaaggacaaggtcaccggcatcgtctacgtctccgacggttcctacgtggacgccggcgagaaccacaggatagcccccgacctggagggctcgttccagggaagggctcagacgctaaggagcttcccgtccgggcagcggaactgctacttgctccccaccgtggctgggaccaggtacctggcgcgggccaccttcgcgtacggcaattacgacggcaagaacagctcggcgctggagttcgacctgcacctgggcgccaactactggcagacggtctacccgaacgcgcggagcagcgacgtgtacgaggcggtcttcgtcgcgtgggccgggtgggcgccgtggtgcctcgtcaacaccggccacggcacgccgttcgtgtccgtcttggagctcaggccgctcggagccgagctatacccactggtcacacccggcctggtcgtatccatgtttgcacgcataaacatggggggcagcgtttcaatgacgcggtatcctgacgatccgtacgaccgtttctggtgggcgatggacgaagctagcccacggtgggtgaacctgtcgaccacgcggcccattcaaccggacaccagctcctacgccgtgccctctcgcatcctgcagacagccgtcgccgcggcatcggacaacgatacggcggcggcgctcaccgccgtgacctggcagtactaaaccaagtactcgttcatgatattcctgcacttcaccgacttccaggacacccagcttcgacagtttgatatcctcatcaacgagaaccaatctgggccgaagctcacggcgtacaacgacacgtggtacctgactccaacccatgtgcacaccaaatcctacagggctgacgacggcaagtacaacgtcactcttgctgcaaccaaagcctccgtgctgcctccgatgatcaatgcgctggagatctacattcgtgtcccttatgagagtccgacgacactccctcaagactttgacgccatcgtggctatcaaaactgagtatggactcagcagaaactggatgggtgatccatgttttccaatcaaatatgcttgggacggtgtgaaatgcagcaacgcaagtggtaacacatcgaggataacatcactagacctctccaacagctctttgcatggcacaatttctaagaactttacactgctcacagcactcgagaatttggatttatcttacaacaagttgatcggatcaatacctgattccctgccaagtttgccttccctacgagttctaaatgtatctggcaaccagctgagtgacgaatccctatgtaaaaattatactggaccacttattttcagccgtgattttgatggctctgcatgcaacaaaccttcccccagcccgtcaagaaataaagtagctataatagctatttcagtagtggttcctgtgttagtactaattgtactactttttacatatttcatctggtgggcgaaaagaaagtctaatgtgcaaccagtacccacacatggcccaacaagagatccagaacctgataatgtttcaggaagccaaaaaagttatggctacaacatgaataaaactgagaatcgtcagttcacatacaaagagctggagaagttcactaataatttcaagaagttcataggacaaggaggttttgggcctgtctactatggccgcttggaagatgatactgaggttgctgtcaagatgcgttctgaatcatcgtcacatgggcttgatgaatttttagctgaggttcagagcttaacaaaggtgcatcacaggaatctagtgtccttgattggttactgctgggaaaaagatcatttggcactggtttatgagtacatgtctcagggcagtctttttgatcatctgagaggtaaaaatggtgtttcccaagccttgaattggaggaaacgtgtgcaagtagtgcttgaagctgcacaaggcctggattatctgcacaagggttgcagtttgccaatagtccaccgtgatgtgaagaccaacaacattctcctgggtcaaaatctgcaaggccgaggccacgtcattcagcgcgttaaacagaaggttgccaccggcgacgttggctcgatcgctgattcgcgacttggaagcgcttacgacatcagctccatgtggaaggtaatcgacaccgctgtgatgtgcaccgcggattctgctgctcagaggccaacgatggccacagttgtggtacagctgaaggagagcctggcgttggaggaaactcgtgagaagggcagcagcaacagggtgagccgagggagtgatatagaagctatggcgtccacacttggtccattcgcaagatgaagctatgcctgtacctggattcagttcatggttgacgtccctactaaaactgtgtatggtcacctaaaataatattttgcactgtaaaatgtattatttgcagagtgaagttttaatatggatatgagaataggtaaactgccgaagataacataaatgtctgcagtggcttgtatgtgtatggaatttgagaatccgcgcttgtgagccgggtaataaggggcgtgttt

SEQ ID NO: 24952 - DNA, 3616 bp, Zea Mays
ctagtagtaggtagtagtagaggagaacagccactcagccagccccctttacttgcacacaatagacaacctcgaacagaaaagaagcagttttgccgtccgagatgagccgccactgtgtgactctccttgtgatcatctttggattactgcagatggctgtggctctctactctaatccaagttcaacgcacccgaactgcacggagagatgtggcaacgtcagcatccaatatcctttcggcttcggatccggctgcttccggcagcccgatttcagcctcacctgcgacggcggcggcggcggcaaccagccgcccaagacctttctgcatgacggcatcaccgaggtcttgcccgattccggtgtcacggtgggtctgtcaaggcttattgatgtagccatttcccacaccatctttatggcacctggtattcctagttacaacttctcgtggaatctcagttctttcactatgttggatggctcattcaacgtaactgggtgtgacttcgatatatatcgtcaagaaccgggcaagaatggttccataccgcggtgtacaaatagctgcccccaaaacatcaccgagacggtggccagacagaactgcaatggaaccgggtgctgccgtctttacgttggagaagttgttcctgatttccagctgaaatttgtgctccacaataatgacactagaggtgatcatgatgctctttctaatggaagcaccctgtggaatacaataaacattaccagcaactgggcccaaatcttatgggatatagatgatcaaccgacatgctccagagcgaaggacaaaaatataaactacgcatgtgtcagcaactacagccattgctttgacgctgaactgtttgatattggttatagatgtggttgtaacagcggttacgtaggcaatccctatgtagttgatggctgcaagcgtgacgaaggatatagtccaaatcaactgaaggaaaactgctcgaggtcctgtggtaatatcagtgttccatatccctttggtttagaggaaggttgctctgcaaggaagctatttaaactcaactgcagaaatgcgacagcgtctatgctccaattcgatgacgaccgtgttgtggcgtttataaatgttgcagagagtctcgtgggcatcaggtttacctcacatttcgaagatgatcagcttgggatatatgtaccaggtgaacccgatctctttatgggtcttggggaatcagtggtctcaatgcactgggcagctgccaatcttacatgcgacgaggccctgaaaaataaatcacaatatgcatgtgtcagttcaaacagcaaatgtttaggagtcaattcaaaggatggttatattggatacagatgcaaatgcttagatggtttccaaggaaatccatataccatcagtgatggttgtgaaggtacaacttaactgtgattctcacccctatccaatttccatttaattttagtgtatctgctggatctattccgtcacatgcatatccactttatttcatcaccatgtatttacgctaacatcttctcaagatgggtcaaaaaaatatttttaatatttatcttgttacaagttgacacattttctttaggacttagaccttttatgagataatcagctagttggctatgagacttaatggaatagccttacacttccactatctgttggatcttttatgggtctggccaatttattgaataaactctatggtgtgtaatggtggagaatactaatagtaccatattggaaatccaagggtcttttggcttaacttatatggtgggaattattccacttaatttgagaagtcaagaaatgaacagggcgtaccacacgcgcgcgcgcgccgccgctgcccgggcgtggcgtggcgaggcaggcggcgagcgggcgtggtgtggttttgttaatttttagcactcattaacagcgggagtttcaactccgggttaaacctttcagttgtccgtctcttcgtcagccgcgcgagaccctttgtcctttagctgcccgtctcctggcgtgccgcatgcgacccttctcctttagcttccctctgcgagaggttaaatagaggagaacccctggcacttggtacacgagaacagaaccattttcagtcacagtccagccgcaagtgagagtattcccatctcgtgactctgcgcgcacagagcagcgagaggacaggtgcctccgaagcccttgccgttcgagaccttgcacaggggatcggcaattaggtttttggggagcgtctacgcgactgcccaaaacatcttcttcctggcgacatgacaagggaagctgaacaaggatctagatcatcagagcgcatgggaggaggttttgctgctgtgctaaagcttgatccttttgatggtaaaaacttcttgatttggaaagctaaaatggaattgtggctaactgcaatgttatgttattatgtcgctgagggcaagcctgccaacttacctcctgaggatgaagctaagtttaaggctgatgacaacctcttttgaggagcagtgattagcgcacttgacacaaaattccagaaaagctatatcatccttcccacagggaaagagctgtgggatgcacttgttggaaagtttggagttactgatgctggtagtgagttgtatctcatagagcagttgtatgactacaagatggttgagaaccgatctgtagtggaacaggctcatgagtttcaggcactagctaaggaactcgagctttttccttgtcctttgcctgacaagtttgtggctggcggtataatcgccaagttgccaccttcttggaaggattttgctacctctctcaaacataagagaaaagagttcaatgtggaagagcttattggtactcttgatgttgaggaaagagctagaacaaaggacaatggaaaaggtgttgagacctctactgctaatgtggtgcagaagagaaactttcgcaagtttaacaagaagaaaaaccagaacaaacaagagaatacaaataaacctgttcaaacagcacaatttaaaaagaagaagaacaacaacaagggaaagggaggatgctttgtctgtggcagtgatcaacactgggctagagagtgccctgatcgcaagttcacacaggacaagaaatcagctaatgttgtaaccactgaaactggagatggaacatctgggtatggtaattctttaccatttgttctctcagtttgtaactcacctgagtggtggatggacaatggtgcaaatattcatgtgtgtgttgatgcctctatgttctcctcctactaggtcgggaggtctgatgccttgttaatggaaaatgggtcgcgtgctcatgttcttggtgttggtacggtcattcttaagtttacctcgggaaagacagtgccattgaagagcgtgtagcatgtgccctctatcaagaagaatctcgttagcgtttctatgctatgttgagatggatacaaagttgttcttgagtctaataaatgtgttgtgtctaaacatggtatttttgttggtaaaggatatgactgtggaggtttgttccgcttatcactg

SEQ ID NO: 24953 - DNA, 529 bp, Zea Mays
acattctccacctcgtacggctggtcactgatattccggcgacgactggagtatcttttgggaccgaggtcgtgtgctacgagagcccacggccggtgctggggatccaccgggtcgtgtttctgctcttccagcagctcggccggcagacggtgtacgccccggggtggcggcagaacttcagcacccgcgacttcgccgagctctacaacctcggcttgccggtcgccgccgtctacttcaactgccagagggagtccggaaccggtgggagaagaatgtgatctcgacccggccgggtggaaattaataagatgacgggtaatcgggtatatgtatatatttatatatatatgtatatgtacgtgtatttgatctggtggcctttggttatatttgggtggggtgtatttgatatattatctgtggcagattggcgcattctctggcgcatatttgatagctacatgtatctatttatacagatataaagcgagcaataatatgcatatgagagggttcagccaca

SEQ ID NO: 24954 - DNA, 338 bp, Zea Mays
tggtgctgtcctatatgcatgtcccaatcccatctccatgtaatggtcttcttcccttcccatccatcgtccgtgagctccgagcgtgagggcgagaggcgtcgctagctggctctcacggccggcaaatctgcgatcaactgcagactctgctctagcactctgcaggctctgaaactctgcgtctcatggccaagattagttcaccgtatcgatcactgctgacctttcgaccttgaatgcagacgctagctgtcgtgcaatgtgtgcgtgtatctccaataaatcctaaacttcgcgtgaacttcgactccgccctgatggaatattagtccttg

SEQ ID NO: 24955 - DNA, 2735 bp, Zea Mays
ctagaaatcctaatgattcagcagcacacctgtccgcctagccgcctacgcgtacacagaaaacaatttttttgtccacacacgcgcgcgctccgagccgcagatccgagctagcgcggcgcatccgacggccacgacagcgcagtgccgtcctccgccgccaccgcttggcgattgtccgcaccccaccagtccaccacctcccccacgagcgaaaaccacggtccacggaccacggctatgttccactccaggtggaggctgcagccccggtttcgcaagccgcgccgtggtttgcttgcccacaggcggccaaaccgcaccctccttcccgctcatctcgctttggatcgattggtttcgtaactggtgagggactgagggtctcggagtggattgatttgggattctgttcgaagatttgcggaggggggcaatggcgaccgcggggaaggtgatcaagtgcaaagctgcggtggcatgggaggccggcaagccactgtcgatcgaggaggtggaggtagcgcctccgcaggccatggaggtgcgcgtcaagatcctcttcacctcgctctgccacaccgacgtctacttctgggaggccaaggggcagactcccgtgttccctcggatctttggccacgaggctggagggtatgttctattccccgatttacttcactatgttgctgactatatatgtgctgtgtttatattttgcatatttattatgtttttgcgtctgagtttatgggtatggttggtggtctttgtttactgttttactagatgcatgtggaagagtcagaagaaatagtttttgtttgaaatggtataccaacggttggatattatctgtgtggacatcagatgttctgggttactggcagtggactttgacagatttatctatgattctttcattagcagtttcttcagctaatttactcttactattttttcagtatacaaaggcacgtacagctagggttgtgtagaatcattttagatctgttatctgaggcaaatttgcttattctagccgcctgaaatttcttgattttgccagtatcatagagagtgttggagagggtgtgactgacgtagctccgggcgaccatgtccttcctgtgttcactggggagtgcaaggagtgtgcccactgcaagtcggcagagagcaacatgtgtgatctgctcaggatcaacaccgaccgcggtgtgatgattgccgatggcaagtcgcggttttcaatcaatgggaagcctatctaccactttgttgggacttccaccttcagcgagtacaccgtcatgcatgtgggttgtgttgcaaagatcaaccctcaggctccccttgataaagtttgcgtccttagctgtggtatttctaccggtcttggtgcatcaattaatgttgcaaaacctccgaagggttcgacagtggctgttttcggtttaggagccgttggtcttgccgctgcagaaggtgcaaggattgctggagcgtcaaggatcattggtgtcgacctgaaccccagcagattcgaagaaggtacagtacacacacatatgtatatatgtatgatgtatcccttcgatcgaaggcatgccttggtcgaataactgagtagtcattttattacgttattttgacaagtcagtagttcatccatttgtcccattttttcagctaggaagtttggttacactggccttggtctaataactgagtagtcattttattacgttgtttcgacaagtcagtagctcatccatctgtcccatttttttcagctaggaagtttggttacactggacttggtctaataactgagtagtcattttattacgttgtttcgacaagtcattagctcatccatctgtcccatttttcagctaggaagttcggttgcactgaatttgtgaacccaaaagaccacaacaagccagtgcaggaggtacttgctgagatgaccaacggaggggtcgaccgcagtgtggaatgcactggcaacattaatgctatgatccaagctttcgaatgtgttcatgatggctggggtgttgctgtgctggtgggtgtgccacataaggacgctgagttcaagacccacccgatgaacttcctgaacgaaaggaccctgaaggggaccttctttggcaactataagccacgcactgatctgccaaatgtggtggagctgtacatgaaaaaggagctggaggtggagaagttcatcacgcacagcgtcccgttcgccgagatcaacaaggcgttcgacctgatggccaagggggagggcatccgctgcatcatccgcatggagaactagatttcgctgtctagtttgtgatctggcctgggcttggggttaataaaagaggcaatgctagcctgccctttcgatgaggaggtacatacacgctggcgatggaccgcgcttgtgtgtcgcgttcagtttggcttttgccaagcagtagggtagcttcccgtgtcggtaattatatggtatgaaccatcaccttttggctctacatggtatgaacgtaagatacaaattccaactacctctagctcgcttgtgtggtatctgtatcagtattcatgtgtttgtttgcttatgtgtttgtttgcttgtatttgctggtgcttgtatcgcgggatgcaatgagttgttgtttggttgttgtcaaccaggctctatgtgtgtgtgcgaggtgtgtgtttggtta

SEQ ID NO: 24956 - DNA, 1378 bp, Zea Mays
tagaaacacgtcttggagtgctctgctccgaggaatatggatcggtggatctggcatggatctcaggagcaaagcaaggaccctctccggcccggtgaccgatcccagcaagctgcccaagtggaactacgacggctccagcacgggccaggcccccggcgaggacagcgaggtcatcctgtacccgcaggccatcttcaaggacccattcaggaggggcaacaacatccttgtgatgtgcgattgctacaccccagccggcgagccaatccccaccaacaagaggtacaacgccgccaagatcttcagcagccctgaggtcgccgccgaggagccgtggtatggtattgagcaggagtacaccctcctccagaaggacaccaactggccccttgggtggcccatcggtggcttccccggccctcagggtccttactactgtggaatcggcgccgaaaagtcgttcggccgcgacatcgtggacgcccactacaaggcctgcttgtatgcgggcatcaacatcagtggcatcaacggggaggtgatgccagggcagtgggagttccaagtcgggccttccgtgggtatttcttcaggcgaccaggtctgggtcgctcgctacattcttgagaggatcacggagatcgccggtgtggtggtgacgttcgacccgaagccgatcccgggcgactggaacggcgccggcgcgcacaccaactacagcacggagtcgatgaggaaggagggcgggtacgaggtgatcaaggcggccatcgagaagctgaagctgcggcacagggagcacatcgcggcctacggcgagggcaacgagcgccggctcaccggcaggcacgagaccgccgacatcaacacgttcagctggggcgtggccaaccgcggcgcgtcggtgcgcgtgggccgggagacggagcagaacggcaagggctacttcgaggaccgccgcccggcgtccaacatggacccctacgtggtcacctccatgatcgccgagaccaccatcatctggaagccctgagcgccgcggccgttgcgttgcagggtccccgaagcgattgcaaagccattgttccttccgttccgtttgcttattattgttattatctagctagatcatctgggggtcaggtcgtcgtggtgtgccaaaacagaacacagaaagaggaagaagaaaaaaaaaacaagacgtgtggcgtttatgttatatcatccaataatggccgtaccacacttgtggtacctttcagtacgtatgcttgcattgtatgaggggtcgctttcctacgccctaccatgtctgtggctttccttgcttggtgatgcgatatggagggaatcgttcgtcagtgccagtgggcgg

SEQ ID NO: 24957 - DNA, 5865 bp, Zea Mays
ctcccatctctatccacgacaaccgacgccccactccccgatccaaaccacctcaaacccccgccccgcccagatccagatccacgcggcgcggcgcgaccgcggctaccggatcccgccgcggaataatggcctccgcggttgcggcgccgccgccaaccccgccggagtccgacccgcgcctcgtcgagatcttctcccccttcctcgagaagctcataaaaaatgcctcgtggcgcaacaaggcgcactccaagctctcgcacaccgccaagtccatcctcgaccgcctccagaagcccccgccgccgcccgcagccgaggcgcaggcgccgtccacgccgacctcctccccctcgacgccgacctcctcttccgcacagcctggtccgttgcgcagcctgtcgctcgcggactcggagctgctcctcgcccctgtgatctcggcactcggctcgggcagcgccaagctcgccgaggccgcgctggagctccttcacaggctgatcgcacactcctacatccatggcgaggccgacccatctgctgatccctcagcacagctcgtcgcctcactcctggacgccgcctgcaatgcgcttggccttgatgacgagcacattgagctcctcctcctcaagacactcctctcggcggtcacctctacgtctgtacgcctccacggcgattgccttctacgtgccgtgcgcgcatgttatgatatgtacctcgggagccgtagtgccgtcaatcaagccactgccaaggcttcgcttgtgcagatgctggtgattgtgttccgccgaatggaagctgactcctcgaccgtgcctgtacaacccatagtcgtggctgatgtgattgagctacctgatgcaatttcgggctcctcgcccactgctgaccccaacgttgtacagggattcatttcgaagatcattggtgacttcgatggtgcactcacacctctggctcggacaacttcatcagcaggggcaggacccaccgttgcccatgatggtgcatttgagacaacggcagcggcagaggaaggggcaaacccagcggatttgcttgattcaacagataaggacatgcttgatgccaagtactgggagatcagcatgtacaaaacagctattgagggtcgtaaagatgagcttggtgtcgagggggcagtggttggcaccttggacgatgatgctgatgtgagaattgggaacaagttacggagggatgctttcttagttttccgggctttgtgtaagctttccatgaagacaccacccaaggatgcaccagcagatcccatagtaatgcggggaaagatccttgctcttgagcttctcaagatcttgcttgaaaatgctggggctgtgttccggaccagtgagagcttagtggcaagattcagaccaggattgaaggcagagattggtgtattctttcccatgatcatcttgagagtgttggaaaatattgctcaaccaaattatcaggcaaagatgattgttcttcgttttttggaaaagctctgtggtgattctcaaatcctagttgatattttccttaattatgattgtgatgtccactcatcaaacatatttgagaggatggtaaatggtctactaaagacagctcaaggacctcctgctggtgtccctaccacattggtaccacctcaggacaccacaatgaaaagtgaagcaatgaaatgcttagttgctattctgaggtccatgggagattggatgaataagcagctacgaattccagatcctgcttctcctaatgtagaatcagagaagaacgacaatgatgatggcaatgagcttccgcaggcagataacaatggagatgagtctagtgaagcatctgattcacattctgagttatcgaatggaatttcagaggcagcatcattggaacaacgtcgagcttacaagatagagcttcaggagggtatctatttgtttaatcggaagccgaagaaggggattgagttccttgttaatgcaagcaaggtgggggagacaccagaggagatagctgcgttcctaaaaagtgcttctggcttgaacaagactatgattggtgattatttaggtgaaagggaagatttatcgctgaaagtcatgcatgcatatgtggactcatttgattttcaaagactggagtttgatgaagcaattagagctttcctccaaggcttcaggttgcctggagaagctcagaagattgatcggattatggaaaagtttgcagagcgttactgcaaatgtaatccaaaggccttttccagtgcagatacagcttatgttctggcttattcagtcataatgcttaacactgatgcacataacccaatggtcaaaaataagatgtcaccagaagatttcattagaaacaatcgtggtatcgatgatgggaaggacctacctgaagaatttatgagatcattgtatgaaaggatttggaaaaaggagattaagatgaaagaagatgaatttgttccacagcagcaacaatcaacaagttctaacaaaattcttgggttggataacattcttaacattgttgtacgcaagcgaggttcatctatggagacaagtgatgacctcattaagcatatgcaggagcaatttaaagaaaaggcccgcatgtctgagtctgtattttatccagccacagatgtagttgttttgaagttcatggttgaggtttgctgggctcctatgcttgcagcattcagtgttccacttgaccagagtgatgatgaaattgttgtatcccagtgccttgaaggatttcgctctgcaatccatgttactgcagccatgtcaatgaagactcaaagagatgcatttatcacttcacttgccaagtttacatcacttcactctgctgctgatattaagcagaaaaatgttgaagccattaaggcaattctattaattgcagatgaagatggaaattacttgcaagaagcatgggagcatatattgacatgtgtttctcgttttgaaaatctacatcttgttggagagggagcacctccagatgccactttctttgcgctgcagcagccggaccttgataaatcaaaacaggctaagtcatcgattcttcctgttctgaaaaagaaggctcctaatgctacttcagcttctaaaagaggctcttatgatagcgctggtgtcggtggcaaagcttctggtgtggatcaaatgaataatgaggtgacaagcctcttggagcaagttgggatggctgaaatgaaccgtgtatttgtaagaagtcaaaaactcaacagcgagggtataattgattttgtgaaggctctctgtaaggtttcaatggaggaattacgttcggcttctgatccacgagtttttagtctgacaaagatagtcgagatagcgcattacaatatgaaccgcatcagacttgtttggtcaagtatatggcatgtcttgtctgatttttttgtcaccattggctgctcagaaaatctttcaatcgcaatatttgctatggactccttgcggcagttatctatgaagttcctggagcgtgaggagctcacaaactacaatttccaaaatgaatttatgaagccttttgttgttgtaatgaggaagagccgagctgttgagatcagagaacttatcattaggtgtgtctctcaaatggtattggcccgtgttagtcatgtgaagtcagggtggaagagtatgtttatggtctttgcgacagcgtcatatgatgatcacaaaaatattgtactattggcctttgaaattatagaaaagattttgcgggaatactttccatacattactgagactgagacaacgactttcaacgattgtgtgaattgtcttatcgcgtttactaacagcaggtttaacaaggatataagtcttaatgcaattggatttcttcgattctgcgcagcaaagttggccgaaggtgatattggatcctcaaggttgaaggacaatccttcaaacagtaatccaccctcgcctcatttgactaatgatggaaagcaggaatgcacagttcttgttgacaaggaagaccatatacacttttggtttcctttactagcgggactgtctgaacttacctttgacttaagaccagaaatcaggaaaagtgctttgcaagtgttatttgatacattaagaaaccatggccatcttttctctctgcctttatgggagaaggtgtttgattcagtgcttttccccatatttgattatgtacgtcatgctattgatccatctggtaatcctccacaaggacaaagcgtggaaaatgatcctgcagaacttgatcaagatgcttggttatacgagacatgcactttggcacttcagttggttgtagatctctttgttaagttctatgatacagtcaatcctcttctaaagaaggttctgctgctcttgacaagtttcataaagcgtccccatcagagtcttgctggtataggtattgctgcatttgttcgtttgatgagcagtgctggatctatgttcgtggatgaaaaatggctagaggttgtattgtcattgaaagaagctgccactgagacacttcctgatttcacttatgtttcatctggagcctacctggaaaatgtgccaacagaaaatggagtctctgctgacaatagagaggacgaatctgaaccagtagcggatgacaatgaagaatcctctagatcaaggaatctatactttacaattggtgatgccaaatgtcgagctgctgtacaactcctgttgattcaggctgtgatggaggtatataacatgtacagaggacagttatcagcacagaacacagtaatcctcttcgaagccttgcatactgttgccgcacatgctcacaaaataaacagtgatagtgatttgcgttccaagttgcaagagttgggctcgatgacacagatgcaggacccgccattgttacgccttgagaatgagtcgtaccagctgtgcctcagtatccttcagaacatatttctggacagctctcctgatcatggaagcacagaggtggtggagagtcaccttattggcttgtgcaaggaggtccttgaggtatacttgagcacagcaagaccttctcagccttccagtggcacacagccgctaggccattggcttatccctgttggttcatcgaagcgaagggaacttgcggcaagagcacctcttgttgtctcaaccctgcaagctatcagcggactaggtgactcagctttcgagaagaaccttcgccagttctttcctcttctcgctgggctcataagctgcgagcatggttctagtgaagtacaggtggccctgagtgatatgttcagcacttgggttggcccactcgttctccagtcttgctgatgctgaacatcatgttatacatagtagtatacatcccatcgtgttcctcctttcctccattatgttatgttaatcttttagtcgctgggagttcatattgttgtgctgaactgatcatgcagatcaatttttccttgacgttattttcttgttcgtatcgggaggagtgtatgtcactatagagaactgaattatgtacggtagtttagctaaaattgtgcccattctgttcctaatgtgctgatttctagatttttaggcatgttttgcatgcttttgctcagtagcgtttctcctttctggaattctggaatgtggtagggttggattataattcttgcgagttgggtgtgttaggctatcttcttttatcttaccttctattttaaactctattatgtaattagtgcaatttatagtataaaacattgttttgcacgtccatttacac

SEQ ID NO: 24958 - DNA, 4423 bp, Zea Mays
ttcatctgttgtatttgtttggcaacctgtgagaacaggacgagaagaaccaatggttccgatggatctatattgttatacattgccgctttgattgctgatcttcttctgctgccactacttggatggagaatgccatcaagttaaaggttacaatttgaactgctggcaatggggcctcattgttccttcatcttgatcctactgctatgcttcacccccagctctgctttgactggacataatgatataaatacattgttcaaactgagggacatggtcactgaagggaagggatttctccgtgactggtttgattcagaaaaagccccttgcagttggtcaggtataacttgtgtggaacatgctgtagtggatatagacttgtcatctgtgccaatttatgccccgttcccgttatgtgtcgggtcattccaatcactggctcgtctcaacttcagtggttgtgggttttctggcgagcttccggatgccttggggagcttgcacaatcttgagtaccttgatttgagccataaccagcttacaggggcccttcctgtttcattgtatggactgaagtcattgaaagaagtagtgcttgacaataatttcttttctggtcaattgagccctgctattgcacagcttgagtacctcaagaagttttctgtatcctcaaattctatctctggtgccattcctccagagttgggcagtttgcagaatctggagttcctggaccttcacatgaacgcacttaacgggtcgataccatcagctttgggtaatctgtctcagctcttgcaccttgatgctagccagaataatatctgcggctcgatatttccaggaataactgcaatggcaaacctagttacagttgatctctcttcaaatgctttggtggggccactacctagggagattggtcagctacggaatgctcaactgataatattgggacataatggtttcaatggaagcattccagaagagatcggtgaactaaagctgctggaagagctcgatgtccctggatgcaagctcacaggcatcccttggacagttggtgatcttagaagtttgagaaagcttgatatttcagggaatgatttcaatactgaacttccggcatctattggcaagctgggaaatctgactcgtctatatgcaaggagtgctgggcttactgggaatattccgagagaacttggtaactgcaagaagcttgtctttgttgatctcaatggcaactccttttctggccctatacctggagaacttgcaggtttagaagccattgtcacattagatgtgcaagggaacaatctatctggtcccattccagagtggatccggaattggacgaaccttcgttcaatatatctggcgcagaacatgttcgatggacccctgccagtactgccattgcagcatctagttattttttctgcagaaaccaacatgctatcaggttctattcctgatgagatctgtcaggccaaatcactgcagtcactcttgttgcacaacaacaatctgactgggaatatcatggaggcatttaaagggtgcaagaaccttacggaacttaacctgcaaggaaaccatcttcatggtgagataccacattacttgtctgagctaccactagtaacagtggaattggcccaaaacaacttcacaggaaagctgccagagaaattgtgggaatcatcaactattctggagatcacactcagctacaatcagcttactggccctatacctgaaagcatcggtagactctccagtttgcagaggctacagatcgacagtaactacttagaagggcctattccgcggtcaatcggctctctaaggaatctgacaaatctctctctatggggcaataggctgtctgggaacattccacttgagctcttcaactgcagaaaccttgtcaccttggatctaagttctaacaatttgtctggccacatcccgagtgccatatcacacttgacatttctcaacagcttgaacttgtccaataaccagctgtccagtgctatacctgctgagatctgtgttggatttgggagtgcagctcaccctgactcagagtttatccagcatcatggtttgcttgatctttcatacaacagattgactggtcatataccagcagcgatcaagaattgtgttatggttacagtcctcaacctccaaggaaatatgctaagtggtgccattccaccagagctttcagaactgcctaatgttacatccatctatctttctcataacacattagttggccccatacttccttggtctgtaccgtcggttcaactgcagggcctttttctctctaataaccacttaagtggctccattcctgctgagataggtcaaatacttcccaaaatcgaaaagctagacttatccagtaatgcacttactggaacactacccgactctttactctgcatcaattacttaacctatctggatatcagcaataacagcctctctggacaaatcccattgtcttgtcctaaagaaaaagaggcatcgagctccctgatattgttcaatgggagcagtaaccatttctcagggaacctagatgagtctatttcaaacttcacacaactgtcttttcttgatatccacaacaacagcctcactggaagtttgcccttctcactttctgatctcagttatttaaactatcttgacctctcaagcaatgacttcaatggccccgccccttgtggtatctgcaatatagttggcctcacatttgccgacttctctggtaatcacattggcatgagcggcttagtggattgtgctgcagaaggcttttgtactggaaagggttttgatcggaaggcacttaattcatctgatagagttcgaagagcagcaatcatttgtgttagtatactcactgttgtcattgtcttagtttttctggtggtttatctgaaacggaggctattgagaagcagacccttggctcttgtacctgtcagcaaggccaaggctaccattgaaccaacctcaagtgatgagctcctagggaagaagtttcgagaacccttgagtatcaatcttgcaacatttgagcatgcacttctgagggtcaccgcagatgatatccagaaagccacggagaatttcagtaaggtgcacattattggggatggtgggtttggcactgtctacagggcagcacttcctgaaggtcggagagtagcgatcaaaaggcttcatggtggccatcagttccaaggtgatcgtgaattcctggccgaaatggagacaattggaaaggtgaaacatcctaaccttgttcctctacttggctactgtgtatgtggtgatgaaaggttcctgatatacgagtacatggaaaatgggagccttgagatgtggctcaggaaccgggctgatgccatcgaaacacttggatggccagaccgcctgaagatatgtattggttctgcccgcggtctttcgttcctgcatcacggttttgtgccccatatcatccaccgtgacatgaagtcaagcaacattctattggacgagaactttgagccaagggtctctgattttggccttgcaaggataatcagtgcatgcgagactcatgtcagcactgacattgctggtacatttggctacatacctccagagtatgccctgacaatgaagtcctctacaaaaggcgacgtctacagctttggcgttgtcatgcttgagctgctcactggacggccacctacagggcaagaggaaggggaagggggtggaaaccttgtaggctgggtgcgatggatgatggcacatggcaaggaaggtgagctgtttgatccttgtttgcctgtctcaagcgtgtggcgggtacagatggcccatgtgctcgccattgcccgagactgcactgtggacgagccatggaagaggccaactatgctggaggtggtgaagggcctcaagatggccgaaacgatagaatgtggacctctggttgtgacagtcaccaaggacatgtaatgctgacggcatcaacgctgatgtatggaactgggtgttcagggaatgttgttcttgtgtcgatataataatgtaggctccttgttgctgtagctgtactggtgactgtaatgagaaactaacgctgctcatgttcaggctgtagttattgatgtaaccttttcatctggacccaagcaagcacttatgatatggcagggatcgtttaagcacaaaagatgcagtgactaggtttagctcttgagattttgcattctactacattttctactttgttgttctactgctcatggtcctccccagattcaacccatgccagtttggcctgattactcagctatccttgctgtcttaatggggctataccgct

SEQ ID NO: 24959 - DNA, 3151 bp, Zea Mays
tcctcctccccaaattcctctcctcgtgtcctccctcgctaccacgcttgggtgaaatgccctcgccgcctctccctgtgctcgcccaaatcgtcgcctctccctccctgtcgcccctgcgccacggtgcttcacgccgttgaagtcacttcactcatcccgccgatgcagtcgcccacaccgcctcctcccctcctccgctcaagccgcaccgcgacagctacacgccgcgatgtcagctgccagcagcgcccccctcttaacaacgtcgcgacgtcctcgtgggctaaaccccctccatcacttcttcccgtcgagatgcacaacaccgcgagatccatccaccttctccagcacccccacccccgctcaaatggtgtcgcgatgtccgccaccaacagcgccccttcccccctctcaaacaacgtcgcgacgtctgcgagttctagtaccggctgacagcggctgcggcgaagctatctgagcggtagcggagtactaaggggtggagagagggagcactgtctcatgcatgaaataaagtctccaaaacaaaagatttggtccagagcgcggccacacgggcccaacaatagcaacgtcacatggtggttgccattgtcacgtcgagctctccctctccaccaactaacagttcctgacggtggagcagaaattcattaagagcatatagggattcacaagtgattttgagcccaacaatcttgctgccatcgatactcctggttcgtatatttggttactcaaaacatgagatgatcctctgaagtagaaagggaaacaccgaatatgctcttgctgaaatattctatagaaagacacaattccattttggcagatgcaagtgtatggttattctactcatggaagatctacagggaagaaattgaggtagcatataactgccgcaagggaaaatatggtgtagcagatgaggatataatcttatatggtcaatgtgtttgaattggtccaaccattgatatttcttcgcggttgctagacttgagagtcgcagttttgcatagtcctatattctatctgcactaagagtaatatatacagccaagcggacgtttggtttaacatttacaagttgttacagagcaacagcccagggaggccaagatgctacttagctactaaaaccaactgacaacaagtgcacagcccagtgggccgctaagctgcaagaaaaccctcgcccctcgttctggattgagattctctgcagaggctgcgatgttgggccgtcctgccctgcccggtgggtatatgtaagctcagaccgccaccggaaccttctcgagcccgcggccgcacacctccgcccgaagccgccagtcggactacgaacggcggcggcgcctcggctcccctgatctccctcaccggaatggacggccaggctccgccgcttctcgacgccgtcgtgctcgagccccttgcagttggcgacgagctccatccgcggcgtcctgtcgaggtggaggacgctccggccgccgctccgccctccggtatggacggccaggttccacctctctacaacgtcacgcgggatcctctgaccgtatccgacgagctgcagcccacgggcgaggtggtggatgacgccctactcgtcgcgcccgatatcgtcaagggcgaggtgatggaggacgacatcctacccgtcgcaaccgacatcatcaacgacgccgcctcggagtgccccgaggctggcagtgatggcgtcgtgctcaccgacgagctccgcaatcgcatcgtcaagcaggtggagtactatttcagcgatgagaaccttcctacggacgagttcctgctgaattatgtgaagaagaacaataagggctttgttcctattgagatcatcgcatcatttaggagaatgaagaaactcgttcaagacctctcagtaattgaagctgcactcaggacatcatcaaagctggttgtaagttcaaatgggaaacgggtcaggaggttacatccattgccacacaaagaattgaaagattcaaagaaaagcactgttttggtcgaaaatctacctccagatttctcaatggagagtattcaggaaaaattcgcaacagtgggcaaagttgtgaacataacaattaatgatccagaatcagtgaaagaattttcaactgctaagaagcctgacttcaatttaagttttaaggttactgccctaagtgatgagagcaactggagaactgggatgaaagtcaggcttctgtctaaacaaagtgtaatgggaccaggaaagtataaaaaaccttctaaagaaaatcaagatgcagtttccaaaatgattgatcagaatcaacattcaaaagaagaccagcttaaaaccttggaaaagatctccggtgctgatgcagtggggattaccaaggacagagataatttgaaacctgtttttatcactgagactgagcaccaagatcagaagccaaatgctagaggacgaaaaggatggtacaaaggtcaaggtcagatgcagcaaaatgcaaacaaacaaggcagttgtggttccgagtcattaaacaagcctatttctggaccgaggatgccagatggaacaaggggcttcacactgggacgtggtagatctcttccactacagaagtctgagaaggctgaagagtagagctaccaaaaaaggcctgttaagaaccttatccaaagaagctgggtaaaatctaacagaaaacctttgcttttttttttttgaaacttaagatcatcgaagccgttctttgcatggaatgggacacagaagaaagggaatcttggaatggctttctctctgcaagaaatggaacacaaaagggaatctgggaatgacttgtacagaaacacaattgtctgggggtagttccgagttcactcgtatggaacacagtagaacctttgcatgtttcctgacttgcattgtgtcatatactcgtatcatgctgcatgcagcattgcagccctgtttgcaatttcagcagccgggggctggggccgtgagcccgtgaccctgcaccatccgggtctaccacgagcccccctgttctgcgaggcgtttggcccctcatccctatggatctgtactctgtaggctctccttata

SEQ ID NO: 24960 - DNA, 2540 bp, Zea Mays
tttccgtgcgcatggccgccgcgcgggcgcaaccaccaccgccgtggccggatgtctagaaagcccctcctccccacctgcgggtcctccacccctcccccgctcctcctcctccgccgcttcctccctcgccgccgcgcgacctcctctcccccgccgccctccacccggcggaggaccgccgccatgccaccccgcgccggcgactccgccgcggcggcggctgcggcggcatccttccgtctcgggatggtgcgggtggtctctttccttgtaggcgggctcaacctcgcggtgctgctgctcggactctacattatcgacgccgtgctcccgtcggggtgcggcggggggctcgctttcgcctcggcgcccgctctggctggggtccgcgtgctctccatgatcggcgccgcgcgcgcgcagcacgccacggcggacgccatagctaagcgccacctccacgagagcgacgcatctgtcgcagctgatgccgtagctcgccacgagattagggtgaggtacaaacgctggttgtggtggaccagatttggtatggcagttggtgcattgcagttggttgcagcaatttatctcatgtttgtcattgtaagagatctctcaaatgaaagaagatccacttcctgcttctttggataaagctgatcgggtgtcagtacgagcacttattgctttatttcttatcctttcatgggttgtgatcattgtccaatgcttcacgggttctgatatattgaggtggcgatcattttatgcaacacatgatatggcatggaaagctcattacagggaagtgttcgaccatggaatccgagaagctttgtgctgcctaggacgtgcaaaatatctaactgtattggaagaagatgaggtttattctgttgcaagactccttggtgatttggttgcatatcgtgcttctgggacaggacatttggagctcttagcagggcttgctctattgcagaagcacgggaatttatctgaattgcagactgaccttgtggaggcatcccatgagcttatgcaagaagctgctttcctccatccatttgcggaagcatgttatacgggaccacttcttgattttggacgaaatcctatcctgtttccctgtgcatgggtttatagacaaggtgtgttaactccatgggcacgcagaagacgccctgcacttgatggtgataattggtggcgaggccatgctgcagctttccttagatttgttaatataccacctaaagcacttctgaaaggacgtgtttgccagagcaagcgtgaagctgcttattttgttgtggttctccatgacaaaagaactgttgtcattggggttcgtggaacagagacaccagaggatctcataactgatggattatgcagagaatgtgcttttactatggaagatttggatggactagtaaatagtgaacaattacctgcaactacaagagagagagttatttcaacatttccacactatggtcatggtggaattgtagagtctgccagggagcttttcatgcaactaaatggagaaaacacatcttctggaagacttgggttcctttccacactgctgggggagggcagtgagtgtcatggatataaagttcgtcttgttgggcattctttaggaggcgctgttgctacagtcctaggaatgatgctatatggcaaatacccaagcgtgcatgtatatgcatatggaccacttccttgtgtggactttgtaatagcggaagcatgttcgcattttgtcacaaccattatttgcaatgatgaattttcctctcgcctttcaatcaattcgattcttaggctacgatctgctgcaataagtgctctttcagataactctccagctgatacagcaatgatacaaaagctcgctcgaagaattttgcatgtgaacaggtatcatgataatggtcctgacgatggcataatccagggctatgctgatcatacaagaacagcagatacaacagtaccgaatgaaagacaaatttctcatcagattccattatgcaatactgaactagacctccacaatacgcaaaatggcttttttaggtataatgggtccagtgcatcaatagatgagcatctgagctatgaaggcataagcagtggccatgatatgcaaataattccacttgatggggctgattctggttttgaagggcaccagacatcttacagagaaataccagtggagcctcctgagatgtttcttgcaggcttaattgttcacatagtgcggcaaagaagaagtctctttcctctttggaaatgctggagcatccaggaaactgaaccaccatacaaagctgttttagcgaaaagggagaacttcagggatatagtggttactccttacatgtttacagatcacttaccatggagatgttcgtgcttctactatacctgcctcacgattagaacagtccttgatggagtccttatcttcttcaattgtgccttcttcagtggaatggcagcatgcaatggacgag

SEQ ID NO: 24961 - DNA, 3518 bp, Zea Mays
catagtcgtctccctgtcctcccacctctgcccacggtccacgggacgacatccagtccagccatggtcggccccgagatgctcgtcgccgcgacggtgaaccaggtcgttcggaagatcaacgagatcatcggcgtcgcgcagggcgagacgaagctgtgctgcagcttcagcgacgacctcgagggcatcaaggacaccctggtataccttgaaggcctcctcaagaacgcggagagcaactcctttgggagcgatagggcgaacctgcggcactggctgggccagatcaagtctctggcttacgatatcgaagacattgttgatggctactactcctccaaggagcaatatgagggaagcaactatgctcagaagggatctttactctgctctttatccaatcccatgctttcgaaggttagcatggttcataagatgaaatccaagagggagttgttacagacaaggcaaaatttaccgacccagtatcatttcatctcacatattaactcagtggtaaattatgatgagaagcagacaacatcatacagaaattgtgacatcagaattgttgggaggggtccagacttggagcatcttatgtacatgttaatgcagataaatttgaaagagcttaccattatttccatagttgggcctgtgggccttgggaagacaacccttgcacaacttattttcaatgatgcaagagctgagacattcagattcagaatatgggttcatgtctccatgggcaatgtcagcctccaaaaaattgggagagatatagttttgcaaactacagaaaaaattgagggaaacatgcagatgcagtcaatcaagaatgttgttcaagacatacttaataagtatagttgcttaatagtgttagatagcttgtggggaaaagatgaagaagtgaatgagctgaagcagatgttgcttacaggtagaaagactgaaagcaaggtcatagtgaccactcacagcagtaaagtagcagagctgatatccactgtgccaccatacaaactgtctttgttgtcagaagatgattgttcagctatattctgtcaaagggcaattgcaggtcagtctatcagtgacccacttttcagggaatatggagaagaaattgttaggagatgtgaaggcatgcccttggtagccaattttcttggatctgtggtgaatgctcaaagacagaggcgtgagatatggaaagctgcaagggataaagacatgtggaagatagaggaagactaccctgaaaacaaaattgtgccaatgtttccatctttcaagatagtatactacagtatgccccatgagctaaggttatgctttgtctactgttcaatctttcctaaaggatatgtcatagataagaaaaaacttattcagcaatggattgcacttgacatgattgaatccaaacatggaaccttgccgcttgatgttactgctgagaaatacattgatgaacttaaagatatttatctccttcaagttttagagaggcatcagattgatgcagaaatatccaatacttctgaagaaaagctctacatgaataatttggcacatgatcttgctaggtcagttgctggtgaagatatccttgtgatcttagatgctgagaatgtacgctgcaatagaaattatgattaccgttatgcacaagtgtcaacttctagcttacaatcaatagatagcaaggcttggccttccaaggcaaggtcactagttttcaagtcaagtgcagaattgcagcatgtcagcgaagttctttcagtgaacaaatatttgcgtgttttggatatcagtgggtgttctgtgaaggagatgcccgctccaatttttcagatgaaacaactgagatatcttgatgcttcaacattgtccattgcagatctgcctccccaaattagtggctttcctaagctacagacactggatctgtctgatactgaagtaactgagctaccagccttcattgccaacttaaagagactgaattatttgaatctccaaggttgcaagaaacttaagcagttgaataacctagatttgctgcatgagttacattacctaaacttgtcacgttgcctggaagttagaagttttcccgcatctctgaaaaatcttaggaaacttcgttttctgaacctttcgcaatgttctaagcttccaacattacctgatgaattattgcaatcattctctagtttttcttccattgtggatttaaacttaagtggatttgagttccaaatgctacctgacttttttggcaacatttgttcacttcagtttttgagtctgtcaaaatgctcaaaacttgagctactcccccaatcatttggtcagcttgcatatttgaaaggtctggacctttcattttgttctgatcttaaactcccagagtcctttaagtacctttcttctcttcagtttctaaatctatcacactgccataatgtagaatatctgccatcttttgacaaacttagtaatttggagtatcttaatttatcacaatgtgctggactcaaagcattacctaagtcactttcaaaccaaaaaaatctccaaattgaggtttttgggtgccaggattgcatagtgcagtcatgttatttaagcccacagtcccatacatgctcacaagaagtcaaggaagttggatcaagtagtgatatctcagataccattctaaaggagtctgcaaacagagatgtggcattaggaataagttttccagaaattgatgaagttggttatccacataataatctgaaacaaaaattgacattatcttatcatatggatggacataaaagtgaagagcctaatttcattaccaagcagaactcaactacagagacggtacaactaacccccaggcaccagttcccatcatctacatgtcgtatttcttcgattgcatcaagttctagtgcactatttgcatctggctcctcttcagatgtctcgataacttacaatccagtgtccaatgacaaagcaggcaatcaaacaggacctcagacagagtcaacgcatacggtggtctaagacgagacgatgcgggtaaccaaacatatggtttgtgattcagtccagactcaccgctgaatagagggagtggtaacccaatgggtgacggatctagaatttgactatagggtgatactatctaccatggctagtgcatcacttcttcagtcccgtagtgaatagtgattgagtagaggctggtggactcagttaaatccctcttatgcttttggtgaactgagatggttatcaaactagctatatttggacttatcttgttgtaagactttttaaatatgttgtttatctatcggatttggaacatgtaatatactagctacttatgaacctgaacttataaaataaatgtaatatactagctgtacatgtgaatctgaacttataaaataaattgtgttggatgtatgttgacgtttaattatgtatgatcttgg

SEQ ID NO: 24962 - DNA, 563 bp, Zea Mays
tatcaatttatgccgtgcttctgatttcatggattttaggaaactacagcagatggatttatatgatgaacacgccaggatgagaaggcgattgttgaacgatcgcctcctacttgctgaaagaagcttcctgcaacctgaagggctccaaggaagaggatggtttaagcatctgttgtactcgcctccggaggactacgaaagcaagctgtcgttcttccctgggatcgctgacgccatctcacggtccgccaatctgagtgacaaggaacaggaggtggcaatgcagcatgaagtgtggaaagtctgccgtgcgattcaaagggctgcgagtgttcttagaggtgaattcagtgagcaaaaaccgacgaattttagttctttggtgaccccatgagatgtgtttgtgcaaacaaataacaaacaatggttatttagtatctgcgcgaaatggaagtgtgatgaagaatgtgatgcttttgggcgtacactttacagcgcagcgttggggcagcagcgagtagagggccgtttacgcatgtcaaaatggaattgtgatgaag

SEQ ID NO: 24963 - DNA, 818 bp, Zea Mays
ctacggtgctcctacctacgccgcattccatcaagaggatacaggaaggagtggctctctttcggagtgtggcctctcatctgatcaaatgaaggctgatgctgtacttataaacacgggggcctttcggagaaacagatccagggcaggaaaggcacggagcccggctacgtggaggaagtgaatcgtcagattggaggaatcgaaccgtcgctggcatgataatcttgaccagagagcaagtgaggcaaagcgccatgctcgttcacgtgggagcatcccattcgtcgcgtgacggatgggactcgtacccccaaggaccaaccccaaatccaaatcccagaagaagacggcgcgggcgcgtgccatggaatggaaaggttccccgcagcggaggaatcgtccacccgcccagctactcaaggttggctacgggggtttctttcgaaaatggaatggcccggactgaattattggcacagtagtggccaacaggattggctgggccggcaaagcgaaaatattggatgtacccacctgatcggcggtggatcgtatatggcaccatctctcatcaaatcgacaacgctccagcatttgcaatgaacaaaacagcttaccggagtgcagccctgctggcatgggttacaattttcccgctcgaaccgggtctgtttttctttctcctctccatggaagaaccgttcagtgccatgacatcagcaaaaacttgtgtaatttctttaaagatatgatgctcgttggaaatctcaagacttaaaaaaaacacacacaggcatcagaagaccggatttaat

SEQ ID NO: 24964 - DNA, 1248 bp, Zea Mays
caggccatagaaatttggaacatcatctcaaatggtggttacttgtatatttgcggtgatgccaagggaatggctagagatgtacacaaaatgcttcatacaatagtccaagagcagagatctttggatagctccaaaaccgagagctatgtaaagagcatgcagatggaaggcaggtacctccgtgatgtatggtgacacatcacctcaaataagccatagctctagcgtgtggaagtaaagctggctttgcgtgtatgacatgtctaatgccaacctaattgtcagctttggaatgaagcgtgccattgataatatactaaaatgagttgatcagtgaaattctttgacatctagccgagaatttttgtttggttatcaataattcactctcattcatgtgagatattgtgctctgcttatttattgatagctgacactggtcacccaggagcacgagatgagcgcgttgatgtacttagtactgtgaaatcaaactggaggaggctgcaattctgcattacacctacaaaaaattctcaaacctaacctcaagaagggatagatgtggctgcaaaccaactaaagaagatgtgaagcaatgttttatcttggaatttgaccgtttggcattcatcggtggcctcaaggaatccgacgtctatcaatgcaataacatcagcgaaagcacaataaaaaacaaagtcatcaaacatgggtctcggaaacaaggaccacatccggctaaactgaactgctggtcagtccaaattggaaggcggtcacgggaaggtgcaggtaagcgtcagaaagatcctagaaatggttgatgcccaggaaggagcagcgaggccgccaatgtcgcccccaggttttcttgagctggctgaaagcaccactgccttttcatgacattatgtgaggcattgtttgagtattgactgaggttggtttaaccatgcgtgatacatgcagccttgagcatacagtgagtcactcaacaactttggcgaaagcccagatgttttcttgcagtttttgaaaaatattccgcgccctgatttcatgattgtgtgccatcgcaacacacgggcaactggctattatatatataagttatcatggtattatatggtcccgttgcaacgcacgggcactcacctagttattttatatgtgtatagtaggatttaggagatgatttaggacttgtttggttattttttaatctatatggatggtagagga

SEQ ID NO: 24965 - DNA, 136 bp, Zea Mays
cgctcggatcatcgtcgtcgtggtgcgagtcttcaatcgttttggtggagggaagaagggaggaaggaaaggggagaatccaaggtggtggacttccggatcgtacttagggatttgcccgaacttccggtaaagg

SEQ ID NO: 24966 - DNA, 872 bp, Zea Mays
cctccataccttactgatctgaaccgttggctttcaatcggatcgcccgctatcccctcctatccacaatatgatccctggcctctcatcctccgaaaactccactccttcgtcatccatgcgtcccctccccgccgcggccatggccaccgcgacgctgcccctccgcctcctcccctccaaaacgctgactctctccactctcccctccctgcgccgctccctctccgtcgccgctttggagccccggcgctggcgcctccgagccgccgccgaggaggcgcctgaggccgtggaggttgagttcgtggagcccgagacggaggctgaggagaaacccgcggtaccggagcccatcgaggctcagctggccgccgcgggggccgggaaggacgcggacatcttcgctgttgtcatgattggttcaagacagtacatagtgatgccgggcaggtatatatacacacagagactgaaaggtgccaatgtcaatgatcagatcatattaaacaaggtgctactggtgtcaactagagaaaaagcttacattgggatgccagtggtgaccaatgctgctgttcacgcagtggttgaagaacagggacgggatgataaagttatagtgttcaagtacaagaagaagaagaagtaccagaggaaacttggtcacagacagccaaacacaaggttaagaatcacaggcataagtggatacgaagagtaccctgctgacccaatacttgaccctgctgcagctttaaattaaactacgtggtttgggtggcgcactcgacaacctggcttggtgtgacggaatctctcaagtaattaggcccacctacaattgtccttgtccaacagacctcagacaa

SEQ ID NO: 24967 - DNA, 1002 bp, Zea Mays
cacgtagctgcgtctgcgtgcgagctcctcctctgtacccctacctccaccccctcctcgtgccgtccacgcagcaccggcgcgccgcgctcgccctcgccctggcagccggcgtcccgctggtcctcctcgcgcccggccaaagacggaatgcgttcgcggcgggggtcatcctgggctggccacggggttcatccacatcctccccgacgcgttcgagaagctcacgtccgactgcctctccggcgggccgtggcaggacttccccttcgcggggctcggcgccatggtgggcgccatcggcacgctcgtcgtcgacaccgtcgccacgggctacttcacgcgcgtccacttcaaggacagcgccgccgccgccgtgggcgccgccgccgtcggcgacgaggagcaacagcagcagcaggcggcgtcggcgccgcacgtcgacgacggagcagacggcgacggccacggccacggcgggcacgcgcacatgcacacgcacgcgacgcacgggcactcgcacggcgcctcggtcttggcggctgcatcgttcaggtaatcatcaagaaccccatggtgcagagccggggcaagctgcagctcgccatcaacgccttcatgctcttctgcgcgggccgcatggccacgctggccaagtggacctagtaactagccataatgatgaggatgattctagtgatgagaaagatataaattgggccttaatagagatcaaattgctatggtggatgaattgataaaggttgtcaataaaaaaggagaacatatatgccgtcgtatgtgtgtctgtatattatgaactgtatgtttgaactgtattttaaccagcaactattcatcatcacccgtagtgcacagatgccgccggcgccgaaatgcctcttgctgagctgccgaattcatcaccacagacagtaccactccacttccatctatcaaagggtgtttgggactgctctagaatagatttatttttttaaa

SEQ ID NO: 24968 - DNA, 1965 bp, Zea Mays
ctttttattcacctgtggggaatcaccatctgttgattgtttgaaacttaacttactagatggaatcagctttcttttactggccattgagctccttcttctcaggttatagactgtggactctgtttacgagctattggggcttcttttgagatggtctacgacttgtgcacactgcacagttcccaggcaggcagtattgtgtttcattgagtttttcttgcaaggccggttcatatttggacctgatgtgagatccttgtttctcaccatattccttattcttgcaccagtggtggtcttctgcatatttgtggccagacatcttatcaatgactttcctgatcattggggagtttcagtcatggtcatagtgattgtcttcacaatatacgatttgacactgctccttcttacctctggtagagatcctggtatagtgcctcgtaacacccatcctcctgaacctgaagctattgatatgaacaatgatgctggaaatggtcagacaccacaacagttgcggttgccacggacaaaggatgttatcgtaaatgggaccattgtgaaagtcaagtactgtgacacctgcatgctgtacagaccacctcgatgctcacactgttctatctgtaataactgtgtggagcgctttgatcaccactgcccttgggttgggcagtgcataggattgcgcaattatcggttcttctatatgtttgtattctctacaacattactgtgtctctatgtatttggcttctgctttgtgtacattgtcaagattaaagacgcagagcagtcgacgttctggaaagcaatgttaaagaccccagcatcaatcgttctgatcatatactgcttcatctgtgtgtggtttgtgggtggtctgtctgtcttccatttctatctcatgagcactaaccagacaacctatgagaacttcagataccgctatgatcggcgggacaatccgtacaacagagggaccgtgaacaacttcatggagatattctgcacctcagtcgctccttccaaaaacaatttccgagctagggtcccagcagagcaaggtttacagcaagcacgtgcgccagcaaggggtttcatgagcccaaacatgggtaaacctattggggaacttgaattgggcaggaagccaatatcatgggatgaacctcggtcagcagctgatatcagagacttggaggttggtctaggcagcctactggacgagaaggaaggcagggtagcccatgcatccccggacctgagcagagaagcccttcctgagcttgtggaagggagggctggtacgcattcgaggcgatcaagctggggtcacagaagtgggacctcggcctccatggatagccttgctgcgcaaatggggaccgcagaatcaatggggctccattagcagtgtccatggtacaaccagtggagctcactagcaagccgctccacgtcttgatgcgtctctttgtgtaaacctgcctgataccaccaactaagaagcaacctttgcgtgctctgtgcgcctgtgcttttcactctacctaggatatacgtctgcagcgttttctttactcagcgccctgggagagcgcatcagttcttctgatgtgcttcccgtttggtgtcctaagcaaaaataacagaagtgccatttaactccttattagttgtttcttgtttggaccaaccactgtatatagatatatatcattgcaaattggaattgtctgcagaaagggtttgtcatgtttggctttcgcgcgtcctggtttcttcacgcccttcaaatttgcaccgtgttggaatggaatcgcatgggctttctattcacttgtgtgagcatgtcaactggtgccaggccgagtttacccacgggatgttgagcgcaatcatcccctgggtgcttgccaccaaaaatcatcaaaccgttttagaacaaaaaaaaaa

SEQ ID NO: 24969 - DNA, 2122 bp, Zea Mays
ttgtgcgcagatggatgggtttaccttgccaccatttgagtcaacctgcatctttagggacaacgatattataagggttaaacaaaaatcctgtacgaagcacatagagcacaatgatgtgcactgtattcaagatcatgagataatagagaagagatcacttccagttgatggcaaaatccttgcaatccaggataaggaggatgtctgtaaacaccaagaagaagaggcacatgacgatcaccagcttgaagaaaatgccactgctagccatagcacagaaaataatggtacaagtttgaagaggaagcggaatgatggggttgcagatatacctgagagctcaaagggacaaaggctgaaggtgacaaattctggaaagcatatagattacagcaagaaggaacaaaatggatctaaaaagttgaagctgtcagttattgatattgaagctaagaaagcaactccacaacatgaaactaccactaccttagtggagcagcaaaaatcagaggggaactatcaaactgagttgaaatgtgaggcaaaggtgacaaactatgatgctcaaagtgacacaaaaaagaatgtgcatggagattcaccaatagctgctgattgtccatcatcaagcaatcaagatggcttgcctgtcccatcaagcaatcaaaatggatcacatgttcatttttcaagcctcaaagcagatgaggacgaatctgaaacgtcggatgagattgtcccagttgtggttcggcctggtcacattcgctttgagccagcaggcagagaacccgacaaatcgccagcaaaagaattacagggcacattccaatggagtggaacattgagcaaaaagaagggccagaagtggggaataaatagctcaaacaagaaaaatgccgatgtcggctatcatgcaggaatagctggaagcaacacagaagttaataatcttgtcatggacattaaggttactgaaaatggcttctgtgctgtcagtaatagaaggatcgatgaaggcagtaatgttgagatgtccagtgtgaaggctgttgctaatgaagaaaagtctagaggtgtaccttttgatttcgagagcttgtaccccctaacgcaacttccaaaggagggagatctgattgcataccgattggttgagctgtcttccatgttgtgtccggagctgtcttcgttccgtgttggaaaagttgtgttatatgatcccatatcattgcgtatcattctcttacccgttcaagagtatccaatcaccaccgaggaaaacgaagacaaggacgagccagatatgcttgtggacttgtcaccgtacaaggaagatggctccttggagatcgagtactcttcacttcttgatgtaaggctactgaagggtattgaaccagtccccggggctttcagtactcccttggcagaaacatgcaatgaagttggatcggcactggccaaaggaaggccagttaccttacacaaaaatgaaggcaatattgagagccagaaatcacccttggttgcaaacaacactaatggtaaagaacacaaactaggaaagtcagaaaagacggtttgggaaaaaaatgacgaacccggtgatgaggtcgatgttcagcaaaatggctggggaacatggaaacaaaatagtacgtcagcttggtcttatagagcccttaggagcagcgcccttggcccgacgatggcacttctacgagggaagaacaaccagaggggtaaaccaccctatcgaaagaagggcaagtaattgcctatgtgtttagtgtttaagttcaacgatacctatgtaatcctgtgttggtccaatcttttagcagttgatcttatttatgtaaaatttggcgaggaagagtgactgccgttgctgccctggtcattttgaagtctggccaagcgaattgttatcgtttgcaaaggatcgttatgatttgctccgacacttgtcaaatgctggttttagagttttgcatgtgcactaaaaatgttcataattccatatctgccacaaaaggttgtagcaccaaacgctccacctaaggccttgttcagttatttccattacatatgaattgggtgggattggaaaaaa

SEQ ID NO: 24970 - DNA, 132 bp, Zea Mays
cctcggccgaggaggagcatgaggagtgatgggacaggcttctccatccctccatttatttatcgttagttttattccgctgcacttcgaacaatgatgactacttttgcaaaactctgatggtgatgtaat

SEQ ID NO: 24971 - DNA, 1083 bp, Zea Mays
tctgcctgttgaacatataatcacttaatgaacttggaagcgtgtttatctaggttgtgtaaactgatcatatggttttctaggacatttgtattgagcttctttgcagcaaaagaaaaacatttggaattgggcggagtctggtttacttagaacaaggctagaagggcaagagaaggagattggtcagctaagaaagcaaataaaaaatcttgaagagaaggagaaggtggcaaatgaaagcgttgagggtctgatgatggacgtgacagctgctgaagaggagattaaacggtggaagatggcagcagaggaggaagctgaagctggtagatcaattgaacaagagttccaaattcagatatcatcccttcgcaaggagttggacgaagcaaaccgagctatggtggagctagaaaacaagctgaagttcaaggaagagacagctgctgctgcaatggcggcacgcgatgctgcagagaagtctctaaagctagcagatacgcgatcgtccaggctacgtgagaggctggaggagctcaacaagcagctcgaagaatcagatacgagaaccgagtcggtgaatcgcaatggccataggtacatgtgctggccatggcagtggctgggactgaactacgtgcagttacctctagcggagacagaccagacgtccaacgagatggagctatctgagcccctaataatataggtgctccgacctccatacttgtacagattacagatatatacagatcctgctctttcactagataagggggaacagtagttttttttttgggaggggggttgggttgatgggttcttgtgtagatgttttcgcaatttcttgatgcatgctttgcggaaaacgggcgggtgctggaaggcgccgtgtaattgtaaaaggtaccacttagtgaagatgctgagaagttcattctttgacaagattgttcttgaaacaagtctcgcttgatcttcattgtgataacaatgtgctacactgctactctacttagacggaggaacttgtttgtttaccctttagattatataataatccagtttaaataagtcgac

SEQ ID NO: 24972 - DNA, 448 bp, Zea Mays
tgcgtcaactacaccttttacatagacaaagtctatattccaaatccgccttgtacttttaacaagtcaaacatttggttgtactcctctcattggcacatccacctcgtgcaggtcactcattagcacatccaccgcatgcaggccacttcaccaactgaataattcacatattgtgaaaatgaacattgtctttcatagaatcgagggtccgatactttgttgtagatcatggtgtccgacctatgtacgcttgttttagatggtgcctgtacgtgatccttggctctttgtgtaccagtttctccttcctaataggtgttctacaaaaatatggcacggacagtgccttgtgaggagccaccaccgtctcatacgatacatgtcactacttcatctttcatagtttgttgcaatacttgctcttgattcttgtattatatccgca

SEQ ID NO: 24973 - DNA, 2450 bp, Zea Mays
cgcagagcgcctgttttgccaaattcctcgtttggttccacgccggacgcatcctcccacgctcgggccgggcgcgtgaacccctcgccgccgtcgcagtcccgttgccggagggcgagagggacgagaaagaagagggcaagatgaagacgaccaaggggggcaaggcgatgaaccccacagacgcgttccgcaaggagcagcggaagaaggagctcaagcggaacaaaaaggaaaggaagaaagtgcgggatgttggcattttgaaaaaggatccggaggctatatgggagcagattgagaaattggagaagatgacactttgcctctttgaattgctagctactttggccctgttttcaacatgaggctgatggtgctctggacaaggctaggaagcataagaaaagacagcttgaggatacatacaatcttattgttaagaaacgaatatgaacagaaaatgaaagagaagggtgaacaaccgattatgttcagccatcttgcaccaccaaagaggcggcctacaggagatgaagatggtagagctaatcctaagcccgaggactctgtttactatcatccaaccttaaatccatctggagcaccgccacctggaaaacctccgatgtacaaatcatctatagggccaaggatcccaccgccttcctcatccagcactggggcctcatcttccatgtcagagtctgaagcaggtccaacgaccctgccaccccctccaccaccaccgccattgccagacacctcagagtccattgatccacctgctcctcctttccctttgcctccactcccgccactgcccccaccaccacctaaacctaacagtgacgcagcattgccaggcttacctctgcctcctcctggtccacctctgagagaatctgtatcaggtcatacagtacttccgccgccactgcctccatcacagaggtcttcaaatccaccaccagcatctagtgcgaatgaaagcaaaacagattctgcttggcccttagttgtgttgcctccaccacccccgccacctgggttgtcaccaaaatcatatgacatggaggctgctggcacttcaaaggacactcctggacttaaagaagatactgcagcgagagtcttaccaccaccgcctccacctagtttgccgcctttacctccaatgcaatctgatatgctatctcctggagtcatgagattaccaccacctccgccaccaccagattcaaggccatcgcttatggctcctggtgttagcaggccccctccacctcctccaggattcccccgtctcaaatgccaataccaccatatggtgtcctccctggtccgccaccgatgcttaggcctccatttttgctaggaccctctatgcaactagatgagcttgctgcctttgccccaaggcctcagttacctcagcagccatcatatgtaaagtcggctgccccaacagttgttaagagaccattagcacagcacactcctgagctgacggctatggttcctgcatcagttcgtgtcaagagagaatctgcgctccccaaaccaaaaccaaaggtgcagcagcagcagcagctatcaacagcatccatttcaaggccttcagtgaccctcataagaagtgatgctcggccttcttcagcggcacccaagccgccaagtatggacgactcctacttggcattcttggaagatatgaaggaactaggggcacttgatgggtaactcatagagtaactgcctgagtgcacttaacagcttaattcatggaaaacctggacatgggaccttttttttttgcaatgtggtaaatggatagtctctgctcagtcaaccggagctgccgcggagaaagaaaatcatgcagtagtttaattgaaaacccgggaaaacgattgtagtctggctggagatgtctgaacaagctgtacaagctcaagctgggagatatttgtggcccaacttgaatagctggagaccttttgcacacttgaatagctgtacaagctggagacctaaaggctctttgtggcccaactgtacacgtttgagatatttggaacttgaatagctgctggctctagcgaaggatatcttacaggtgctctttatgattcatgattgcactggctgatttgcagataataccattacaccagtcgtggggaggactactgttgtgccttaatttttgtatggtgcatttgccttgaaaaccatgacggagttgctgtcctgggaccccatgtaaacttgtgacattcacaaatgtcggtattggttctatagactatagtccggcgacattactggatacgagccacggcttctatataaaagtttcgtgctttctgtgctgaaatctgaaattaacagttttttatttggccagatgggaatatctgtttgcaaactgtgtaacgtatgatgcg

SEQ ID NO: 24974 - DNA, 1556 bp, Zea Mays
ccactgtaacgtacctatcatcatccactccaaagtccaaacccccaccgagccacgcgacgagccgcgccgccatgtggccactctcctacctgccgccggcaccggcgcagcagttgcgagcgcaccccggtcccggctccggccgcgggcccaggccgcagccgtgcgggctgccgttccccgacgccctccgcacggctgcggctgcggccgccgtctccctttctctcatctatggcaacggcgtgggcgcggccttcgcggcatcagcggcgcaacccacggaggtgtgccggaacgggggcgcggagatggtagaggaggtgagggccgaggcggtgactaacgagcagctcgtggaggaggcgtgggaggtggtcaacgagagcttcctccccgacgccgccagccgtccgtggtcgccagagatgtggatgcaaaggaagcaggatgttctccaaggcacaattaaatctcgtgctagagcccatgatatcattcgcaagatgctagcgagcctcggtgacccttacactcggtttctatctccctccgaattctcaaagatgtcaaaatatgacatgacgggaattggattaaatctgcgggagattcctgatgaaaatggttcttttaagttgatggtattagggctgttgttagatgggcctgcttactctgctggtgttagacagggtgatgagcttttatcagtcaacggcattgatgtaaagggtaaatctgcatttgatgcttcatccatgctgcaaggtccaaaggagacgttcgttacgattaaggttaagcatggcgactgtggtcctgttgagtcaatgaaggtgcagaggcaactggttactcgaactccagttttctatcgtttggagaaaagagaaaacaatgattcatctgttgggtatattcacattacagagttcaatgcagtggccaaaaaagatttgcgctaaaacgtctacagaaatcaggcgcctcctattttgttctggatttgagggacaatcttggtggactagtgcaagctggaatcgagacagcaaagctctttctgaataaaggagacacggtcatttatactgctggccgggatcgcctagtccaaaaggcaattgttgctgaaagtggacctatgattgctactcccctcatgttgctggtgaataataggacagcacgcgccagtgaaatacacttcatgacaattgcaaagctgttcttgttggcgaaaggacttttggcaagttggcaaatacgtgacaccaaaccacaaggatatcaatgggaatggaatagaaccggattacaatcgtcttcctgatttcaatgaagccaaagatttcctttcacgatgcggaattaaagaattaagctgacagacgtttgtggcagatttcaatgaagcattatattctgaaggttctctcacggtaagaagcttttatttactgttgcatagttggttgttactgctctgcatacattggattatccaagtaacaacaaagaaataaagaacaaggcagaaattttgtatg

SEQ ID NO: 24975 - DNA, 937 bp, Zea Mays
ccgaattacccgaaataatttcgggttttgcaagttgctacccgaaattcccgaacaaaattcgggtttcgggtatttcgggttcgggttcgggtatttcgggttcgggtttcgggttacgggttttttgcccagccctaggaacaggtgatgctccacccaggttaattaaggattggatgtgtatgtaggcctgtatgatcaaggactatcttaactggccacatgccctggatatgggacagggtaagcttgaacccggctattccatacatgaaaatacaatcgcacactaggagtggagagatggcgagagtggcatgtaccctcctggcaaaggaccgcctaaaaggggtggtgtgctcttgggtggcgcggacctgttcatgcagtggagtatccatgggaatggtagacatatgcaagagttacgagaaacatatgtcgtgtggttagagatcctcagctgagtaaatcgattcggatcgccgttatatccccggatctctgacctgcaacctaggtcaggatgtaaacattatgaataaaaatgatgttgtattgatgagatggtaaaattagactagatgcaactagattattgaaagtaaggactaatttaataagttatttctgcaaaagtatctaagttgattcatgctaaagcctttttcttgattcctatttaaccagcatatccttgagagtcatttttccttagttgggtaagacttgtgaaagcacactttgaactcagggttttcgaacccatgttgttgcaggtaatcaggagtgttctaggtgtctctgtggctggaagatgcttctagtcttgaaggaggattagttaggtttaggtgtgagctttggaagggttctaccttcctagttttgtatgtacacgaactaaaccctatgaaagtgcgactagtgatca

SEQ ID NO: 24976 - DNA, 2615 bp, Zea Mays
tgagtgctgcatctgccttgcgtagtacggggagaaggaggaggttcggcagctgccgtgcacacacgtgtttcatctcaagtgcatatacagttccagctaacaagggaaatcaaggaagaattgatctttatattagcaggcggatgcaatcactaatcaaaaccacgatgcaaggtaacctaaatggattttaaattttattttggattgttaaatctttatttctgactactattgttttatgtcgtggatgccctcgtgaggttctacgccgacgccttcaggagggattcacagaggccatggtgaggatggccagcttgagtcggctcaccgggagcagcgcgagatccgctacaactaaatgataggaggtattttctagaaattacaaccccacctctgtcaggccttctgttgagtgaatttggtttgcacaccctcaccctgcacgctcttaccggactaccgctcctagcacccactcacacgagattgcaccccgctcgccatgccaccatagatccagctagggcgacatcattgtgggcaatcctgtgcgagagaatgtgaaattgttgtaggattgataatgaccaggggtttctccgcccacatgcaccaggtttcgctgccatttgcagcgactgtgttccagttcgaccgtttggggaaaaggcaaggaaacaggatctgtcacggaagtgtgttgttctgaaacagtcacaaagagggcctaagaagctgatggaatcctcattcaccgccgctaaggagtttgagcgggatcggagaggagacgtcagttcttcctcctctgctcaatgcggccattcgccctgtcccccaaccctgaactccacactgccactccgtgctcattttttctgaaggggaaatattcatctccttgttgttttgtaccatggatactttagcatcattctcatactactaggagtgtaggtaaggagtccacacacgagtttgcaaacaccattaagcctattttgcttgattagtgccctgcaacacttcatatgttcaagacaaaatccatacccatgtctattgttgtatgatattatttgcattgaccgttgctgctcttcttgattgcagtcactaacattgcattaatctatgtgatacatttattcaggcgattcccatttctcagtgatgtcgatgtcctgtactcctgtatatttggattcaacaatatgccattagtatgctgtcaagcgtcctatttgcaagagataaatggcttacgcccgaggggcttattcttccttatcatggtatgatataattatcatacaaaaatgttacactgcttttacagggtgtacctcatctatttgcttgtacaattcatcttactactgctttgacaaacattggtctgctctgctttggtctgtgctttaggattctgtttcattgggagaaacaaatgcccttgcttactttcattataactgtgctatttttttgatccaatgttgttctaagatcaagaagtggaatacttgttctaagggtcccaagttgggtggtggtggtgggaagcgttttcaggtcggtcgtgactttggttatccactgaaaagatatgcttggtggtgctttcttgtgttgaagaacaagtatcccacggaaccacaaccgtttgtattatctggtgatttcctacattattagctggcctaactaaaccatgcgctcagaccctaaaccagctgtaagtctgtaacttaaaagcacagtgcactagcggaatggggttccttgctttttggagcgtttccccagtcagatcggcggcagggcaggtcacgtggacggggctccttgttgctggaactaaataccgtggagagtttgaagtgagactaaagaaacttatggaggaaattaagcaaaatgaagacattattctctttattgattaagtgcacacactgattggagcagtgcattggtgccacaacactggatgagtataggaagcatatagagaaagatcctgccttggaaagaaggtttcaaccagttaaggttccagagcctactatggatgaaacaatacagatcttaagaggacttcgtgagagatatgaacttcatcacaaactgagatacacagatgatgctttaattgctgctgcacagctgtcttatcagtatatcagcgatcgttttctgcctgacaaagccattgacttgattgatgaagctggatctcgtgttaggctgaggcatgcgcagctccctgatgaagccaaagagctggacaaagagctgcggcagataagcaagcagaaaaatgaggctgtacgtggccaagattttgagaaggtatactgttgtttggcacagcggtgacaaagccgatccgctcccacctctctagcaacgtcgatatggttaataccaagcattatgttgtttccttttgagataaatattttgttactgattttaccttttgtctcctcttcttgttttttgttctagaatctgtagcaaatggctaacgatgaggatatccattactttgtttatgacaataaaactgatatgttcaagattccgtagcaacgcac

SEQ ID NO: 24977 - DNA, 513 bp, Zea Mays
cccaaattctccactccgcgccgtcaccacttctacgggagggcgcatcccggccctccgcgcgacctccactcccgccgcgcgcgctcagccggccccgccgcagcgccaccactcctcctggcacatcttgctcctccgttctccgtgctaccaccactccgctgcgtcgccatcactcccttcctgtatcccgccacctccacgcatggccactccgacgagctgctgctgactcgcgtcatcgaagtctgaccaccgcgtcctgtccacacggaggttgaaacaggaggaagaggaggaggaaaggaggagagggcgacgagatccatgggtggagaagaggacgatatccacacgtggaggaggaagaggagatccgcatgaacaggtgaataatccatccccttgcaattttcagttttgtgggtggtggagagttcatggaaatattgttgtgcactctgtggatgtatggttttgcttcgaaatatgttcattgttttaggcagg

SEQ ID NO: 24978 - DNA, 132 bp, Zea Mays
ccctaccctattaacttacccgttgccctatcatttttcactattattttgaatcaaacttatatgttttgtaaatggtgagattcgaactcgcaacctctctctcgcgcataccctcctataccactacac

SEQ ID NO: 24979 - DNA, 3253 bp, Zea Mays
cggcggcgcccagtcgcgaccgcgctctcaccgatcgcctcggtgagtgatactccgcaccgcaggccgcagcgcaagcgcctcgggccgtccgccgtcgccgcctgaagctagcgtctcctgtaagcggctggccgcttcactccgaggctctcgcacattgtttcggggctccggcgaccatggtggacatcatcgacgcgtacccggcggtgcccgagcccgcgccggcgcacccggacccctcgtcgatcccccgcgacgcctggcggcgcttcgagagcgccgcgctcggcatactctacacgatccagcccagcgccacctccgagcacctccgcgccgccatcatcgactacgtccagcgcctcttggcgtcccactccggggttcaggtctttccatttggatctgttccattgaaaacttatcttcctgatggagacattgacttgactacattcggccctgcaatttctgatgaaaaattagcaaatgaagtatgtgctattctaaaatcagaagagcataggaaagattctgaatttgatgtcaaagatgtccagtatatccatgctgaggtcaaactggtgaaatgtgtagtacagaacattatagtagatatctctgtgaatcagattgggggactctgtacactttgttttctggagaaggttgatgagaattttggaaagaaacacctcttcaaaagaagcgtaatgctgattaaagactggtgttactatgaaactcgcattcttggtgcacaccatggattgatatctacctacgctttggagattttagtgctatacattttccatatcttccataagtctttgaatggcccattagctgtttctcgattactatagtcaatttgattgggatgctaagggaatcagcttgtttggtcctgtttccttatcttcactacctgatctagttactgaccctccagttattcatgatgatggttttcttctgcgggaaaagtttctcagagaatgtgcagatgcatttagtgtcccccctagaaactctgagaaagatgcacaactattttctcggaagtttttaaatatagtagatccactgaaacaaagtaataatcttggacgcagtgtcagcagaggaaatttttaccgaatacgtagtgcatttgattttggtgctcgtaagcttgggaagattcttcaaaggcctgtctgttatactgttgatgaagtgaatcagttctttgggaacacattaaagagaaatcgtattgggttcagacaagatgttttagtgagctcatctgatgatggtacattgacttatcatgccaccaacggttccttgtctctaggcttggattgcaaaagagtcaacaactgcagtgcacctttatacagcaatccctgtggtgatttctcttatcggtttaataacatcaacatttcagattccatcaatcatgatgactcaataaaacagaaacaatgtaactctattgctggagagaaagcgataaagtctatttctgatgggttgctagatagtgaaggctcaagtcatgctagtactgatgattcagtaagtgtgaggaacagtggtgacttctatgaagctttaacaactatctcgccatctgggagacgttatgccccacatcaattttaccaattagaaaatggtaaggtggttgttagacataacacaaacatgtcacaccatgggatgccaacaaagcagttcacaagcagatcttaccactcttttgaagatgccaagtatcacaatgagttttcaggaagctttctgccacccattgagcataatgcttactcttctgctggctttgttaatgttctggccacctctaactcagcatgtacacatgaaaattcacaacttggtggagccaataataacatcttgaaagatctcactggagattttgagacatacttccataatcttcagtatgcgcaagggttccagcaagataatccagtaaacccgttttcctctggaaggcctgctccaccatccctgcaatgtcagaacacgtgcccttcaaatggtcgaggaagaaaaaatccatattcatatgctagcatgaatggtgcagtcccttgccctccttacccatctggctatcttgtgtggagtccatttattcaaccagatgatcctatggctatgaggacccgtggaacaggcacctacttttctgaccgaaaattgcgcaagaataggccacccactggacgtgtggagagaggaagaaatcagttcgcttcaaataattatcaaaggttccatcaccatgtcagaacagatatgcctgcagatatgggatctggtctggaattgaggcatgagctaccacagatacatattcctggtgcaactgatcatggaatgccatctccaatgagtataccaatgtcatcgtcatctcttaactctccaagagatcaattgaaggtaccagctcattctccatcttcccaggttcgaaggaataatttccatggcaatggtttcatgctcctgcaagacagtaagcttgagtccaggacctttaacagtaaacttgagtctgggatattggggccgttgcctttagaagttacctccaaagaccatgctagcagatcagaatccgcttccagcaatcaagtttctggacctgtgagtactgtttctgctcctcgaaacactactacgacagattccaatctaatgagggatggcgctcaatcatatcgcctcaaggacagcagagacttccccccactgtccagttgaatgttgatggcggtacactgtagtatgaactgagaggtgactgtcaacgccgcacttgatcaccaggcaaaattaccgatgaatggtctgtgctgaaccgcagcagtggcaccgagttgttgctccctgaaaccagacaacatgttgtatatcctgccattttcttcccgtactccaggcgtcagattcaccttgtccctgcgatcagccttacaccctcatttggcaaaaaagaaaaaaaaagaaagaaaacaaaagggacagcaagagaagcagaaggaataaagatgcagggttatgacatgtagatagtactgttactaggaaaaggtcccccttcagacatgttggagggctagttggttgtgttgttgttgagaatagcgtttttagtagcctttgttggcgtttatataacgagtaaggggtctggcaggatctcgcaacaaataaa

SEQ ID NO: 24980 - DNA, 3468 bp, Zea Mays
ccagaagctacgcaccaattcaattcccgagaaagtgattggggttttacatcttttatgcctttgttggatctgtatgattcaagtaaaggatatgttgtgaatgataaatgtatcatagaagctgaggttgctgtgcgtaaaactcttgatttctggaactatgactccaaaaggatgactggttatgttggcctgaagaatcaaggggctacctgttacatgaactcccttcttcagactttataccacattccttactttcggaaggctgtatatcatatgcctactacagagaatgatacgccttcagggaacattccattggctttgcaaagccttttttataaacttcagcatagtgataacagtgttgctacaaaagagctcaccaaatcttttggatgggatagctatgattcgttcatgcagcatgatgttcaagaattgaatagggtcctatgtgaaaagctggagaacaagatgaagggaaccactgtggaaggagcaatacaaaaattgttcgagggtcaccatatgaattatatcgagtgtattaatgttgagtctaaatctaccaggaaagagtcattctatgatcttgcactcgatgtcaagggatgttctgatgtctatgcatcatttgataagtatgttgcagtggagaggttagaaggtgataataagtatcaatctgaggaacatggtctacaggatgccaagaaaggaatgctttttattgactttcctccagttctgcaacttcagttaaaacggtttgaatatgattttgtgcgggatacgatgctcaagataaatgaccgttatgagttcccacttcaattggatcttgatagagatgatggaaaatatctttctccagacgcggatagaagtgtgcgtaacctatatactcttcatagtgtactggttcatagtggtggagttcatggaggacactattatgcctttattcgtccgaagctgtctgatcaatggtacaagttcgaggatgaacgagtgacgaaagaagacatgaaacgagcattggaggaacaatatggtggtgaagaagagctcccgcataccaaccctgggttggatactgcaccgcttagatttaccaagcattcaaatgcttacatgcttgtttacattcgagaaagtgacaaagataacattatctgtgatttggatgatgaagatatttcagaacaccttaaggttaggttgagaaaggaacatgaagagaaggagtacaagaaaaaggagaaggctgaggctcatatgttcactgcattgaaggtggcccgagactttgatattaaagagcaaattggaagacacatgcactttgatcttgtggactttgacagagttaatagcttccgtgcacctaagaacatgtcaatcaacgaagtcaaggaggagctttctaaagaatttggcatccctgtagaatgccaacgattttgggtatgggcaaaacgacagaactgtacctacagacccagtcgtccattaacctcccaggaggaaacatctactattggggttctcaaagatgcaacagtggcgaagttaccgaattctgaagtacgattgttcttggaggttcatttcagacaggagaaccaaccaattgctccttggaataccaaagaagatatattacttttcttcaagctctatgatcctgaaaaagaagacctaagatatgtcggcaatttttttgtgaaagcatcaggcaaaccatctgatatagtagaaaggctgaatcagattgctggatttctgtctgatgaagatattgagctctatgaggaaataaagtttgaaccagttgtgatgtgcgtacccattgagagtaatgcttcgttccgttcaagccagattgacaatggtgatataatatgctaccaaaagcactgtttgccagattcaatggatcgatatcgatatcctaccgtcccttctttctttgaatatattcataatagacagattgtccatttcagattgcttgagaaaccaaaagaagaaggcttctctcttgagctttcaaaatgctccacatatgatgatgttgttgagaaggttgctaagcaactacgtatggatgacccttctaaaatccggcttactcaacacaatccatcgtctcagcaacccaaacctcacttcatcaaatacaggagtcttaattatctttcggacatgctacataatcacaatcagatgtgtgacatattatattatgacatcctggatattcctttgcctgaactagaatctatgagatctctgaaggtcgctttccaaaatgccgcaaaccatgagatgtcgtttcacattatgcggttaccaaaaagtaactctctccttgatttgattgaagacttaaagtcaaaggttgaaatttcttgtaatgatgctgaatttcggttttttggagtctaccttcacaagatatgcaaggtgtatcaacctggagataagatagattcagttaatgaccatggacccttgtatattgaagaggttcccgaggatgaaaaaaatgccgggcctcatgaccgtttggttcatgtctatcattttgaatataatcatcatattcagtattttggtgaacctttcttcttcctaattcgtgatggtgaagctttgtcggatatgaaagtacggattcagaagagacttcaagttcctgatgagcagtttctaaagtggaaatttgctcatgttacattcagtaagccagaatacctccaagattcagatattgtaatgaacagattccatagacctgtttatggaggttgggaacaacaccttggattggagcatacagccaccaccccaaaaaggtcctacttaggcaacaaccagaaccgccattcttttgagaagcctgtgaggatttacaactaaagctaggaatactttttacatgcgatgaatgatgaacaggatatgaagcagtcttgttccaaaagcagtcttttggtgatgtacatggagcttttgcatagagtagtttatgtggcaattatctcaagaattttcatctggtggatgtacagggtccgtatagcaacatttccttgtagaaagttgaagctgtatatcgagggtggatttacatgtgttaatcttttcgaccccaagcctctgggaggctgtgaaccatagcctcatgaaatatgcctgttgttcattcagtgtttgtgtttttctcgtttgtcattattgtgcactcgcttttaatatgctcggtctattggaccgagcaggaaaatgatgttttaccttatagtggtctaactggttcattaggcgcgcaagtgcacagttgaattactcctttggaagcttgaaacgagaaacataggaaatgtctatgacggtggacatgccaagaccccaagtcctcggtttcaaggcctcccaccgctggctttctag

SEQ ID NO: 24981 - DNA, 5824 bp, Zea Mays
ggccgatgataaaaaagagctcgtagtcgtagaagaatccaaatccagttaccccctccccacccaccccaaaagcccaaactccggtgccatcagtgtattctctaatcacctcctctcctccctccgctccttcgtcctccccgcgaagggaggggtgtgtcctgtgcccgccaccgcgtgggatgctcacgcttcgtctccgccaccgcctctccggttgatccgccgctgaggagaacatcagaactgattgaagaacagggttggtaagtggagggagcgagatggggttcgacccactggagtggtactgccagccggtcaaggatggtgtgtggtcgcatgtggttgagaatgcgttcggcgcctacactccatgtggcactgacacccttgtagtctgcatctcatacctcgcactctttggagtttgcttctatcgtatatggaggacgacgagggactacacagtgcagcggtacaagttacgttcaccatactacaactacctgcttggactgctcgtggtgtactgcatagcagagccgctttatcggatcatcactggtacctccatcatgaacttggatgggcagcctggccttgctccatttgagattgtctcattgatcattgagtctgttgcttggtgctgtatgcttgtaatgattctgcttgaaacaagaatttacatcaatgagttcagatggtacatccgatttgtggttatttacatgatggttggcgaagctgctatgttcaatcttgtgctctctgtgaggcagtactacagttcaagttcaatcttttacctatactgcagtgagattgtatgccagttcttgtttggaattctcatggtggtttatctgcctagcttggatccatatccgggttataccccgatcaggaatgaagtgttggttgataatactgattatgaacctcttcccggcggtgagcagatttgccctgagagacatgccaacatatttgccagaatattcttttcatggatgactcctttaatgcaacaaggatttagaaggcccattacagataaggatatctggaaattggatagctgggatgagactgaaactttgtatagccagttccagaaacgctggaatgatgagcttcaaaaaccaaacccttggctgttacgagctcttcatagtagtctttggggaaggttctggctgggtggatttttcaagattggcaatgatgcttctcaatttgttggtccacttgtattgaacctgttgttagagtctatgcaaaaaggtgatccatcttggagcgggtacatctatgctttctcaatctttgcaggagtgtcacttggggttcttgctgaggcacagtactttcagaacgtcatgcgtgtgggtttcaggttgaggtccacattgattgcagctgttttccgcaaatctttgcgactaactaatgatagtcgtagaaagtttgcttctgggaggattaccaatttgatttcaactgatgcggagtcccttcagcaagtgtgccagcagcttcacagcctatggtctgctcctttccgcattgttatttccatggtccttctatatgcacagcttggtcctgcagcattagtcggtgcactcatgctggttcttttgtttccaattcagactgtaatcatcagcaaaatgcaaaaacttactaaagaggggttgcaaaggaccgacaagcgaatcagtctcatgaatgaagtattagctgctatggatacagtcaagtgctatgcttgggagcaaagtttccagtcaaaagtgcaggacatccgtgatgatgaactttcttggttccgcagggctcagttgcttgctgcgctgaatagctttatcctgaacagtataccggtcgttgtcactgttgtttcatttggtgtatattctctactgggaggtgatttgacaccagcaaaggcgtttacttctctttcattatttgcagtcttaaggtttccacttttcatgctcccgaatctgataactcaggtggttaattgtaaggtgtcattgaagcgtctggaagatctcctgttggctgaagagagattacttctgccaaatccacctattgatcctgatcttccagccatttctatcaagaatgggtatttttcatgggaatcagaggctcagagaccaactttatcaaatgtcaatctggatgtacctgttggaagtttagttgcaatagtaggaagcactggtgagggtaaaacttctctcatatctgcaatgcttggagaaataccaccagtatctggatcaggtacctcagtggtcattcgtggatcggtggcttacgttcctcaagtttcctggatcttcaatgctactgtacgtgacaatattttgtttgggtctccctttcaacccccacgatacgagaaagcaattgatgccacttcattgcggcatgaccttgacctactcccaggaggcgatctgacagagattggtgaaagaggagttaatattagtggagggcagaagcaaagagtttcaatggcaagagctgtgtattctgattcagatgtgtacatatttgatgatccactcagtgcattagatgcccatgttggccggcaggtatttgataaatgtatcaaaggcgaactgcagcataaaacccgggttcttgttaccaatcagctgcattttctgccatatgtcgataaaatactgctaattcatgatggtgtaattaaagaggagggtacttttgatgaacttagcaacagtggggagctcttcaagaagctcatggaaaatgctggaaaaatggaggaacaggtggaagaggatgaaagtaaaccaaaggatgttgcaaaacaaactgtgaacggtgatgttacaatagctgatgaaggttcacagaagagccaggatagttctagtaaaacaaaaccaggaaaatctgtccttattaagcaagaggaaagggaaactggggttgtcagtgcgagggtcctttcacgttacaaaaatgcactgggagggatatgggtggtgtccatactcttcttttgctatgcactgactgaagttcttcgcatttcaagtagcacatggttgagcatttggactgatgagggttctctgaaaattcatggctctggttattataatttgatctatggaattctttcctttgggcaggttctagtcacactctcaaattcatactggttgattatatcaagtcttcgggcagccaaaaggcttcatgatgccatgctccgatcaatattgagagctcccatggtattttttcatacaaacccacttggacggatcatcaacagattttcgaaggatatgggtgacattgaccgaaatgtcgctgtatttgtcaatatgtttatggcacaaatatctcagttgctctcaactttcgttctcatcggctttgtcagcaccatgtctctttgggctatcatgccactcctgattttgttttatgcagcttacctctattaccaggcaacatctcgcgaggtgaagcgtctggattccattaccaggtctcctgtgtatgctcagttttcagaggctttgaatggtctgtccacaatccgtgcctataaagcctatgatagaatggcaaatatcaatgggagatcaatggacaacaacattaggttcacacttgtgaacatgggtgcaaataggtggctagctattcgtctggagacattgggtggcatcatgatatggtttacagcaacatttgctgttatgcaaaatcaacgagcagagaatcagaaggcctttgcttctacaatgggtcttcttcttacttacactctcaatattaccaatttactcacagctgttcttcgtcttgctagtcttgctgaaaatagtttaaatgctgttgaacgggtcggaacatacattgagttaccttcggaagctcctcctgtcattgaggatcataggccaccccctggttggccatcatcaggtgtcatcaagtttgaagacgttgtgcttcgatatcgaccagaacttcctcctgttcttcatggcatatcttttgttattaatggaagtgagaaggtaggaatagttggcagaacaggtgctggcaaatctagcatgcttaatgctttgttccgtatcgtggagcttgaacgagggagaatattaattgatgattgtgacacttctaagtttggaatttgggacttgcgcaaagttctaggaataataccacaggcaccagttctattctcaggttctgttcggtttaatctggatccctttaatgagcacaatgatgcggacctctgggaggctctggaaagggctcatctaaaagatgttataaggaggaattctttaggattggatgctgaggtttctgaagctggtgaaaatttcagtgttggacaacgacagctgttgagcttagctcgtgcgctgctgagaagagcaaagatacttgtccttgatgaggcaacagcagcagttgacgtgcggactgatgctcttattcagaaaacaatccgagaagaattcaagagttgcacaatgctcataattgcccaccgtttgaacacggtcattgactgtgacaggttgcttattctaagttctgggcaggttctggaattcgactctcctgagaatcttctaagcaacgaggggagtgctttctccaagatggtgcaaagtacaggacctagcaacgcagaatacctcaagagtcttgtatttgcaagtggagaagagaggtcccggagggaagaaatcaagctgcaagatatccaaaggagatgggttgcatctaaccgatgggctgaagctgcccagtttgcgcttgctagaagcctcacatcatcacatagtgacctccttgcattagaagctgccgagggaaataatattctgaggagaacaaaggatgctgtaatcactctgcaaagcgtactggaagggaagcacaatactgaaatcgatgaatctctaactcagtatcaggtcccagctgatcgatggtggtcttcactttacaaagtgatcgaaggcctcgccacaatgagcagattgggccgcaaccgtctgcagcaaccttcttataattttgagaacaacaattctattgactgggaccaaatgtagatgtagaattctggatcacaacagcattgtggagtaggctggaggtgtagttatttctggcggatttgattcctgcggtgtgtaaacgctgcagcaacacgtaacttgcgaataaggaacgagttttgccacagcaggacgatccttgtaccgtcgtccgcaagggttgtaatttctcagggaccgttacgacacgattgtatgtcaggttttgacagtttgagccaatgcaattcttctaatgaaaaagacaagtgcatgtgaatggttagcatctgcctatcgcctatcgggtatcatgtggagtcgtctggtataccgtcctacacggctacacctgagaacgaagcgaccttacccccaactatcaccttgtagcgatccgaagttgttcatcttcgagtttcagttctctaactccatcgtagctaagcgtttcagcaatgggtcaagagagagatttaactatttgtcaccgttaggaaggccacatatttgtttgcttgttttacgtggcaactgtacgattttttatcggaaacgctaactggtctattttattgatgtaccatgttaaattagcatgtcacggtggatcctagtcttttttccggagagacacctggaaagtcatttttaccttcgcattttca

SEQ ID NO: 24982 - DNA, 2655 bp, Zea Mays
atgcacgttatccatggcgcctcgaggagaccccggcgaatgctggcccttggatccaaccgagctagcatgcatgcgcattcgctgccttccaaacggaggaaggggaaattaacaacgcgattacgcgaagccttcaaaaagccagccccctcctctcccttccaggcaacccaaccacaggccacagcgcagcggtgtgtgtgggtgtgtgtctgcgccagagaccaaacaccaacctccccccaccctcgacccatccccacctcgccgccgccgccgccgccgcacggtctccttccccgagcctcttgaggttcttccaggagctggtgttggtgcccgcgctgcaggtggggcgcagcccattgaagacattgctaataaggtattgaagatggatggtgggagtgctgagaagattgctggaggtgaagatgaagggactacatctccagtcccagagaaggttcaagtaggccattctccacagtacaaggttgaacgcaagttggggaaaggtggttttgggcaagtatatgttggcagaaggatttctgggggaacagagcgcactggacctgatgcttacgaggttgctttgaaatttgagcaccgaaacagcaagggctgcaattatggccctccatatgagtggcaagtttatagtgctctgaacgggtgttatggtgtaccatgggttcattacaaaggtcgacaaggagattattatgttctggtgatggatattctagggcccagcctttgggatgtctggaattcatttgggcagttgatgacacctaatatggttgcttgcattgctgtagaggcaatttctatacttgagaaacttcatgcaaaagggtttgttcatggagacgttaaacccgagaattttctacttggccagcctggatcccctgacgagaaaaaactttttctgattgatcttgggttagcatctagatggaaggaatcagggtcatctggacaacatgttgaatatgatcagaaaccagatattttcagaggtacaataagatacgctagtgtccatgcacatttaggacgtactggtagcagaagggatgatctggaatcattagcatatacattgatatttcttcttagaggaaggttgccgtggcaaggttatcagggcgagaacaagagttttcttgtttgcaagaagaaaatggctacctctccagatctattatgctgtttttgcccaactccattcaaacttttcctggagactgtgacaaacatgaaatttgatgaagaaccaaattactcaaagcttatttcccttttcgatgaattgattgagccccagcatttgaggcctattagaattgatggtgcattgaaggctggacaaaaacgtggaagattacatgtaaatccagaagaagatgagcaaccgaagaagaaagttcgacttggaagcccagcaaatcagtggatttcagtttataatgctagaaggcccatgaagcagagataccattacaatgtagcagatgccaggcttcatcaacacatagagaagggtaatgaagatggattgttcattagttcagtagcatcttcagccaatctttgggctctcattatggatgcagggactggtttcacatcccaagtatatgaactgtcacccatattccttcataaggattggattatggagcagtgggaaaataactactacatcagtgccatagctggtgcaatgaatgggagttccttggtggtcatgtcaaaaggaactccttacactcagcagtcttacaaagttagtgaatcattcccctacaagtggatcaacaagaaatggaaagaaggttttcatgttacatcaatgacaactgcaggaagccgctggggtgtagttatgtcaaggaactctggatactctgaacaggtagtggagttggattttctttatcctagtgaaggtattcaccgacgatgggagaacggatatagaataacttctacagcagctactggcgatcaagctgctttcatattgagtatacctaaaagaaagttaatggatgagacacaagaaactcttagaacatctgcttttccaagcaaccatgtgaaggagaaatgggccaagaacctttacattgcttcaatatgctatggccggacagtgtcatgaggcttgctcggctgcatccctagttgggaagagcatgttctgatgagtaacccgttcaagatgaagcaccttacagtggccagagtaggagctcaagaaagaaccgagaggaaggtggaaagcaatcggccaataagcagacgaggagtatgtgatctggctagtagcgggtacaggcgctaatggcgtcaaatgttttgtatcagcatgttttgcttttgcttcgctcctgaccgctgtgcaaagagtagacagcttgtttctttcggaggcaagtcatctgagaaccatcgtgtatagcgtatgatgtcattgtattttctttagtggaggccaagttccatctttccggaactcccaaaatgctaagttattatgcgaggaaacaagtgtactgataaaatcggtgtatcaattccattattcgacaattctcacctgcattaattaatgcaatgctgcattacttatca

SEQ ID NO: 24983 - DNA, 1893 bp, Zea Mays
aaaggcaaccaagcgaaccagaccctcccaacggtcacctcacctcgcccgccgcgccgtgtagccagatcgccttcaggttccacgacctgaccacaacccctcggcgctcatcgtcatccaccgccgcccgcgaggtccccctccagccttcactgggcgaaggagaaggagaaggtgaagggaaactccgcgcgattgccgccattaactccctccccccacccttctcgcaagcgccaccggatccggtccctccccacccgccctttctccccacctcacggaaccccgcccgcccttttaatagtttcgccccacatgcgtggcgcgagtgccgccgccttccgacgcagcagccgcggccgggatgtcgcgtatccgtagcggggtggaggtggtcgccagtagggggtgcgcgcggatggtgatccccgggatgcatcacaacccctcatccgccgcatccgtctcctcctccgcggcatcgcgcgcggcccccgccgccggttccgggccggcggcgcatgccgatgggcccttcgcaggcctcgtcatctgcgtcactgggctgtccaaagaggcgagagttcaggtgaaggaggcgacggagcggctcgggggcgagtacagcgggagcttgcaccccaagtgcacgcacctcgtgcacagctttgccggacgcaagttcgagcatgcactgaagcatggtccgaggaatgggctattcctcgttacgctgggttggtttgtggactgcgtgaggaggaacatgaggttggatgaatccttgtatgccatcaagagcattggggagaatggtgtgccgcccggggagttcagccgccttgttggagttcctgttaacgagaagtcttgccttccaccgttgatatttcaggacaaggcatgctcagatatgacccagaagcattcgctccagactcctgggaacggtggtggtcatgatgggttggtttttatgaatgacacaatctacattgaccctgggatatctgatgagatgaggaaaaagatttctgacgctgttactagagaaggtggaaagttgctggagcactggtttattggttgccctacaacttatattgtctgtgaggatgtttgcgttaagagatatgtaggccactcagaaaacattgttactccgctttggatcttgaaaacagtgaaggaaaaaaacttgcagcgtcttgtccatttgtcttccgacctagctaggcatgttgccatggttctggaaaatgttcagacatctgaagagaataggaaacttggaagtgtaccttctataaacacaagctcatgtggtcgtccatcaaccaaagaggagatcaatgaagtccatcaagcgaagcaaaagtttgttgaaggagcaaagaaagaagtccgagaccgccgtgcccgtcgtatgcagtcatgtgaagtaaccattcatccaatcacaccggccacacttctggattcaatctgctggacaatctctgagccaacttcatctgcgtcaatttatatggactcttcgtggtccgatgatgccaatgagcagcaaagcaccacttactttgatgcaaatggggacgtgagggatccagatcaacctaatgacaatttttcccgtccactgaaagaaagtgagcgaagtgagctgatcttcaagaatcacttccttaccatactcttccctgttgatcgttttggagaacttggaccttcctcaaagacgttctataacaatggtggctttacgtgtatacaagtactgaatcacatttacaacttctaccaggtatataactactgcacactcatcgctcaagtttggactctttttgtcttgtaaaacattgatggcagtaaaactattctcga

SEQ ID NO: 24984 - DNA, 923 bp, Zea Mays
gccgggcagtcttcttcaggcgggtggatctctagcgctccttgagctggagcaggcaggcgtgccggtcttctctaggcatcttctccaggcaggcgtgccggtcttctccaacgcatcttcagcgtctctcgagctggagcaggctctatgctccgatgtactcatccctgctccacaccggctcaactgcatccaggtgggttcgacctttgcttatggtcatggaagaggcgacgatgccaaaactcttgcagagctcggattccaaatcggtgattacttgagcgttgcaatcatgtagacagtgcccgcaccggatgtaattgctgaaatgtcaaaaggtctctggttgcaacagtaaggtgtgattctctgttagcagtagaaactggaaccagaattggtctgtaatactggtagtatcaaatgtcaaaagggctcgggttcctatgaagtcaaacacaggaaagtttgcatcttggagccaaaccaattgggcaaatttttgttcggtacccaattttgtttcgccatttctaaatttagagcattatgcaaaagtgtgaatataggtgcttcacaaacggacacatatctcacgaagtttcatgtcattggactacaactacatggtttgagctacatttcttagttttgtttgttttattccttgaaatttgtacgatttgttcatctagcctctacaaacttacttcatgcatagatgtcccttttttggactatttactattttttgtgggttaaatgccttcatatccaaaaataaataaataaataacaaatttggttaaaaaatagtgaaacttggcatggactcatattttggccttatttgcctaaggtaaaaaaattcagagcattatgcagaactgtgaatataggtgcttcacaaacggaca

SEQ ID NO: 24985 - DNA, 1194 bp, Zea Mays
atgtatccaccaggcaaggcagttgggatggcagctgcccatgatggttatggggcgtcaggcaggggcctccgcgagggggacgtcgtgctcctcgctctgccgaactccatcgctagggttcgggacaccagccccgccctcgtgttcgccacgcccgacaacgtcgagaagctatcgccgttgcgcgtcccggtcgtcctcgtccccgacgccttccacctcgtgggcgacggcgcccccgagttcgcgcccttccccgagttgctgctgctcgattccgagccactgtcgggcccttcggtacgccaggacgacgcggccgccatcctctactcgtcggggacgggcggccagagcaagggcgtcgtgctcacgcaccgcaacctcatcgccacggtcgagctctttgtgcgcttcgaggcctcgcagtacgccgcacctgcttgtgacaatgtctacctggcggcgctgcccatgttccacgtctacggactctcgctcttcgccgtgggacttctctcgctcggttccatggtggtcgtcatgaagaggttcaacgcaggcgaagccgttaaggccattcgcagattcaaagtcacgcacttcccgatcgttccgcccatcatggcggcgctggtgcacaccaccaagccagcggcaatgccgttggaatgcttggtgcaagtgtcaaccggtgcagcgccgtccagccgcaggctcatcgacgatttcgtcaaggctttccctcacgtcgatctcattcaggtgtcgaaatcagtggtacaacgtacaaggtgcccgtatggggtgtttgaggagccgtggggagccggccaacaccatggtggagctcgtcgtgggctcgccgtccagagagcagagaggaggagacagagaacgagcgagaggagacagaataagaaaaggaggatgcagagatgagatagagaacgcacaaaacaaaattgattgcaatagttttggtttaggggtaaaacagtccgatcaatttatattttgtcaaacaaccccctaaatggcattttgtctgtaagccagtgtttgagaatggcgtattaacgaagcgtgttcttataatggcattcaagcgaatcctaagtttgataatggcagaattccaattttctcactttgtgaggcgtgtctcgccggcaagcagcgacggacggc

SEQ ID NO: 24986 - DNA, 1373 bp, Zea Mays
actgctttcagaaatatggcattttgactacattctattgactactggctatgggcggatctcatcgcacttgattcacagagacttttgaagagtgttattagggttcagcagcaagaagaagccgacattttctatgtgccattcttcacgacaatcagttatttcttgctggagaaacaagaatgcaaggcactttatagggaagctttgaaatgggtcacagatcagcctgcttggcaacgttcagaaggcagggatcatgtcattcctgttcatcatccatggtcatttaagtcagtccggagatctgtcaagaaagcaatatggcttctacctgatatggactccaccgggaactggtataaacctggacaagtatatctagaaaaggatgtcatccttccatatgttccaaacgttgatctttgtgatcacaagtgtgtattagaaactcaatccaaaaggagtatattgctgttctttcgaggaagactgaagagaaatgctggaggaaagatccgcagtaaacttgtagaggaacttaaaagtgcaaaagacatagttatagaagaaggttctactggagctcagggaaaagcagcagctcaggatggcatgcgcaagtctttcttttgcttgagtccggctggggataccccatcttctgctcgcctgtttgatgcaatcgttagtggttgtatcccagttataattagtgatgaactggagcttccatttgaaggaatacttgactatagggagatagcattgtttgtttcagcaagtgatgctgtgcaaccgggctggctcttgaaatacctaagaggaatcaatgccaaaagaataagagaaattcagtctaatcttgtgaagtattcaagacattttctgtattcaagtcctgcccaacctctcggaccagaagaccttacatggagaatgattgctggtaagctggtaaatatcaagttgcagattcggcgttctcaacgtttggtcaaagagtcaaggagcatatgtacatgtgaatgtagagttgggaacaccacgagaatgctttgaccaatattttcatttgtgcctttaaacttttgtagcatagccgttttttgttaccaatgaggcgagctttgagtttggcaaaatttgccgatgtatttgtaaatgcaactgagctggaaagagttgtgatactgtactaatcccgatgcttgtgtttgctttactgcccgttaggaacaaaaggaatgtaaaacagagaaatgtaaaaaaaaatcaagagcttgaagtagatatttatttcctccatttcatgaatgaaagtaaaggtctgtttggtttgtggctaaatatgccacactttgcctaag

SEQ ID NO: 24987 - DNA, 1681 bp, Zea Mays
atcgcgctgtaggttccctacagcctttcccctgaaaaaaaaattaccccccggacctcctcctccgatcggcttcctcctcccagtcccgaaccgcacgcgctcgatttcccgcaccccctctagcctctagcggccatgtcgcccgccgccgccaccacaaccttcgtcgcaatctccatcgccgtccccaaccctaccgctccatcccgcggtcgcgtgcgccttccgctaggcggggtccccgctgctccacgccgcgccgtcgcctctatggcagtgtccgcccccaggtccggcgccgccacctcgtttctcgagcgccgcgagtcggagcgcgctctccactttgtcaaataccagggcctcggcaacgacttcataatggtggacaacagggattcgtcggtgccgaaggtgacgcccgaggaggctgcgaagctgtgcgaccgaaacttcggcattggcgccgacggtgttatcttcgtcatgccgggggtcaatggtgccgactacaccatgagaatcttcaactctgatggcagcgaaccagagatgtgtggtaatggagtccgttgcttcgctcggtttatagccgagattgaaaatctgcaggggacaaatagattcactattcatactggtgctggaaagatcgttcctgaaatacaaagtgatgggcaggtaaaggttgatatgggcgagcctatcctttctggactagacatccccacaaaactgctagctaccaagaacaaagctgttgttcaagctgaattggcagttgagggcttaacatggcatgtcacatgtgttagcatgggaaaccctcactgtgtcacatttggtgcaaatgagttaaaggtcgacgatttaaaacttagcgaaattgggcctaaatttgagcatcatgaaatgtttcctgctcgcacaaacacagaattcgtacaggttttgtctcgctcacacctcaaaatgcgggtctgggaacgtggtgctggagcaactcttgcctgtggtactggtgcttgtgcagtggttgttgcagctgttcttgagggtcgagctgagcggaaatgtgtagttgatttgcctggcgggccattggaaattgagtggagggaggatgacaatcatgtttacatgactggtcctgcagaggtcgtcttttatggatctgttgttcactaggtactggggaccaagatagaagggttggctgccactcagagcttgtgagattggttatagtatccatgaaacagagtgttctggtaccagtacacttgttcagatattcttaattatgattgcttgatttgggtagcagtagaggcttccttttgaagcattctagtgttcaccttttgtactcctttagtttgtcaggtttgaacactacatgggtaacatgtctttcccaccattttctgtttcttttctttgtaagtgaacgccaatgcagttttagtattgttttctatagatttgtcttgatgcactgggcttactacttattttctggtatgaatgctgcctatttcctgaaaatcgcaatcatctaaagtgcttctgacaagtgacaacagacaacatgggttgttggctatggctcactattaattttcacctgcaacaattaagagtgtcaaattctgtgcttatataatctccgtatttt

SEQ ID NO: 24988 - DNA, 204 bp, Zea Mays
catccttaggtataaactgtgtaaatgcggaaaatgaattatagaatgtataggacatagatgggtcaagggacacttgccttcaccaaaaagatgctcagggtcttcaactttgtagaactcgaagaacttgatttcgggaccagtggttcaccaaatcttgatcattgattcctcgaaactcgggaacagatcacaatctat

SEQ ID NO: 24989 - DNA, 924 bp, Zea Mays
gtcattaatcagtttcaccgctgggtcagccatggccgccacatccatcaaggtcgcgcacctcacaaccctcgcgctcttctctccgactccaaaccccttcggtccgaagtccagcaaacacagagctagagccccaccacccatctccatctccatggatccggccctcgtggaccctgcccacctgcaggcccttatgctcgcctgcggccactcttgcacgctccgcctctcgccggcgctatcagtttccgccgttgagccggtcgacctcagcaagctccggactgcccttgcgcacagcttcgtcgtcgtatctgtcttctgcggtgctaggttcttcacacatgacagggaaagggagggggagggacagagattcttgggcttggagatcggtctcgatcttcagggtgagcggcgccttgtcggattcgggcgcgccgtctccgacctcgggctcaccgcatccgtccatgacattggtacatccattactacagaggagaggaattggccaaaagatagtgaacaaaattacaagggtacttcatagcagaggtatatatgacatctctgcgttatgtacagcaaaggagaggcccttttttgaagcttgtggatttggtgatgatatgatgggttcaacaacaatgttgtatactagaaaaacacagaaatagagttcattaaaaagttctcaattggtataatgttatttgttgatatgataactcatctgttggtcttcactgctgatgtttcaaagcattactctcagaaaaggttgatcttcacagctgatgtttgaaatcattttactcagaaaaaggggggtgggttatgagatgtagcagttatctcaatgtgcgcacctattgggaaaaataatcacaatggagtcgtgacgattaagacaag

SEQ ID NO: 24990 - DNA, 3394 bp, Zea Mays
ccttcgcgtgcgacgtcggcttgccagccgcaggccctcgggctctctttacccatctccagtcctccaaccccaatcctctcctttccatccacgccgctgcgcttccgatgcaaccctaaccacctcatcgccggcacgatcttccccgcccccactccccggctattgcctctgattggcggctctccgggattcacgttggtccggggtacggctcctgcgattttcacgcaatggagcaagatcagagcgtggttgtcggcagcgcggactctggtgctgcggcttttggttttgcgactggcaacccccctagcttggctgtgaccggcggaagcgccgtggcccccgacggtggagctcaggcagctgatgcctctgcgtaccaggccgagcacacggcgttgaatgggactgtcggcgatatgggtaattacccatctacaggagctgcagagaacggcgaagccgtccccaacgagacgggcgagccggttcctgagctatcgtacgaagaagccgtgctttcagcagaagaggctaggttatggagtgttgttaccgcgaattccttagattttaatgcctggaccgcacttattgaggaaacagagaaaaatgctgagaacaatattttgaagatacggaaagtgtatgattcgtttcttgcggaattccctctttgctttgggtattggaagaaatatgctgaccatgaagcgagacttgatggtactgtttgaacgtggcttggcatatgttggaacagattatcattccaatattttgtgggatgagtatattaagtatgaagagtcactggaggcttggagtcatctagctgatatatatacaagagtattggagcatcccatccagcagcttgatcggtattttaattgcctcaaggaattggcttcgaagcacagtttatcagaaatacttactgcagaagaagcctcgttgtatgttgtcacatctgagaccactgctcaagcgcctgatggtgaggcacatcctgatgatgttgataagcttggtcaaccagaaatttcgtcttcaacagacgcagaaagccttgcaaagtatgtctccatgagggaagagatgtacaggaaggctaaagagtatgaatctaagatcattggttttgagctagctattagaaggccatattttcatgtcaagcctcttgacaatccagagcttgaaaattggcataactaccttgactacatcgagaaggaagaagacattaataaggtatgcttttacacttctagaaaccccttgtccttatttactagtttttattatcgaacgcttggaatcctataacttacaatccagtcttattggttccactatatcctttaacggctagtatttggacgaagcttcctttgtaatgggatattgaactgaggatagagcgtggacataatgtttggtttcgatgaggtatttgcttaatgctcaccttcttaaccatctatctatcgagcaggatggtccctcctttcttatggaggggcctccgtaatcagctaatggagtaatctgtgtgaacttctctttttttgtcaataccatatccttactatcattatttaccctctttattttgtctcgtacacaagatttctgatgttatgttaaactgttttcaggttataaaattgtatgaaaggtgtgtgattgcatgtgctagttattcagaattctggatccgctatgtgcaatgtatggaggataaaaggagtctagacctagcaaacaatgccctggctcgtgctactcatgtgtttgtcaagaagcagccggagatccatctgtttagtgcgcgctttaaggagcttaatggcgatatttttggagcacgtgcagaatatcagcatctgtattcagatttatgccctggctttctagaggccattgtgaagcattctaatatggaacaccgactgggagataaagaattgtcctgttcagtttatgaaaaggtcatcgctgctgagaagggaaaggaacagagccagctcttaccaacattgcttattcagtactcccgtttcttatttttggccatcagagacttggagaaggcaagggagatattaactgtgctgcatgagcagttaaatttaacaaaaccagtgcttgaggctgtcatccatctagagtcgatttttccatgcgaaaagcgtattgaatttttagactcacttgtggagaagtttgttacacctgaatcatctcagggagagttggcaagtctagttgacaaagaagaaatatcttccatatttttagaggtaacacaatagaagttgtatatagatgtggaactctccttaaagtcaaagttacaattaatcctgatgatctatgtatgcacaactatcaaatatgtttttggatctctttggtgatgcaaagtcaatcaggaaggcttcaactcggcatacaactcttttttcatgtaagagaagcattctgccatcaaagaaacggaaggctgatgatgctgttgtgtcagacagggacaagtttgctaaaactgggtctgttcagtcagccacaggaactgatccaaatgcttccaatcctcctgtttggcctgcgacttctgaaacatctggacatcaatggggagcttcttatgctcagcaggctgcatatcctgcatatggaacttatgactacagccatcaaatgccacagcctgctcctcaaacagctgcctatggcgcttatcctccaacatactctgttcaggcctatacacaacaaagctacacacaacctgcagcaattccggcagcaccagtgccagcagtggtaccagcacctacaccggcgtcagcttaccctcagcaacctgcggcagctcctcaaccttattatggaacaacctactactgacaagtagagtaatcttcgatggcgatctgacgagcctgttaatcagcaggtttgtcgatacgaggtcaaaggcatcacaaaaccctctgtactgccattgtttagccccccttcagacagatgccgtcgacgagatgatcacttgagaacaaatttgagattggtatagtctgcatttttgtcgttagcatgtgtcgctagggattgctattgtttttcttgtaatagcataatctttactgtagaagaggcagcgggtgctaaccaatcctatgaacatataattaacattattcactgtttcatgccacctttcggagtgctttttttttcaaccactgatgatagcgggattcctgtcaagcacgctcactggtgaagtcctcggaacaaaattgtcaagatctgcgactacacagttcactgatttctactgtcactgtaggtcaaactatcttgatttgac

SEQ ID NO: 24991 - DNA, 1046 bp, Zea Mays
cgacgccgttcccacgttgtcctctgttccatccccgttcgttccacgaaccaaaccaaacacgctccacaaaaagaggtcagtgtggacgcttgaccgcgaaaattatatagacttctactcggctgcatctttgctccggtcgatgcacgacaagaggagaatggggacggaggccgacgccgcagccgtggacctactccggtcgcagatcccgttccagaccgacggggagttcgttctcccgccgcgcggcgtcgggctcgtcctcgtcgacctctgcaacggcttctgcaccgtcggcgccgggaacctcatctggagtggttggaaaaggagccaaatgtgactataaagaggaaaagttgtattgatgggtatatcagctgcatagagaaggacgggtctagtgtttttgctgattggattggaaaatatcagataaaaactgtcttggtgctcgggatatgcacggacatctgtgttttggattttgcaagctcaactctggctgctcgaaatattgaccgagtgcctccattacaggatgtcgtgatttattcaggggggtgtgctacatatgaccttcctgttgagattgctactaatatcaaaggagctcttgcccatccacaggatctgatgcatcatattggactctatatggccaaaggaaggggtgcaaagatagttgacagggtggttattgaaccttgaataaaaaaactttccctcgtcacagtgatgttgctagggtttccttccattgtaacaaccagatatatatatgcatcttggcagaaagttgttgagattttttataatgctagcgacaactatatattttttttaaacgggccggcaggagatctacccgttatattaaaaagatgggagcccaaagggggcgaggtttaaaatacaaagacaccccacaaaagcacaccccacaaaagcaggaccaagccgaaaaacacaaacacacaagactaaactgaaaggagattaggagaaaagccaagttcaaacacacaaaactaaagaga

SEQ ID NO: 24992 - DNA, 1257 bp, Zea Mays
cgggaagcctacggcactgggctctcctacatgccagtgttgcctgttcgttaaagccatctatccagtggattgcagcttcggatcttgaagatgcaactgcaatatctgcaccagatgcccatgctgaagcctgggaaactcttaaaggttcatcatgcattttgatacctggaggatttggggatcgtggaatttcagggatgatattggctgcaaaatatgctcgtgagaatagagttccatatcttggtatttgcttgggcatgcagatatcagtgattgagatttccagacatgtcctgggcctggaagatgcagacagtgaggagtttaacaaggatacaccgaatcatgttgttatgtacatgcctgaggtttcaaaaacacatatgggaaacacgatgaggttgggctgcaggagaacattcttcagcaaacctgattgtcttacatcaaaattgtacggaagtcctccacatgtagatgagcgtcatcgtcatagatacgaggtcaatccctcttttgttcccatgcttgaaagtgctggtcttcattttgttggttgtgacgaaagtcgaaaccggatggagattgtggagctacaagatcatcccttctatgtaggtgttcagttccacccggagttcaaatcaaggcctcgaagaccttcacctccttttacaggtctaataatggcggccactaaacaactgggagcaaattcgaatagctcgaatggcttcgttggagcttctgactaatgtaaggtaaagcgttccgaaacttggtgattccccaaaggtattttctctgtgtcagtgtatgtaactaatgtttctgaacattcggtttatggatgcaactattgtttcttctgcagatggggatctcccgttgctgcagacacccaagttatttcttgtgcacattagatgtacaggaaaacaatctaagcctgaagcagagtgtttctctctctcgaccacctgagtggcgtaagctaacggtcttacagtgtattggggccgaaccgtcatggttttgttgactgtcatttcaattgagcttaacagcagtcagtgctcccatccttgtgattccaattgagattaacagtagtaagtgattatgatctctcttgccgtttgagtggaagtgaaagacactaccatccagtttttggttgttatttgttctgatttttttgtgtttgttttctatacaaatgtgaaaaacatagaatataaaaaacaa

SEQ ID NO: 24993 - DNA, 1928 bp, Zea Mays
agaagtaacttttgaacacaacattctgtatgttgagctagagttttattgtagacagttcatcaaaatgattatgagcaagatccatatgcgaaggaatttgggatcaacattagtgagaagctaacctctgttgaagcccgagtccttcctgcaccttggttgaagtatcatgacactggaaaagagaaagagtgcttaccacaggttggtcagtggaacatggtaaacaaggtaaaattccagcttgtgtgtaattactatgtttgattgcaatacttttgggcctaaaaaaatcattttacagaaagtgataaatggatgcaaggtgagccattgggcatgtataaacttctcaaggagtgttccagaaaccacagctcggggattttgccaggaattggcacaaatgtgtcaaatttcgggcatgctagaccagatcaagttgtgaaggcacttaaaaacgtgtataatattgcattgaacaaacttaagggtaaagatcttgaacttcttttggctatcctccctgacaacaatgggcagttatatggtgacatcaaacgtatttgtgaaactgatttggggttgatatcacaatgttgcttaaccaagcatgtttttaagatcagcaagcagtacttggcaaatgtctcactgaaaattaatgttaagatgggaggaagaaacactgtgctcctggacgcaataagttggaggattccgttggtcagtgacatcccaactattatatttggtgcagatgtaacacatcctgaaaccggggaggactcaagtccatcgattgctgccgttgttgcttctcaagattggccagaagttacaaagtatgctggattggtttgtgctcaggcacaccggcaagagctcattcaagacctttacaaaacatggcacgatcctcagagaggcactgtaacaggcggcatgatcagggagctcttaatatccttcaggaaggccactggacagaagccattgagaataatattctacagggacggtgttagtgaaggtcagttctatcaagttctcctttacgagttagatgccatccggaaggcatgtgcatccctagaaccaaattaccagcctcctgtaacatttgtggtggttcaaaaacgtcatcatacaagactatttgcaaataatcacaaagacagaagtagcatggacaagagtggaaatattttgccaggaaccgttgttgattctaagatatgccacccaacggagtttgatttctacctctgtagtcatgctggaatccagggaacgagtaggcctgctcactaccatgtcctctgggatgagaacaatttcacagcagacgaaatgcagacattgacaaacaacctttgctacacttatgcccggtgcacacgctcggtttctgttggtatgttctgtgctttacagtccctcctgcatactacgcacacttggcagcattccgggctcggttctacatggaaccagagatgttggacaaccagacgtccaagacctccaatggcacgagcggagtctcggtgaagcccctgcctgctgtgaaggagaaggtgaaaaggatgatgttctactgctgacaaggagaccacttaaccactcacatgctgtagctaacttgctagagtttagtaaggattagatagctttctcaaggagtgatggatcaatctgatctgttaacgacctctgtaaagtactcggaaatggctgtataatagttgttgtttcaaatgtgaaagcatctaggtccttagttagatttcagtgatcagtgatcaatgacgatactagattattgtgactaatgtatgctagattattatgattaatgtatgttttgcagaaacaatggattttgtgccgccattaatagtattcaattttggttttcaaag

SEQ ID NO: 24994 - DNA, 4952 bp, Zea Mays
attccgaaaaaaatcactaacagaaggacggttcaggaagcattgacagatagaagatggattgctgatatcacaggatcactctcggtgggagtattattggattatcttcatctttggaatttaatttcagattttgagctgctgccagatatagaagataaacatacttttagtattgctgcaaatgggacttattctgctaaggctgcatatgatgggttgttcatcggggctgtgcatttcggtcactatgaaagagtttggaaaacttgggccccctctaaatgccacttcttcctctggttatcggtgctaaataaatgctggacaacagataggttggcaaagagaggacttgatcatccggagaagtgtccgctttgtgaccaagagtctgaatctttggatcatattttggtttcttgtgtttttgcgagagaattctggttccggctgaaggttgatgtgcattttcagactacaaaatctggctcctacacctagtacggtgtcttttacgggttggtgggagatgatagacaatggctccggagatatgattatgaagggtgtcaactcccttattgccttgggagcctggattatttggaatcatcggaatcaaattgtctttgatggaatctcccctagtgtttctgcagctctttgtcaggcaagggaggaacaacagttgtgggaaatggcaggagctaagggtctctcctttcttgccgcaaccatcaggggcacctagctgcctggtttatcgctgatgggctggttttgtttttcaggatctgtttgttctttttttgtttttttctcttcttttttctttggtttttttatcccctccggggaggtcttttgtactttggtctattttggaccctcttttccttctacttaatataatgatgtgcagttctcctgcgctttcgagaaaaaaaaacgtcatccgcggcctcaacgaatgctttgccaacattggtcttcacctttgacgtgggcgcctttccccacctttttcgatgcttgctctgagctccttcttgaagtgctcaggccatcagggcacctccattgacccctactgcccttgcggcctctatcattccgcctgctcccgctagtgcgcccttggtcttcggggcctgacctctggcttcctctcgtagtcttgtgtgctttgtggagcgtcggggggctcaggcctagggcctttaggtcccgtaggtcatgagtgggactcaggcctaggactcgactcgtcggtcgtgggtgggaggcggactggctccttcctacaccgcggctcggtgctgggcgcagttaatgtggcgtgcgtagtattgatggtgagagcagccctagggccagatgtggaatccactcgagtggctctctggcggttcgtctgatctccttgccaggcttcgcctcgtccgacctctggcgcggtgcataggggtcatctgggtgcagattcacataggcgagcttctccctatcttatctctcactcgtggtctcgtgggggcccggggatccgatccccgacactcgggatatggatcgccgacgtggggaaaggaggcgctggggtggcagctacacccgcgggaggctagggaggcgtaggccgagcgccgatggccgggtgtagggggatgccgccgaccgcaaccgagaaggggaggtctgtcaccggaggaggaggtgcggcagcggccgtaatcgcaatcgtccgcgcgatggctgcagcggtggttggtgcagtggacgttcgtgccgcttgcgtggggagggaggcgagcacatgaaaaggagaaagggagggaggcagtcgtggacgccgagaaggtgcgggcggacgcggtgacgatcgctctgggagatgcaggggaaggagagggaggggttgccggaggactgctccatgacggtggcgatggccgggggtgcgccgacggctagagtgcctggtggttagggaatgtagaggcttgataccatgttggaatagaaaaccctaaccagagttgatagtgcattaatataatagagttaggtgggtctgaggcccattacaatagaggcattacaatagagcatacagttacgctaacagtatcaaatgcctttgaaatctctagcttcaaaaggatgtatggttctttacttttatgtagggtctgagcaagctgctgcacaagtaagaaattgttgtgaatattcctcctaacaaaggcgctctggttgttagaccagcttaggcagcagggtgccaagcgataagcaaaaatcttggttaccaactttgcaaagcttgagttttaggacttgagctttacaagatgagtttacagcttggacttgatcagatcccatctgaggaaaaggatctccagttttggcacttgaattatcaccattgtcgaatagccaccctaaaatcaaagtatttaatttcttctgtgactgctaaaaggttgaaataacttttctaaaagaaaattgcttgtccatgggagacccctgggcattttttagtttataagttagcaaattacatcctgattggtgattggctaggaaaactagctaaatcagtttccagggaggtaaccacaaattgctgagtcctggatttgagcacaggtggccttcctctcaactgggaagtactttctaatttccttttcagatgtagatgtaatatttccaagaagtacaacccttttccttttttccttgcaccaaaccttttgtaactttgttcccagataccgggttctcggtcttgttagaagtatattactaaacaatctatctgcctacactgcattgttcagcagatgctggattagataaaatgtgattttaacaagtactccctatgttccagtttattaggtggtagtgcatttttgagaaagggcagattgttaggcggcatacatagcaaggcattgcattataaattcctgtggaagaaacacagccgttttatccgacccgatccaacaagtgaatgcaatgcaccagatcagtgtggcacctggcgtgaattaaatcttgctcacactctggtgtgtgtactcttagcgcctttaaattgggtgtggagggagtgtatatgggtgcaaaaataacatagctttgtacaagtaaacaaacatggttggacatcacttttacctaagatttttattgaggactaactgtctctgcttcttacatcctagactgaaaattttccattagatgtccacattgccttggaatgtattgattgtgctatctctttcagcatcaacatgggaaataaggactttgtatacatcaggatcatcgagtccaaaatgtgttgttactcttatgttggagattgctccaagtttttggggcagatggaagagaaggcactcaaattttgacaaaagcatcccttttgctttgctcagccaagtagcaggtataagagagtacttcgcagccaatccagccttgacatctgagctgccttcaacagtagtgaagtcaaaagcatctgaaactttgatcatccagagtgaacatgaagattctgaacttggtgatgaattttatgatgcacttactagaggtgaatccttcgaagatggggatagtgatgatgatgatgatgccacaactccaaaggctagaaaagtaaagttgaagaatgtgtcatgggctattgcaggcttggctttaaagacaactaaagctttggttgagacaagtgaattggttacaaattctagtccagttactgttgaccccagccacttccatggcacccttcatagagcgaaaactcaaaatgatcaaaattcttggagtgcacctggtggggagaagtttatgatcagagggaagacttacttaacagattatcacaaggaagctgacaagatgtggtcttttgagatgggttaagaaattagtgaacgaattgcctagctggaaggcttctctcaatcttgctggaaggactgctatggttgttggcggtgatccacttctagagctacttgcggtcgattggttcaaagttaatgaacgctttgattcagttgccttacatcccaaaagccttgtgcaatcagaagctgcaaagaaacttcctttcatattggttataaatttgcaggtgccagcgaaaccaaattataacttggttatgtactacgctgcagagagaccagtgaacaaagattctttgttgggtagattcattgatggaactgatgcataccgagatgccagatttaaacttataccaagcattgttgagggttattggatggttaagcgtgctgtaggaacaaaagcttgccttctgggcaaagcagtaacgtgcaattatcttcgccaggataactttctggagatagatgttgacatcggttcatcatccgttgcccggagcattattggtctagtattgggatatgtcacaagcatagttgttgatcttgctattcttattgaggccaaggaagagaaagagctccccgagtacattctgggcactgttcgtctgaaccgtgtgaatcccgacagtgctgtatcaatctaattacgtttctagccgatctatgcaaatttactcttatcctcttttattctgagagaaacagcgtggcattttgaaaatgtgaaatagcattactatttgctgatccccaatcgagggtaacatatgtaaattggcatgaggcatgactacgtgacgcctttcgtaaatagaataaatcaatggttatgtaatattaatatcccatatacgcgtgtcataatctatgtggcttaaaagtggcatcaagtcatctagtttcctgtgttaacttcttattccttaggtagtcagacattaacagtgtgtttggtttgaggaatgaagtgatccatctttttctcac

SEQ ID NO: 24995 - DNA, 511 bp, Zea Mays
gtgtcaataggttcatatctcaaagtcgcatatgcatactggcttgcttactttcattttagatcttagatgcaagaaatgatctcctttgatgaatattcacttccaccacaggaagttccagtggaaaaggcagctgaggagaagccctctagtggtactgagactgaatctgctccttcaaccaatgatgagactccttcatctgtagaagataagaatgaaacgtctgaagtacaagatgctgctgaaaagtcagacgcagaagaaactaacactgctgcagaggaagcaagtgagactgccgaggaggaagaggctgagaaacctgagatcaagattgaaacagctccagcagattttcgtttcccaacaacaaatcaaacgaggcattgtttcacacgctatgttgaataccacaggtgtgtggctgcaaaaggtgaggatgcacctgagtgtgataagtttgccaagtactatcgatccctgtgcccaggtgaatgggaatgtt

SEQ ID NO: 24996 - DNA, 768 bp, Zea Mays
ctggactctcttgccggctcggctcagaccaatgccgcttgccgccccctactgtccctttcttcctcacctccaccacgcttgccaccctcgcgaagaaactgcagccgcaatcgccgccacgccacgcgcaagcccaggcctcgatggcgtctgcttcgtacgccgcaacgcatgcggctccacccgcacctcgctctccgcctgttcgaccacctgctccgctcgggcgcgccgacccggacctcccggcctacgagctcgctttcgcgtcctgcgcgcgcggaaggggccttggcacgggcgctgcaggttcgtccacgtctacgccgtatgccgatgctccccacgcgcgcagagtgttcgacggcgggacccacaacgacatggtcgcctggcacgcctactatggtagtaaataacatccggatctgcggacattgtcataatgccatacagtaacttctaagcaagatttctgggaggtgcataattgttagggatgaaaatcggtttcgtcatttcagaaaagggtcttgttcttgcggggattactggtaatatttttgatagcaacggtttccttcgttttacttatttgcatacactaaaatgtgtatattatatgagacaactgttattattgtccggagacatgaagctcctgactttattgcacgtctattgaatactatatggcacccttgaaccaacaacatgattgacatctcttgtgtctcatcaacttgaaacctaattattgtcctt

SEQ ID NO: 24997 - DNA, 3799 bp, Zea Mays
cgcatttatcgctcgctccgatgcaccaccatcggtccgtgtcactccatcgcacgcatcgccgccactccgctcggcccgacgcccgagaagcattcgaggaaggaaggaaggagatccgattccaaccaagccgggagctgagagctcccccaccggccccgccgcacctgcagccgctcgcttcggcttcgctcaggctcagcagctgtgtgtgcgtctgcctgtggtgtggactccccctcacatggcgagggcggaggagagccgcaccccgcagctgtctccccattccaatgccgagtgttgatctctcagcaaggagggagaaagcagaaggaccggttttgatcttctgagcggttcatggttatggatcgcgcgggttggctctggaggcgcaagtcatcggacaagagccccgggggcagtgacagctctctgtccgtgtcgtcacattccgagcagtgctctgatgatcagggtcaatatcaatcccctgaagccttttcaagaagtaagtatgattacagccaagaaactggagtagcaagatccttgaatggcaagctagcagcaggggtcaatatgaacaattttaatccagagcatggtcaatcatttgaacaacatatatcctccaatgttggagatgaagagatcaaggagaccttggagagtttgaactacaaactttctgctgcactttcgaccatcagagcaaaagaagacttggtgaagcagcatgctaaagtcacagaagaggctgttgcaggttgggaacaagctgaagctgaagttactactctgaaggggctacttgaagcttcttgtcggaagaatgcttctctccaggatcaagtcagccacatggatgaggccctcaaggaatgcgtcaggcaactgcggctggcaagggaagaacaagaggacaaagtccgtgaagtcgtttcgaattctctggtcccgcagtctgaaaaccctgagctccaaaaccatatcgcagagctaaaaaagcggctggaaatgaccagattagaagcgtcatcttccatgatattacagcatgatctacatgaaaggcttcgggcgattgagagagagaacttggaccttaaggccaaacatcaggcaattgagaaagagaatatagatctcaaggccaaactgcttgtacagtccaaggacctgaagatactgatgttggaaagagatctgagcaatcaagtagcagagacagcaagtaaacaacacttggaaagtgttaaaaagattgccagggttgaggcagaatgccgcaggctacagcatctaacgcggaaaacaacactgatcaataattctagatccacacaaaacaattgctgcatggaatcactgactgacagccagtccgaccatggggagcatatggtgggcgttgataacgatctgcaaaattccgattcatgggcattagctttgattgctgagcttgatcagttcaagaatggcaaggatggttcaagaaatattgtgaacaatcctgttgagattgacataatggatgatttccttgagatggaaaggttagctgcattgcccgaatcagatggcacaagctctaactttgaaatggaaacagattctgacaaagctgtcacaagaaacagctccttgaaggtcaaaaatgaagaattgcaaaacaaggtcgcaaatttgcaggaaaagtttgaagcaattgcatgcgagaaaagggagcttgagctggcacttgtggaagttagagatcagcttgagatttcctgcgatgcgctagtggtggcaaagaacaggctggttgaaatgcagatgcagttggactcagcaaatgattccaaactttctgctttggatgatgtggagcgtttagactctgagaggaaggctttggaattgcagctggagtccaaatctgtagaagtcgaggagctacttattgctgtagcttcattggaggaaaatgcagagcagaaagagttggagtcgcagttagaactgatgtccgcacaagctacagaacttcgcctgactgtggcatcactggaagagagaattcaggctgagagagatctttctgtgcagcagaaacaaaacgcagaagccatgttgaatgctaaagaagaactggaagcacagctgtgttcagcaaacactgaaatggggaaactgcgtgacattatcaaagcactagagaatgaagtcaaaaaggagagagcactgtgtgaagaattaacagcacagttacagataaaggttgaagcagctgtcaatgcagttaaagaatcattggaggcacagctgtgttcagcaaatactgaagcagggaagcttagagatgttgttaaagcactccaggatgaggtagaaaaagagaaggcattacgtgaagagcttgcagcaaacctagaagtgaaaacaagagcagcaagaactgctgaggttgttaaagaatccttggaggcacagctgtcttcagcacacgctgaaatgcacaaactggaagagatcacaaaacaactacagaatgaggtagaaaaggagaaggaattctcagcacagttagagatgaaaattgaagtagagagagctcgttctattgagtctgctaaagaatcattagaggaacaactcctgttagtgaactcggaagctgcaaaactgcatgacatggtgtctgcgcttgagcacgatgtggaaaaggagaagtttttttctgcagagctccagatgcagctagaagctctagaggttgtcaaaaaggtattggagtctgaggcggagtctgcacatcaggatgccaaaattctcaagcagaaggtagagtcattggaagcaaaactcgaggagcagatgtcatcagctgacgaattcactgagactttgcagtcagagaggatggttatagagcataaacttaaaacagcagacggggaaatattaaaacttacaaacaaggtgagcttgctccatagggagatcgagcaggagaggttgctgtcagaagagtatgaacagaaatgccaaaagctggaagctcagatgtcaagagatagccgtgacgcaaagctctggcgtcttgcaaattcgaatggagatctgaaggttaagaaggagaaggagctcgctaacgcagctgggaagctcgcagaatgccagaagacaattgcttctctggatcgtcaaatcaaatcactgacagatctcgacagtgtggtgctagagcctgaaaggcttgaatccagcagggacatgccactgccactggacttcagaaatggcgatgctgaatttgctatgtttgcggatgacttgggggctctcgactcttagcagttacaggagcaaaagagcaattagaaggtgatgaaaggaaggctgcccaaatgccatgctaacaaacagtccatggatgccgccatatgtgtaggtaggtcgatgtacattacagagactgattgttagatttgtgtgatgaacatccattccagcaagctcggtttttgtagcctgcttgatgaggtcttactggtggtcgtttgctgtaaaatgtaaacatggttatcttgtgtgattctagttacaggaaagcaccgagcaagtgcatatttagtgtccactagttaggtaccccgtactagaatatttaatttatttaaatatgaaggaagcatgtcacttatttctctaaatttacaacaatagttaggccctgtacgttgatacgatttctatatattacataaatatatcttattttaattagatagttgtttaaaca

SEQ ID NO: 24998 - DNA, 622 bp, Zea Mays
  misc_feature (622)..(622): n is a, c, g, or t
gttcagctggagacacgtagtggggaccagttcggacgtgccccacacgacgccacgtcaccaccccacgtcgtgtcgaagggcagcgccgcggcgggcgctcctcgaacctctctataaaccgcccactggacacggccactccattttagactctactccccgcttacgattcaagtcagcggtttagggttcgagatctcggcattgcgccgcggaagccatggcgacaagcacacttagtaccgtgaaggtgagcaatgtatcactgaaagcagcacagcgtgagataaaggaattcttttccttttctggtgacattgtgcatgttgaaatgcagagtggcgatgaactttctcaagttgcctacattacttttaaagacaaccaaggagctgagacggcaatgcttctcacggtatatttattgtctcatttgaaagttttggaggactcaaactatttttcatggattgatgattcactatctgtattatcgtgaaagtatggtatccatatgttttcttatttaatgtgttaataatcaatatttcagcaatgtgccattgtactgcaatttgttgccatgacatttttaagtcccaaccaaagactgtatccn

SEQ ID NO: 24999 - DNA, 1532 bp, Zea Mays
caggtctcggtagtaaaccacgcaagagaaaataaaatgacagagagttgtatgttgtagacgggcgagtgcgacgagcggagaacgtaatgccagcgctacaccgctgacgtgtccgccccggctccgggtgaaggtcaaaaggggcaaagggcggggggaaaccgtgggccctatatagcgggccttctcgctggagctaggagaaatcgccaagccaagccaagccagaagcggcagcctcgcgcagcggtctggtctctctggtgggtgcccctcttcgccggtggccggaaagggtagtggagtgggaccgctcaaggagaggccggcgtccccaagtctcacttccgccgtccgcttcccccctgggatcgagggaggaaggaaaggaggtgcttcacaatgaaggccctcattcttgtcgggggtttcggaacccgccttcggcctttgactctgagcttcccgaaacccctcgtggattttgcaaacaagcccatgattctgcaccagatcgaagctttgaaagaagttggggtcacagaggtggttttggctatcaactaccgcccagaggtaatgattaatttcttgaaggactttgaggataagcttggcatcacaattacatgctcccaagagactgagcccttaggaaccgctggccctcttgctctagcaagggacaagcttgcggatggatctggccagccattctttgtcctcaacagtgatgtcataagcgaatacccatttgctgaactcatcaaatttcacaagtgtcatggtggtgaggcaacaattatggtcactaaggtggatgaaccatcaaaatacggtgttgtggttatggaggaggcaactggcagggtggaaaggtttgttgagaagccaaaaatatttgtgggtaacaagatcaatgctgggatttacttactgaacccatctgtccttgaccgcattgagctgaggccaacatcaattgagaaagaggtcttccctcaaattgcagctgatcaacagctctatgcaatggtccttccaggtttttggatggatgttggtcagcctagggactacattactggcttgcgtctttatctagactcgattaggaagaaatcagctgccaagctagctactggagcacatgttgttggcaatgtgctggtgcatgagagcgccaagattggagaaggttgtctgattggtcctgatgtcgccattggacctgggtgtgttgtggaggacggcgtgaggctttcccgctgcactgtcatgcgcggcgtgcgtatcaagaagcatgcttgcatctcaaacagcattatcggttggcactcaactgttggtcaatgggcacggatagagaatatgactatcctgggggaggatgttcatgtgtgtgatgaggtgtacagcaatggcggtgttgttctcccacataaagagatcaagtcaagcattctgaagcctgagatcgtcatgagcaggctagtggtgagcaactgagtatagagctaggtgctccg

SEQ ID NO: 25000 - DNA, 2151 bp, Zea Mays
cagatttgaggatgtgggtggtgtgagtgatctggattaaaccatcggtgttatgggcagcggatgagggaggaaggttttatttcgaccttggatggaatgagaagggttatcttatgctgactagccacaataaattagaagacattgttcatgaattgatggggagcattagagcaattatcttggagttgcagatctgtacctgaagattcatattgaaatctggaagcttctgctgttgagtacagagaaatatttcttgccttttgaggaagactgcagagcccctaaatgtgaaacttgtttcttttcttgtctactcctgaatgctgacgaactcagcctctcacgttacttagctgaaggtcgtactggtacagacaccgaggatggagcaagcaacaggtgtaagtggtcctgaacacataattgatattccaagggaaattggtcctcctgcttcggtttctcgtagtgctggtagagagaaccatgaagaatcgaatcctgtggacaggccttcaacaagagctctagtacctgccttgcaggcaccatcagcaataggtgctgtacctattacagggcatacttcaggcactaggagaaatgacaactatgttcgtcggcacagaagcccattgaattctggactgtggatttcaattgaagttattgttaactttagccagattgttgctgccattgttgttctttgtgtgtcaagaaaggaacacccacaagctccattacttgagtgggtcataggttacactgttggttgttttgcaacgttaccccatctctattggcgctatatacaccgtaatattgtaaatggtgagcatgagtcatcacatacacctcaagggtccgctcataacaactcaaatgaagcgactcatgctgcaagtgcatcagaacgccgcagaaatgctgcccgaaatgctgtgcttgctaatcctaggatcaatgcgctgtttgaccacttcaagatggccctggattgtttctttgccgtctggtttgttgttggaaacgtgtggatatttggtggccgttcttctgctgctgatgcaccgaacttgtacaggttgtgcattgtgttcctcacttttagttgcattgggtatgccatgccattcatcctatgtgcaatgatatgctgttgccttccctgcattatatctattatgggttttagagaagatacaaacaatacaaggggtgcttcctcagaatctatcaatgctttgcctacatataaattcaaaatcaagaaacgtcgccatggttcaggcagtgaaactgaaggtcaggaaggagggatattggctgcaggaactgacaaggagcgatcactctctgctgaagacgcagtttgctgcatctgtcttgcaaaatatgcgcacaatgatgagctccgtgaacttccatgtgcacactgtttccacaaggactgtgttgataaatggctcaagataaatgcactttgccctctgtgcaaatctgagatagtgagctcgtctggtacttctgatgcccgccaatcagaccagaacaccgttcctgtgcaggagatcgaaatgcattaggttggtctgttcccgcagcttatcacataaggatacatctgatttgtggctctcaatcttcatgtataaagttggagattgatgtatggattgtagagacgcgtaggtttttttttgtatttaacactgctatcttggagaagttacagctattctcgctgtcacccaactatggcaagccaatactacccaggttttcccccatagcgtgggttgcaccttatgttctgctctttatgacattgcatgacttctttcgagtttctagagcgaaataggcagaagatgttggagatagtctaatcaagtggttgtagtgaaacattttcgtgcatgcaacttttgaaatactccctccattctaaactatactataggacggttggttttttctatatatatattgtttttgctatgcacttagatatatattacatctagatatatcatatatagttataatgtatttagatgaaattgtcttatagtttgggacttggaatggagggtgtattttcatgctacaaattgaagttaccgatatcagtttatg

SEQ ID NO: 25001 - DNA, 3259 bp, Zea Mays
gtagtgccgtgctcgtgctcgtgctcgcgaggtacctcgctctctcctgacttcccgcgtcggcgtcgccggcctcctcgtataagaaccgacatccgacacgccgccttcgcactcgtcaacctctccgctttgcctccctccctcgcgtccgcgttccctcccgcctccagatctcgatgcggcagcggctcccctgacagcggaggcgacgccggcaccatgtcctcctgcgacgacgaccacgcctcgctcctcagatcccacgctggggcctcgtcgccgtcctgcccctcgccgcgcggttcggcgggacatcagcaccacgccgacgtcgaggcggacgaggccaccgtcaccgcctccccgaggctcgccagcggcggcgggggtgtgcgcggtctcctgcgcaacctcgagcgccgcatgtccgcacgcggatctgggcctgggcgtcgccagcaccagcattatcagcagctcgatcgctccgtggcgatcgagtcgccgccgtctcagcggcagcgggagagagcggcggcgggggatgacgacgagctcggggacggggcgccgcccgagtgggcgctgctgctcatcggctgcctcctcgggctcgccaccggcatctgcgtcgccgcgtttaaccgcggggttcatgtcatccatgaatgggcatgggcagggactcccaacgaaggtgcagcatggctccgcctgcagaagatagctgatacttggcacaggatactgctgatcccggtgactgggggtgtggttgtaggaatgatgcatgggttgctcgatatatttgagcagctaaaacttgtgaaatcagggcagaggcaaggaatcaactttgttggagccatcttcccaaccataaaggctgtccaagctgctgttaccctagggactggctgttccctgggacctgaaggtcctagtgtggatattggcaaatcgtgtgcaaatgcatgctcagaaatgatggagagtaaccgggaaaggcgtattgcacttgttgctgctggcgctgctgctggcattgcttcaggcttcaatgcagcagttgctgggtgcttctttgccattgaaactgtattaaggcctcttaaagcagaaaattcacctccatttacgactgcaatgataatattggcatctgttatatcatctactgtttcaaatgttttacttggagccagaccagcttttatagtgccagcatatgagctcaaatctgctgccgagctaccattgtaccttatcttaggaatgctatgtggagcggtcagtgtggtatttgatagattggttggatggttttcaagattctttgggcacataaaggaaaagtttgattttcctataatagtgtaccctgctttaggtgggctgggagctggtatcatagctctgaaatatccagggatcttatactggggtttcacaaatgttgaagaaatattgcataccggtaaaagtgcttctgctcctggtatctggttgttaactcaactggcggctgcaaaggtagttgcaactgctctctgcaagggctctgggcttgtgggaggactatatgctccaagcctgatgattggggctgctgttggagctgtttttgggggttcagctgcttatttaataaattcagctttacctggtaatgctgctgttgcacagccacaagcttatgctctggttggaatggctgctacactagcttcagtctgttcagtcccattgacttcagtactgcttctctttgaactgacaaaggattacaggattttgcttccgctcatgggagcagttgggttggcaatatgggttccttcagtagtaaaccagccaaacgacagtgagccttctgggtttagaacatccagacgaggttattcttcaatgtcaccagaagaaagaaatggcagcttaaggcaaggtgatgttgtggatgatcttgagctcagtattatacaaactgacatgagtaactatggaacttataatgcagaaatgcttctggatgatttgaaggtcttccaggccatgtcaaagatatatctcaaagtgttaccatctgctacagtaacagaagttcttaatctgttgcatgatagacagcaaaattgtgccctggttgtggaccctgaagattttcttgaaggaataattacattaggggatatacggcgcatgggatatgggttacatgtggaaagtttcatcaatggagatcaccccaaggctgacgataactcttcttccatttcattgtgtcttactcgaggattccagtatcgtgggagcgaacgtggattgttaacatgctttccagatactgatttgaccactgcaaagagtcttatggaggccagagggataaagcaactgcctgtagttaagcgtggtgttgcccatagaactgcaggaaagcgcaggccgattgcccttctacattatgattctattggttgctgcgtgcgggaggaaatagagaactggaagaccatatatcagagactggcttgttaataatatgaaactacttggacgatatgattattcgtttgattgccgagggagaatattgtgaactgaaggtcatgtatcagcgaaaagcaggctttcctcttgtagcaattgtgcactgaaaaactacagtgcccttatgacaccacaacagtaagcaagactacaggacatctatgcgaaatgcagctagccagctacactgatgtagagatcattcaggcagtttaacctctatactgtatcattttgatttcacggtgatctgcaggggcaagcctgataaattctgcaaagacctcccattactgcaagtttcatgtggcatccctgctcgtaccacttatttgttcttgttacgacctggacttgtactttacgcgggataggaacgaagtacagacctagtgtaagaaggcggtactttttaccctcgtactgcttgtaaattgtaatgtgtagcatatattagagcatgataacttctgctgcatatattcgtcagtgtgatcactcaaggaatttgtgcagcagaattttgtcatgtcgatgttgtaagttgaaggatcacattgcttgtaaaatttggcagcatgttgtcttatcctcggatgagtatgttgttgtagaaacttgcatttggcctttgctctgcacactcttgtatgttgtgacgtattcaatccgttctgatttattgatcgttttaactttttcagat

SEQ ID NO: 25002 - DNA, 5543 bp, Zea Mays
cgcgcgctttgcttgtcgtccttccgcagcctccccagtccccaccggccaccggcatcaaggcatcaccaccaatctttcggaagttcccacgctgctctgagtgctctctcgtctcccctccccaaacccccaccccgacgcccagatctaccctccccatttacagcttcctctccggccccgcgccctagggcacggcgtcgcctgaacctgtcggcgccggcgcgatgcgagtaccatgctgctcgttatgcaacgtcagatatgacgaggaggagcggacgccgctgctcctccactgcggacatggattctgccgcgcgtgcctctcccgcatgctagcggcagcccccggagccacgctgccgtgcccgcgatgccgccatctgaccgccgtaggcaactcggtctctgcgctgcggaagaacttccccattctctctctcctctccacatccccctcatccccgtctttcctccactccgactcggggtcatcctctgacggctccgaagacgaggacgacttcttcgcgcgccccagtcgccgccccgcgcccgcgcccgctgccgcaccgcccggatgcagcttcttcgacctcgcctcgcacccggacctcaagctcgcccgtcgcatcgggagcggcccgcccgggcccgccgggcaggaggtgtgggccggcacgctgtctcgtggcggtggggtcaagcggtgcaagcaccaggtggcagtgaagagggtgcccctggccgcaggggacgggctcgaggttgttcaagaggaggtggagcggctgaggcgcgcctccacatggtgtcggaacgtgtgcacattccatggtgctgtgagggtgggcggccacctctgtttcgtgatggatcgctatgtggggtctgtgcaggcggagatgcggcagaatggtggacgccttacgctggagcagattctcaggtatggagcagatattgctcgtggaatagcagaactccatgcagcgggtattgtttgtatgagcataaagccgtcaaacattcttttggatgcacatggacatgcattcgtttcggattacggtctttcagcaattctgaagaaccttactagtaggagagtacctgatgactccagtgctggcattgatgctacactgcttagccccaattatacagctcctgaggcatggggaccactgaagaagtcactgaatatgttttgggatagtgcaaacggtatatcaccagagtcagatgcatggagttttggttgcacgcttgtggaaatgtgtactggtgctgttccatgggctggactgagtgcagaggaaatatgtaagtctgttgtaaaagaaaagaagccaccgcctcaatattcaagagtagtaggtgtaggacttcctggggagctgtggaagatgattggtgaatgcttgcaattccgagcttcaagaagaccatccttccaggacatgctgaaaacttttcttcggcatcttctggacataccacggagcccacctgctagtcccgaaattgattttgcaaatgaaaacttgcccaatggcatgcaacctccaacaacctccatcttagagatggttcatgataatccaaatgccttgcatcatcttgtatgcgaaggagatgctgctggtgttagggatctacttgcaaaagctgcatcagagagaaacgatagtttaatccgttctctcttagaagcacaaaatacagatgggctcactgccctacatttagcatgccgccgaggctcggcagagcttgtggaagctattgttgcttaccaagagaatgtagatatattagataaggatgaagaccctcctatagtatttgctttggctgctggctctccacgatgtgttcgtgcacttgtaggcaggtctgctagtataaattctaggcttagagaaggcctgggtcctactcttgcccatgtctgtgctcatcatggtcagccggagtgcatgcaggagctgctgatggctggagctgatcctaacgcagtagacggggaaggtgaatctgtgctgcatattgccgtggccaggagatataccgattgtgctattgttatactggaaaatggaggctgcagatcgatgggcatatcaaattctcaacataaaacgccattgcatttatgtattgagacatggaacacagctgtggtaagaagatgggttgaagttgcatctttagaggatatagcagaaacgattgatgtacccagccctgttggtacagctttatgcatggcagcagctcttaaaaaggagcatgagaaagagttccataaggtccaggattactggacaatcatgttcttccatctattccagaccctgttcgttctaatagtaaaattacttctacttgcagagggtcgagagttagtaagaatattgcttgctgctggtgctgattctacggcacaagatgatccacactgtagaactgcattacatactgcagcaatgatcgatgatgtggagctggttaagattatactggaagcaggagttgatgttaatataagaaatgctcaaaatacaaccccactgcatgttgcacttaatagaggtgcaaactcatgtgttggcttgcttttagcagctggtgcaaactgcaacatacaggatgatgatggtgacaatgcttttcacatagctgctgatgcagcaaaaatgatacgtgaaaacctggcttggattgctcaaatgctactacagccgtcacctgctgttgatgtgagaaaccaccgaggttggacactacgagactttcttgagaggcttccacgagaatggatttatgaagaattgatggaaacacttgaagataaaggagtccatctctcaccaaccatatatgaggttgcagattgggtgaaatttagaagaactgttacttcacctgcttttggctggcaaggtgcaggacctagaagcattggttttgtccagtctgttgttgacaatgaccaccttgctgtgtcattttgtactggagaagcccatgttttgacaagtgaagttatcaaagttattccattaaataggggccaacatgtgcaactcaagcctggtgtttcggaacctagatttggatggcgcggtcaatcacgggatagcattgggacagttctctgtgttgatgacgatggaatcttgagggttggtttcccaggagcttctaggggatggagagctgatcctgctgaaattgaaagggttgaagaatataaggttggtaactgggttcggattcgtccctcactgacggttgctgtacatggcatggagtcgattactcctggaagtgttgggattgtatactccatcagaccagatagcagtcttctattgggcctttgctatttgtccaatccatggctgtgtgaaccagaggaggttgaacacgtcgacccattcaagattggggaccaagtatgtgtaaagaggtctgttgcagagcccagatatgcatggggtggtgagactcatcacagtgttgggaaaataattgacatcgagagtgatggtctgctcatcattgatattcctaatcgggctgcgccatggcaagcagatccatcggacatggaaaagattgagaactttaaggttggcgattggattagagtcaaagcaacagttccttcacccaaatatggttgggaggatgtgactcgtaatagtattgggattgttcatagtctacaagatgatggggatgttggtgttgctttctgcttcagaagcaggctttttctttgctcggttgcagatgtcgagaaggcacagccatttgaagtaggggagaaggttcatgtgtcaccttccatatctgagccacgcctcgggtggttaagtgaaactgcagctactattggagccatatcaaggattgacatggatgggactttaaatatcaaggtttctggccgaaaaggcttgtggaaggttgctcctggtgacgctgagaggctttcagcatttgaagttggagattgggtccgcctgaaaccaagtattgggagcaggcctacctatgactggaatagtgttgggagaataagcattgcagtagtccatagcattcaggactctggttacttggagttagcaggttgtttcaggaatgggaaatggttaacccataatacagacattgagaaagtgcagaccttaaaaattggtcagcatgttcgattccgtgctggaatttcagagcctagatggggatggagagatgcgaaccctgattctagaggcgtcatcgctggtgtacatgctgatggagaggtaagggttgccttctttggtgtgcctggattgtggagaggcgaccctgcagatcttgaaattgagaatatctttgaggttggagagtgggttaggctgacgaacgatgtggaacaatggagatcgctcaaacctggtagcattggtgtggtgcatggggtgggatatcaaggtgatgcttgggatggaaccattcatgttgctttttgtggtgagcaggaaaggtggattgggccttctagccagcttgaaggagttagcaagtttgttgttgggcagcgtgttcgaatcagaggctgtatccgccagccaagatttggttggtccaaccataatcattcaagtatagggacaatctcatctattgacgcagatgggaagctgaggattcatacaccagctggtgccagggcttggttgatagacccagcagaggtggaagaagtggaggaggaggaagtctgtgttggggattgggtaaaggttaaggactccgttggaaccccagtttatcaatggggtgatgtgaaccacagcagcataggggtggtccaccgggctgatgatggagagctctggattgctttctgcttctgcgagaggctatggttatgcaaagcatgggaggtggaaaaagtgaggcccttcagacaaggtgacaaagtaaggatacgacctggtcttgtatcccccagatggggttgggggatggagacctacgcgagcaaaggcgaggttgtaggtgtggatgcaaatggaaagctgaggataaagtttcggtggagggatagactttggattggggaccctgctgatattgttcttgatgatgtccacttattgacggaggcttctaatggcttggctttttgttcataggcttgtggtattctttcgataccatatctgatatattgcacccatccattttgcagcatttcaaatttagcaaaatcttaacctgcagtggacttgcaagttgcacataactatcatcgcatcggcatgccagggtgtatttcatgttgataaccggggaatgagaagacaacgatagtgtagagctggtaaccatcacctagttttttcttctttggtttacatgtataattatgcctcctgacacctttttgggtttcagtgtatcatataccagtgtacaggttcggacctgaacattaatttaattgatagtggtcttgtatgtttacttga

SEQ ID NO: 25003 - DNA, 1829 bp, Zea Mays
ttccggcagagaggagcgcatcgcatcagcgtcaccaataccacgcgagccgtccccccctccttgtccatccccggccggcacgacgaaccgcctgaggagggagcaatagctcggggctctcgctcttggctgcgtgtctgaagctgttgatgcgagtgaaggctcggtttccatggctctcatggcggcggggatggacgaccacgacgagtacgccaagctcgtcaggaggatgaacccgcccagggttgtgatcgacaacgaggcctccgacgacgccaccgtgattaaggtagacagcgtcaacagccacggcacgctgctcgccgtcgtccaggtcatcgccgacctcaacctcgtcatccggaaggcatacttctcctccgatggaaactggttcatggatggtcacgttcaatgtcaccgaccgtgacggcaacaaggttctggacgcctcaaccatctcctacatccagaagacgctggaggtggacgactggtactacccgggggcgcacaacacggtgggcatcgtgccgtcgggggactacacctccatcgagctcacgggcacggaccgcccgggcctgctctccgaggtgtgcgcggtgctcgcggccatgggctacgcggtccagagcgcggagctgtggacgcacaacacgcgcgtggccgccgttgtgcacgtcacggacgccgagactggcggcgccatcgaggactccgcccgcatcgccgacatcagcgcgcgcttgggcaacctgctgcgcgagcacagcgacgtgcgcgctggcggcggcgcgggcagcctggcactccacaaggagcggcggctgcaccagatgatgttcgacgatcggggagtggaaggccacgccgcggccgcgccgcccgacggctcgctgcggacggaggtgtccgtgacgcatgccgagcgcgggtacaccgccgttgtggtccggtgccgggaccggcccaagctgctgttcgacaccgtgtgcaccatcacggacatggagtacgtggtgcaccacggcaccgtgagcgcggagcccggcggcggcgcgtaccaggagtactacatccgccacgtcgacggccacgccatccggtgcgaggacgagcagcagcgcctcgtgcggtgcctggctgccgccatcgagcgacgcaccgccgacggacttgagctggaggtgcggacgggagaccgcgcgggcctgctctcggacatcacccgcatcttccgggagaacgggctcaccattcgccgcgccgagatctcgtcctccgacggcgaggccgtggacacgttctacctatccgacccgcaaggcctccccgtggagaccaagaccatcgaggccatccgtgcacaaatcggcgaggccacgctgagggtgaggaacaacccgttcggtaccggggacgacgccgacatggccggcgctggcacaacggcgttcatcttcgggaacctgtttaagttctacaggccgttccagagcttcagcctcatcaaactctactcgtgatgcgcacttgggtagcaattttttcacatgttttagatagtttttactgtggttagctgttctgctctggagattttccaatagtgtgtaaatatggctatggatgatgatggcgatatatacggatacagtccagtgtaagtataagtatatagttaggcaaggttatgtagctgcattgcatggttaggaagaatgatagttttattgtagctctatagcttccaacaagttagtgtataacagcatctctttgagactctttatttttggctctctactctttattttggc

SEQ ID NO: 25004 - DNA, 639 bp, Zea Mays
acaaattcaaataactccaccggcaagtcccctccgccgtccttcagtaccggaagaaggcgaggcgcccaaccgagagcaccaggggaaaggaagtgcgcctaggcatcgacatggaggacttctacgtcacgatcctctacggcctgctgctcgtagccggcggcgtagccggctacatgaagcgcggcagcgccgcgtctctggtcgccgggggcggattcggcgctgcgctccttctcgctggtgcgctcagcgcctgggccttcgcgcacggcagaggtggcgctgccgccatctttgccaccgtccttcagatcgtgcactcgtactgatattttacgtgtacaagatatctaccggtggcaacaaggtttatatgtcggtgagtgccgagtgaatctgctgggcgtgtggtgttccgtgtacatgtttgtacggcagctaaatgtgaagacaacaaaatcatctgtgtatcaattgtattttagtgaggcaaacactgtaccaaacaatgatggcatgagttagttaagatgtggatgtggacacatgttcaatttaagctttttgatagtacttgttaaattgctgcaacttcctccatcaatgatgacacacgacacttcaaaattaaaa

SEQ ID NO: 25005 - DNA, 2326 bp, Zea Mays
cgcgattcccctcttccatcccgattcctccgcccgtgactccccgcgcccgcagcccccgccgccgtcctcgcgacctgcctaggacagctgtcacgcccgcaaatcacgtgaccatgcccttccatgtcctcgcgtcctccactccgcccgcgattcccctccccgcacccgcagcccccgccgtcgtcctcgcggccagccgaggacagccaccgcgcccgcaaatcacacgaccatgcccttccatgcccgcaaatcacgtcaccccttccatccatggcagtcgcgctccctctgcgcccttccatccatggtcgcggatccctacgcgccgcgattcttcccatacgctccctctgcgcccttccatccatggccgcggatccccgatgttgagatctgggagctgaagctggagatctcgcggatgcgggtgcggctgacggcggacgacggacggcgcaagaattgcggcggccggagctcccagtgctccgacggcaaggcccgcaggcggtagaaggcatccttcgcctatgactgatgcttcgctgctggcgtcgacagtggaggcgcgacaggcggtgatcgtggatggatgcggtctcagcgtctggaggatcggtcggagctaagcagggacggtggctgctgacagctgagtgatacgtgtatttctaggaagatcaagcccagagctgtcgcagagccagaagtgcatctacttccacggcaccgtcagcaaggacctcctcacacacaagttggtcatccagctctctaggaagatcaaggacgacatatgaagactggagtactttgaagtttgatgaacaacaaggacatcctcacgcacaagtttgatgaacagtcaacaaaattcttgagccagttcactccaacccaatgggacaaggatcagtggcatcctttcatggggccactgcggtccatccaagtgttgttcatttgtgttgtcttcatgatcgtggagatcaacacattcttccttaagcttgtgtcctgttgccgagttcctcaaaaggacaaagtcgttactgtggttcagtctctacttgaatgatattagtgacaagaggtcctcaaaatctacaccaagttatgtcagggactatatctccactcaactcattttaaccttgtacatttcaatcaaatccaaatacatgtgaaataaatgtagtaggttactctgaccagtgttgcgctcgcgcgccagcatgctcggactaaccaacgaaaaaggtgaagtgggatggtataccatttgcaattgacatttatggtttttgctacgctggcactcagtgtttccaaatatctattagtcaatgtgcgatcgtaccaaattcaacagggctctctacatatggtatgtataactatctcaatttgaactgcattctggtgggagtcgctcttattgtttagtaatcatttttctcaatgttatgtctaaccgtgttattcaattttgcaatatgcacggcaatttatggtgctatatctattataggctacctcatgtttggagacaagatgctctcataaataactttcaatcttctgaaagattcatttgcagcaaaagttgcacgatggaccacgataactattattgtcggtttctctgattcaattaagtgggaacccttggtagtgattcaattaagtgagaagtgagaaccctcattgtgctatttttttgtttcagggttgttatctatctttgtagccgaagaaacaatcctgagaaagaatggaaagctccttggctaggaataatgtttctaagtggaatcacctgggttatgcgagaagcacatcaatggattccactggtcctctgttagctggtaggagaagtagcagacatggctcaagtgagatgggggactgcatattcagctcaatgagacattttcttcagttggcgaatcaattactaggagaatttgttagatattaagattaatagtaacatgtattaattcaattttatataatcgttgtgcaccaacattttatttgaaagggagaaataaatcctagcaaaattgactatgggagaagggatataggaacaaaaatggaatatgggagagggaacaaactcatcggcctatgcgccttgattagaatgtctcctaaaagttttaggtattgaaaatatgataggacatttattgtaatatgtttattttctgaaatactaattttgatgtatagaatattgacaaaatcttcatgtcagtttcccttcccaagtaagaatagagcaatgcacttgttctgcccgtaa

SEQ ID NO: 25006 - DNA, 1058 bp, Zea Mays
acgaaaaggttcgcccgcccgcccgcaataattagccaaaacagccgtcgttttcagctttatctggctggctgctctcgcccccgtgcccccctccacttatgtggggcgagctgtgggagtcggtgaagggcgttctgcgggagtaccccaggctgcggctgacgcaggggcggatggtgctggaggtgcggcccaccatcaagtgggacaagggcaaggcgctcgagttcctgctcgagtcgctcggcttcgcgggctgcaccaacgtcctgcccgtgtacatcggcgacgaccgcaccgacgaggacgccttcagggcgctgcggcgccggggccagggccaaggcgtcggcatcctggtgtccaagcaccccaaggagaccagcgcctcctactcgctccaggagcccgccgaggtgatggagttcttgctgcggctcgtcgagtggaagcgcctctccaggctgagtcggacgcaatgagacgatcgacgcaacggaccaagctaactgatgcggccaagtgccagttagtagggtgtgtgtaacaactaacaagcaagcatgcgcgtacattattgcccaatagctagtgcgtgttcaattattaatataccgacctgccaagagcatgggtttgttaatcgggaacatatctggtgcaaatcaactcctctgtgcaaacatgcaaacttttaatctaggccacatgatgttgataaaatggacaaaggggcgtagataattttacacttaaccacccactactaatcacactttttcaaatccccctcccactccccccgcacggctccttggaccaacattatgtggttcagattataagttttcacggttacgcggaggagttgttttgcagcagatatgttcccttgttaatcaacgtggatgcatacaagcaaacccaagggcatgcatgtacgatgcaattattgcaatggacgcgaatcatccagtttctatataatttattatactgccatatcagcattttagtgatgtggtaagagttttaatgaggaaagagaaggaaat

SEQ ID NO: 25007 - DNA, 2556 bp, Zea Mays
gaaacagaaaagagcaggtcgacagttgaggtgttgaactcggaaagcctgaagcgcgcagccctcggaagcgaccgccccgccgcgctaccaccgcacgccccacctactactcccctcgctgtccctcgccgtcgccgccctgatcccgcgatgtcctcgtggctgcggagcgcggtgagcaaggccgtcgaggccggcggccgcagcggcgtggcccgcacggtcctgggctacgccgacgccgtcgcacaccacgccggccaggccgtcgccgagggcgccaagattatcaacgagcgcgtgagcactcagaacttcaaaagtgtgaagcaaacagtgaagcgattggaagaggttgcggtttcatcacgcagggatgagagagttcaagtgctaaggcgctggctcggagccctacaggaggttgaggctgaagttggaggttcgggtgggtctcagaggcagaatgtctcttcaagcgagccaaactcttcgaaaccatcattggccaaagttttgttttatgatgctgatattggagggcctcctatgaacttccgagatatattcctttatagccacgcacttgagggtattacgttgtccatgattcttgaagctcctaaagaagaagaggtttcccttcttctagaaattttcggaatatgtcttacagggggcaaagaagttaataatgctatagtgagcagtatacaggacctggcaaagtcattctcaaattaccatgatgaggtcctggtgaaacgtgaagagttacttcagttcacacaaagtgccatttcaggtctaaagaggaatgctgacattgtgaggatagattctgaagctctagatttgtggaagaaactacatgagaaggaggcatcacgagctcaatcaattggcgatcctgataaagttacagaaaagacttcaactattgagtctttcaaagaagcactcaacgaagtccgattttgctctagaatggaggaacttctattgaagaagaaaacaattaatactggggattccttagagatccactcccaaaaggttgagaaattaaaggtattggcgacttcccttgctaattcatcctccaaggcagagaagcgtattttggatcacagacgccagaaagaagaggctcttaactttcgtgctaaaaaggagaacgaagtgattgctgttgaaaaggatttgactgctgagatttctgaattggagaagcaaaaggatgaacttgaggctcagttaaagaaggtcaacatttcactgaatgctgctatttgtcgactaaagcagacaagagaagagagggaccagtttcatgaagcaaacaatcagatgatatttactttacaagcaaaggagaatgacctgtcaaaatctattgactcatgtaacatggaggccagtgtagtcaagacttgggtaaatttcctcgaggatacatggcaacttcagttgtcatacaatgaacagaaggaaactaaaacgaatgacgagctggagagatgcacaagcagttttctgaagttgaccaagcatcatctttcctatttcaaggaagttcttagcccgtcaattgagcggatacgcacatacgtggataatttggcagtcttaaactctagggaggagtcaatagaacatgaaggggatgatgagatttctgtgcagacaagtccacaaaagtcccttgaggaggaatatttggaaactgaaaagaagatcgtgattgccttcagcattgtagatcgcatgaagaagatgttttattctgagcaagcggctaattctaggcaagatgatgcagaggtcaggaccttattttctgagattgagaaactgaaggaagtgtttgagtcggtagaaaggccgacactagacattgaagtccgcaaggcaaaggatccaatgaaggacaagtctggatcgaatcgttcagccaaagacaaatctgaatcgagccattcacctgttcaggtgccctcttcacctaaagatgtgcccgtggagtctccgaaatctccagtgaaacctgagcagacgatggacccagattcagagtttgcaaagttagagctagaattcggaaaagttaacagagaccatgaggagataggcggttgggatttcgacgagcttgaagaggagctgcgagctgacctatctaaatcaaccaatccaaaataaccacgctcaacccgacatctctgaacgcgcattccacctaactttccttgtgctggcttcttctgaaaatttgtagactttgaattgttgaatgtacatagtattgttgtttcattgtgtccatggacgttctatagattatactcactacatgggaggtggagattgttacactgtagactgacatttcattagcttatttgtttggtcttgtcatgtgcattcatacatgaatgaatgaatgataaacattatgtagcattccacattttggacattggaacatatattaactataacgataaaatgctcttggtcttggatgtccctgccaggttttaattaagcaga

SEQ ID NO: 25008 - DNA, 190 bp, Zea Mays
atagaataaagtttgtaccatggacgatggccacgacgaacttggacgatggcaacgacgaacttggactatcgcaaacagagggtgcgactttcggcgttgcgaacagagggcgcacgtctagcatgcagaaaggaacaagcgatgcaaaaaggagaagcgagcaagggatgtggctcggttgttgtgg

SEQ ID NO: 25009 - DNA, 4844 bp, Zea Mays
tgttctgacgacagccattgcacgcaccagccagagaagttgaggttgcgccttctcctctcgggctcgggctcggtaggtatatgcctgcattcccattcccaaccaggtctggtctggtctgctccggtccggtcttctctcccgaccccgacctggcctcctccctcccctctccagcagagctctccctccccctccccctgaggtgaggtggctgaagtcgggggacatggtttctttctccgcttcctaagattcctcttcttccccccaacccaccacctacaccttttgctgcgccgcacctgcacggccgctccatgcgccgccgtatctcagtctcaggtcagcatcaccaaccgcagttccacctcccgaccccagccgcaatctaggaggagggccgccgctctcccctcggccgcatcgcatggtaaccaccaccagcagggcaggatgttcaagcttcaccgccaccgctcctccgaccgcgtcggcgagcgcttcgacttcagattctccaacttccgcgccgtccaggtccccgccatttcagacaggctcttcctttccatagtctccgtagacaatggaaaaacaattgcaaagtccactaaagtagcttctcgtagtggaatatgccagtggcccgacaccatcttggaacccatatggttctccaaggaccaagtctccaaagaatttcaagagtgccagtacaggattattgtttccctgggatcggcaaaatctggcattcttggggagattcttctaaatctctctaattttctgaatttggccgatccaaccgctatctctttgccactgaagagatgcaactctggaacagttttgcagcttaaggttcaatgtcttggcacaaaatctaagctgagtggtgtcagatcattgagggacatggctcctcgtcttgatgaccgtagtccaacgccaaccaatgacgagctggacaacaggtcagattgctctgatggtatgttcaacaagggtgttcattcttcatctgaaaatcatctgggtggaacttatcaagatgaatctggaaacatggaaacaggtttctcagcatcagggtcccatcggagttctaattctggagatagtactgcagatagaacaaacttctctcctagagtcaactctaatggagggctttttgtgggaaggcaggattctgctagttcctatgctagttatgttagtgccggcggtggtgatgatgggcttagatccaacaattcatcttttagttctcggacttcaggcccaaatttgctgcaagggagtactccaaaaacattttcgaatgacctttctcagttatctatgggggcgtctgactcatccaaagattttcttgaagctgctgaagaaacaattgaggagctccgtgacgaggcaaaaatgtgggaacgccactctcgcaagttgaaggctgatctagagatgctgaaaaaggagtgttctgaaaaatcaaagcaacatgctgaactagcagttgagctgtctgctgcacaagctgaacgggattcatataggcatgaaatagaagaattaaagtcatccttacaagatgtaaacacacgacagacaattacaggaacacctaaacgttcagactggatagacctgcagaaggaacttgaaggtgaggtgaagtttcttaaagaatcgaatacagacttaaccatacaactaaacaggactcaagagtcaaatatagagcttctttctattcttcaggaactggaggaaaccattgaagaacagagagttgaaatatctaagatttcaaaggtcaagcagactgcttatcctgagaatgggctgttagtaaaaaaagacagagagtgggctaagaaactgtcaatgaaagaggatgaaatcacaattccgagggagaaatcggatcgtgctctcaacattggaaatgcagatggtgcagcttccaatgccatttatcttgatttggagaaagaaaatgaaattttaagggctaaaatacaagagcttgagaaggactgctctgaactaacagatgaaaatttggagcttatatataagctgaaagaaaatggtctgacaaaaggtcaggttcctcatattgcaaacaacaatgagctgcaattcaaaaagcttacatcccggattcatcaactggaggaggatcttaggaataaggaaatgttaagagatgacagtttttctgagtcatcaatgtctaatgcagatgagatacagagaaaatgtgctgaccttgagctgaaggtgctaaattttaggtctcaaacctgtgagctagaagaaaagttccgaaaatgccaagaggagctggaacaaagaaatcttgagttatctgcgctgagaagaaagataaatggtttacattctaatgaactggaagtttgtgaatctggtgcgacatggaagtaccaagctagaatagcagatctagaggatactgaacctgagacagatacacttaaggctaggtttgaactgcagctacaggaaaatgatgaccttcgtcgttccaaggttgagatgcagaattttatttctgagtttcaggcagagaagagtcagcttgaggaacgcctgtccgcgtcgcttaaagaaagcagcatcacatctaaatgtctggatgaagtgcggaaagatatccttgtgctttccagcagtatagattcccatgtttcaaccaataaacttcttgagaggaacttagttgagctagagagctgcaaagctgaactagagttgcatgtatcggagctggaacaggaaaacatcgagttgtcagaacggatatctggacttgaaacacaactgacttacgtgacaaatgaaaaggagtcaagcgagctgcagttgcatgactccagatctctcatcatcaatctcaaagataaagtagagtgtcagcaatcagagatggaaactcaaaggctccagtttaagcagaaacaacaagaatctcaaagaagattgtgcgaagcacaagatgattctgaagttctgagaagatctaattgtaaactacaatctacggttgagagtcttattgaagagtgcagttctcttcagaatctaattgctgatctgaaaaggcagaagttggaattacatggtcatcttacgcaaaaagagcaggaattggatgagtcgaaaaaaaagaactttgagtttagcaaaacagtggagttccttgaggcaaaacttttgtcactacagaaggacatttcttctaaagaacaatctttattgtcagaattggagaatattttccaggagcacatggaacaagaagaaagaattaatcgcgcacatttcatgctcaataagatcgagaaagaaaagactcttgaagtagagaatcttgaaagggaggtcgtcagcctcgctgcacaggtctcctccacacacgaggagcgagaaagtgccactctgaatgctattcaagaggtatctgtcctgcgagcagacaatgctaaacttgaggctaatctccaagatgttagtgaacagctgagatgttacgagtctcaattggaagaccttcgtaaggagtctaaaagtaaaattaaaggattggttgattcccttaatgcctccaaacaaagcgaggaaatgttgacatcagatgctgaacatatgaaaaagttgatggaagctgctaaatccaatgaagatgcactaaggaagacttctaacgaactagaactgaagcttaaatccagtgattatgtgaaacaacaaatgctggaagaaatatctggcctgaaacttcaggttcagaaaataatgaatcttcaagatgaggtttccaaacttcagagttctcttgatgaggccaagttcgaaaaagggaaacttgaggagtttgtgcgctcggtgactgaggaatgtcaagaactaaaagcacagaaggctatgctaacagataaagtttcttatatgcaggagaccttgagaaatggtgaagaagaaaaccgaaacagaatagctatgcatgcaaagctcatgaggttggagagtgatctaacagcattagaagcatcacatgtacatgaagcagaattaaagaacgaactcagtaggatcaagagatcaaacagtgagtatcagaggaagatacaatctctcgggcaggaaaatgaggatctcactaggcgagttcaaattatggaaaagggttttgagcgaatgtcccacgctaaagagaaccttggaaagcaggagattggaggagataaccaggaagccatccagtcaacaattcagttactggaaattaagcttgcagaggcattggaggaaaataagatatacagagctcaacagaagagttcgatgtctgaggggcaacctgctggtggagatggcaaggagggcaataccgacaggattttgcagttggaaggagagctgagagatatgaaggaacgattactcaacatgagcttgcagtacgcagaggtagaggctcagagggaacggttagtgatggagcttaaagctatcaagaaaggcaggtggttttagcaggatgcggagttgttgcctgacataaaacatgaggctgacaccacaggtgggcatcatcaagccgtgctatgctccagcaccagtgagactaagagcaagcaagtgcaagtgcagagtcagacagtgatatagcctggacgtgctaactggtgctggagcatgtgtctctcactgaagctccgtatgatgcggcttataccccccaactcagtctattgagctctattgcctatttcaactattagaggatctgtatgagtgaggaagag

SEQ ID NO: 25010 - DNA, 1417 bp, Zea Mays
atttcatcttctccgagcaaggaatccgctgtaaaggatctgccaataaagtctgagaagagcgaatcccatctccgattctagaatccgcaggcgacttagcagatctggagacatcgattcccagtaggccccccagagaagacgataaaccatccccacaaatctgaatatcttgacaagatttgcgaattgccggcttggagtggtgcggatggcaaggaacagacccccaaaaacttaccgccgttggagagtgctgccagagcggccctaccggatcttcaaaataaccattgtcttgcttcacgggaagacgaacgcggaaggcaggagacgaaggcggcaccagacgagtaaggccagccccaccagatctgaggagaccgaaaagctggcggcgccgggagaaggagcggaggccccgccgccagggaagtcggcaccgcgagcggccgcgaccgcccgaccgtcagtcttgcaccgcatgtcctctgtaaattgaaggtagagctgctcgctccggccgtgacgggcaccaagaacgtcctgaaggcgtgctcggaggccaaggtgaagagggtcgtcgtggtgtcgtcggtggccgccgtgatggtgaaccctggctggccccagaacgaggccatggacgaggcttgttggtccgacgtcgaattctgcagaaccactcagaactggtactgtctctccaagacactcgcggagctggaagcgcttgattacgcaaagaggagtggactagacgtggtgtccgtctgcccgtcgctggtgatcgggcccttgctgcagtcgacggtgaacgcaagcagctccgtcatagtcgattgcttgaaaggagatcgtgaggtgaagctgaagctgaggaacttcgtggacgtccgcgacgtcgccgacgctctgctcctggtgtacgagactccggaggcgtctggacggtacatctgcgacgcaaatgcaaggcagatgtctgaggtcgtagcgctgctcaaggactggtaccctgcctacagtcatgctgccaccaagttcgtgcaggtgagcgatgagcctttgttcagctccaagaagctgcaggcgctgggctggaaattccggactctggaggagagcctcagggacagcgttgaatccttcaaggcggcaggtgtcctggtggattgaacagaacaggcagcgccctattcctggatgaccttcgcattttgtaaaccgaagttgctgtcttgtgcaagagcatcccgacgtcctcggataatgtaataaaaaaagcaaaagcgacaaagtttgccgtgtattatagcggcattgttacttaacgctgttttattttgtggaaatacttaacggtgttttagtttaatgccttgttgcttttgaaacatatgagaaatggtgg

SEQ ID NO: 25011 - DNA, 534 bp, Zea Mays
cccattctctcaccagagtacgaactacgaagacccgacaggccgacacccgctcgtctcccctcgcacgtaggcggcgcaaccggaccccctccccctccagatcggtgctccgctgggagatctcctcgtgcaggcgccgaatctcttcgtcgtctcttccaagcacggttggcagcacaatagatctgtttgcaagcattctttggtactacttcaaggctttgatgattgctttacagcgccgatatggcctcccgcccaaagctgtctggtattcagaagcaggttttggcgctgtacaggggattccttcgaacagcacgtcttaaggcccctgaagagcgccacaggatcgagtccgttgtcttggcagagttccgtgacaaggcaaagagtgttgaccgtaggaactttatacatatcgagtacttgttgaggagtgggaagaagcagcttgagcagctcaagaatcctgatattactggacttgctacccttgtagtaaagaaatgagctgttctagaacttggc

SEQ ID NO: 25012 - DNA, 6674 bp, Zea Mays
gaaaaacattgcattcccagtatgagcgcttgcaacctaaggctcgatacaagcttcagctggatccaacagtggaggaagttaagaagctttctaatacttgccgcaaatatgccagagaagagagagtccttttccattataatggccatggtgtaccaaagcctacatcaaatggtgagatttgggtgtttaacaagagttacacacagtatatcccactttcaattactgatcttgattcatggctgaagacaccttccatttatgtttttgattgctcagctgctggaattattgtgaaagcctttctagagcgcctagactggagttctacctcctcggcatcttcgcagaaggatttcattcttcttgctgcctgtgaagcacatcagacgcttccccagagtgcagaatttcctgctgatgtgtttacggcttgcctcacaacgcccatcaaaatggctttgcactggttttgtaagcgaacatcactccatggtcctctggatcgttctcttattgaccaaattcctggaaggcaaaatgaccgtaaaacacttcttggagagctcaattggatttttactgctataacagatactatcgcatggaatgttcttccacgtgatctgttccaaaggcttttcaggcaggaccttcttgttgccggtctcttccgtaacttcttgcttgctgagagaatcatgcgatctgcaaactgttctccagtttcttatccgttgttacccccaacacatcaacaccatatgtgggatgcatgggacatggctgctgagatttgcctttccaagcttcctcagttaattgctgatccaaacacagagtttcagccaagtcctttttttatggaacaattgatggctttcgaagtttggcttgatcatggctctaaggacaagaaacctcctgaattgttacccatagttcttcaggtcctgcttagtcaaccacacagatctagagtgcttgttctgcttggaagatttcttgatatgggaccatgggcagttgatttggccctgtctgttggaatatttccttgtgtgctcaaactgcttcaatcaagtgctatggatatacgtcaaaatctagtgtttatatggacaaaaattctctcccttgataagtcatgtcaggttgaattggttaaagatggaggacatgcatattttattaagtttcttgacagtttggatgctttcccagaacagcgtgcaatggccgcttttgttatagcagtcattgtggatgggtataggatgggtcaagaggcttgtatgaatgctgggcttatggatgtttgcctgagacatctgcaacctgagaattctcatgcacaaacagaacctttgcttttgcagtggctttgtttatgccttgggaaactatgggaagatttccctgaggctcagttacttggtctgcaaacaaatggaccagaaattgtaatatgcttattgtcggagcctcaacctgaggtcagagctgctgctgtttttgcacttgggaatctccttgatactacatcaaatagtcatgatgatggttccgatgatgatgaaaaggtgaaagctgaaataaatgtagttcgaagccttctgcagatctcttcagatggcagtccccttgttagatctgaggttgctatagcgcttactcgctttgcgttgggtcacaacaaacatctcaaatctgttgcttccgagtattggaaacctcaacccaattcattgctgaaatcactaccatcgttggcaaatataagtaatccaagcaatgtttacagtcccaacaatattctacaaggcaggattggtcctgtgttgagggttgccagtgatagcggtgccgctggtcgtgatggaagaatttctacaagcaacccaattgcaacaagtagtatcatgcatggctctcctgagtcagatgattcttcccaacactcagattcaggcatattactgagggggaatgcaagtaatggtggtttcagctacactagatcgaggcctgttgataatgtcatttattctcaatttatatcaactatgtattctgtttctaaagatcctgacccaacaattgcaactattggtcggagagcactgtcccttattggtgttgaacaagtggttatgaaaaatactaggtttaacagtggcggttcacatcgaggagagacatctgcgtcaaattttggaatggcacgatcttcttcctggcgtgatatgaagtctggaagcatcttgatgaaatttatgacccctcctgttagcccccctcagcatgattatcttccaggattacgccgagtgtgttctatggagtttggacaacatcctataaatccccccaatggcttagctgatcgccttttaagctctgctgcaggtcccagtaatgcagaaccacttccccaatcaacaatttacaactggagttgtgttcaattctctaggccagttttaactgtctctgatgataatgaagaaaccaatgctagaagagaagagagagaacaaatcgcactagattacatcactaagtgtcagcgctcctcttgcaagatgacaagccagattgctagttgggatacaaagtttgagttgggaacaaaagcagctttattgttgccattttctccgattgtcgtcgcagctgatgaaaatgaacaaataagagtgtggaactacgacgatgcactaccagtgaactcttttcaaaaccataagttatctggcagagggctatctaaacttttgcttataaatgagcttgatgagagcttgcttttggctgcctcaagtgatggaaatgtacgtatatggaaaaattttgctcaaaagggtggagagaaacttgtaactgctttgtcatcagttcagggacatcgagctgctggtcgcagtattgtgattgactggcagcagcaatctggttatctgtatgcatctggtgacatgtcttccatcttggtatgggatcttgacaaggaacaacttctcagcaccattcagtcaactgctgatactgccatttcttccctgtctacatctcaggttcgctccggacactttgctgctggttttgctgatggttctgtcaggatatatgatgttcgctctcctgataggttcgtctatgtggccaggccacatgccccaagaacagaaaaggttgtgagcataggatttcaacctgggtttgatccatacaagattgtaagtgcatctcaagctggagacatccagtttcttgatgttagaagggcagcagaaccctacctgactattgaggcacacaggggttcacttacagcattagtggttcatcgttatgccccagttgttgctagtggctcagccaagcaaatgattaaagtgtttagtcttggtggggagcagttgacgataattgggtacctgccatcttttatgggccaaagaataggcagtgtaaattgcctttcttttcacccatacaagtcactcctggctgctggtgctggtgacaatgctctggtctctatctatgctgaggaaaattacaagtaagatgaggccttatatctcatgacaatgcagccacagtgcaatcggtaggccttacattttttcggccaagtgatgctccacagcatggttcagcttcaagatccaagatgacggtaagccttgtcacggagatgtcgacggtaccgtggctctcggtgcatattggctgttggacggcgtgtgcggtttgtaagatacagtcaagattcattagcctccttgcagaaggtttgtgaaccctaacctgatcctgtcattgaactcggaggctccccccagcccacccaaataattagccatacctaggctataaccaaaatgtaaatagccagcgcattcgggttgtactttgccagcattcaagtgtaaaaaggtctgaagatggttgatgtgataaacagggcttggtaggggctgctgcctgggcaagtggggttgtgcatatgggcccaggtagtagaatggttgcagaagtctgcccacagatgttgaagagaaaagtgtatttgtccagctaaaatatggcgttagatgggggtagtattggcctgcatgaatgaatgaatgaatgttgagtcatttgcattgtaattgtaacccttggatagatgactgcccgcttgtatatatgagtcgtgtttgtacagttgtctgctttctgtccccaagttgtaatccgtccaatgatgtgttttatgctggtgcattccggtagagatgaaccggaggtgctggaacatataggtggtcttgtggtctgtaactgtaatggatatgtgaatcttaatatgagtaattgattaccgccgcgtcctggacatggacaatacctgcatgcaaatgatcagtagctgatttacggcatactgtatgcagacatgcagtagctggtctggtgcattattttacagcgacggtgtctagggtgaggaattttctttgggaaatcaaggatcaggtccatattgtcatctctagtccttgcgagaggccctcaccggcggcggcgagtcaccgccttctgaggaagaagccactgtcagacacaggcgagggagtaaggattccccaaccccaaccccaaccccaaccccccaagaagcaccgcacagaaccctctgctcctctcaccctcacgctccaaggcggcggcgccatgcacggcggaggcgcggcctcgcccgatgccgccatatgcatctccccagaagctgggcccatcgtcggggtcgcccccgccgggatcagggtcgaaaactgctacgtgttcaagagccggctgcaggagtatgctcagagggttggcattccaaccccggagtaccacacgctgaaagaaggcccatctcatgaacctgtcttcaagtccacagtgttcgttaataataccaagtatgagtcgctgcctgggttcttcagccggaaggctgcagaacagtctgccgcggaagttgcgctcatggagatagccatgtccgctccggtgaccgaaattaggaacatgccagcagttcaagaaactggcctgtgcaagaatctccttcaggagtatgctcagaagatgaattacgccattccatcttatatttgcactaaacaagcttcgggtgtagctcctttcgtatgcagtgttgagattggtggcatcctatacattggtgctgcagctaggacaaagaaggaggcagagataaaagctgcccgaactgctcttcttgcaatccaaagtcaatcagaaggtggtgcaaatggtgccaaaaagtacattgttgttcctgggcaaaggccagataaggagacgaataaaaatccaactgaaacccccataccacttagagtcaagaagcgtggttccaggaagaaatggaacaagaggaaattcaggaggatggctgaccgaattgttgatgctggaaaggatgcagaggggcttggaacgcttctacatgatgactatgaggaagctagaagaataggatatgagttacctacagatactgctatggttcaatttaacaaggaagttgtaatgacacaacctggtgaaggagataggatagtacaattggagccacccagagatcctgcagaggtccaatataacaaggaagctagaagtgttgaacaggacccacccagagatcctgcagaggtccaacataacaaggaagctagaagtgttgaacaggacccacccagagatcctgcagaggtccaacataacaaggaagctagaactgtcgaacaggacccacccagcaacacagaagtgtggaagcctgacaataaggctacaactacagagcaggagtcggtgagcgctttcatagcattgagatctaatggggattctacagatgtggaggcggcaccaggcgataccttgatgatgcagggccaggagtcggaagccacaatgcaagaagcatctcacgctggtgaacaggcccagcctaactaggaacctgaaagcaaaaaaaacttcctgaacaggaagaccgaaatgtaggtcgaatgcatgcattgctgtaggagaataagtccactggaggtacatgagcctaaaataatttgtggagtggtggttgactccagtggtaagtgccttccagagtgtaccggcatgcccaaaactgaaatttccggtttagatagaattgggggcgcggaagagggtgccatgtgtgtgtttgtgtgtgttgcctgtggatggaggaattgatgggagtatgtgaactgatgtagctagtctatgtttgttaccattgagggcttgttcggttagctctcaatccatgtggattgagcgggattggatgggtttgaatcccaaacagctcaaacttcttcacaattttttccaatcccatccaatccatgtgtattgggaataaccgaacaagccctgatgatgattgtgtttggccatgttttcactgtcatattggttggcgaccgctacttgcatgcacaatgcattcgaggtagccggtccaagcctccatttggtcactggatgattgcttaaatgatgtttgagttctcttgtgttaaattattaatgcacaaggaaaataaaaacaattgcaaactgga

SEQ ID NO: 25013 - DNA, 6555 bp, Zea Mays
ccacctcactcctcgccgcgcgccgcctcgctccccaccgccgcgccgcagtagggttcgcaagcccgcagcagagcgcgtaccgcaccctgccccccccccccccccccgctctgtccaccccacgccggcctctcgctgccgctcgccgcaccgcacgagaggcgagatcggcggctcccagattcgtacccgggccacagtccctcctcgccctgcgtgtcggcgccgcctccacacgcccgcgcttcaccagccccgacggaatctctcccggaggcgcgcgattcgccgcggggatggtacggtagggccgcagtcgctagggtttccgcgcccggtgccgccatggacgccgagccccgccgggagggttccgatcgggcgcccgccgccgactcctccgcggcgccggacggtgacgaggcgatggcccgtggcgtcgctgctgcggagaagcctacagcggccagtgaggcgggggctggtggagacgtcgcggcggcggagcgtgggcgtgacggggagacgccggctggagatccgggggtggtggctgacgaaggcggtgctgtgggcgaccagtgtcctgcggcgcctcaagcgagcgaggtggacgagggtggcgccgcgggcaaggagcggtctgatggtggtctggcgaatggggcagttgagggcagcagcattgcgggggaagtgccagatgtggctcctgtggtatctgaagcacggatggacgaggacgggggttgctccacaggcaatgagtactctgaaatgaagatggaggtggatggcggctgcgtagcagaacgagagggcgatggtcaggaacaggaacaagagtgcactgcagctgctgtggaaagcgaggttaagacgggggaaggtgacggcggagtggtgaatcaagggactacggcacatgctgggggtcttcaggttaaagaggaggtgggggaaggcttggtgggccgctacattggacgtagcgctccagggcgcacgaggattcttattgggaaggttgtgtcctatgatagcacagctggggtctacagcctggtgtttgaggacggacacgctgaggagctggggcttcctcagctccaggagcttctcatgtcggatgataatggtgcattaggcatgaaggtgagctgccggaagaggaagctagacttgctggtttcatcagggagcgccttggaggtcaaagagccaccaagtactaggcagagggttgatggatgcgagatgtctgccaggcctgatgagctgcagcatagtgcgtctggctcggatatgtctgaggatgttgagtcttcgagcaattcatcagatttcactagagaagaaacatctgagccatgccctcctgtacaggctgtggagttgcctccgtcgtcaggcgacattcctgtgccagaagagtccataagttctctcctctctgtttataacttcttgcggtcgttcagtgtgcagctgttcctgagtccatttggactggacgattttgttgcggccattaattgcagcgtgcagaataacttgttggatgctgtgcacgtctcgctactgcgggctctgaggcggcatcttgaatctagatctgcagaaggatctcgatcggcttcaaattgcctgaagtacctggattggacattactagacgcattgacttggccaaatttcttactagagtacctgtatgtgatgtgttgcattaaaaatctaggggggaagagctttggtagaagccttctagtcgccgaatactataaacttcctgttaccatgaagttgagggtgctgcaaatactctgtgatgatgtcattgaatcagaagaactcaaaactgaactggaaaatcgagtaggctacaatgaggagatggagtatgagatagaatctagtgcatttttggaggctggttcaagatcagtctcaactagagcagcaaaggcctcagcttgcaaaaacacgaatgatttccataatcttctcgaaagtgctccaaatgtaacaaatcccgaaactgctccagcagtcctgtctcaggatggcaatagtgatgattgccgaatatgtgggatggatggaactttggtatgctgtgatggctgcccgtgggcatatcattcaagatgtattggtcaaaacaaagctttccttcctcagggtgactggttctgtccagaatgtatggttaacaagcttggcccaacttcctcaagaattgagcgtggtgcaagaggagctcaaatgtttggcattgatatgtgtgggagactattcttaggaacttgcaactatttgctggtgatcgaaacagcttcagatgcagagtcttatgcaagatattacaatcagtatgatgttgccaaggtcctccaaagccttgctgtctcagatgcatatgtggacatatgcaagcaaataaaggactactggaaacatttacttggtataattcataacgagagatcaacaacaggtaaagaagttggtgcgaaagtagcacttcctcaaacaaacgcgcagcagaaatttgtggctaatcagagcgcaatgtgctcagtcgaatgcctggaggaacaaaaatgcaagtcaagcttaggtgttgtcactgagaaaaatgctgaagttttcaagcaaactgtgtcagctcagaacaacatacataatgcacacagaaatggagcttttggaccatctgtggtatcctcagtttctcatcagaatggatccattgtaacaggtgggtctaacatagcacaggcgcagccagctcagagtattttccatccagacccatccaccgtttctgtgacgtcaggatcattttgtccatcttctctaggtaaacaccaccttcagatgtttccggaaagatctggaaacatgagtggtgtcaaggcagcaaaattgtcttcttttaaaccacaagcttacatgaacctctacaatcatggcaatattgcagcatctgctgctgccaatatagctgttattacatccgatgacagtaaagtttcagcatcccaactgactgcgaaacaccggaagaaaatggctgcagacaatgctctacaattgaaagcattttcttcagcagccacacaatttctttggccgagtaccgaaaagaagcttatggaagtcccaagagatagatgtggttggtgccttgcttgtagaagttcagcaattggaactaaaaaggcttgttttcttaacatggccacttcaaatgctgttaaatgctctgctcgaattcttagtgtaatgcgtgtaataaaaaattctgatagccactttcctagtattgttgcttatttagccaacatggaggaaagtttgcgtggcctcttggttggttcactacaagatatgcagcagaaagaaaggtggcatcagcaactacaagaagcttcgaactgcagaactgtaatacccctcttgcttgagttggaaagcaatatccgtggagtagcattttctgcaagttggttgaagccaatagacgattggcctttggaatctcctggtccatcaacgggcgcatctcgtcctgcacaataccaaaaacgtggggttggtggaaggcgtggcagaagacgttcggttgcatctgaatctggtactgctactgctactgatgaggacaacagctggacttggtggactggaggaaatatttcaaaacgtactttgcagaggggggctcttctacattcaaccagaagaaaagctgctcgccaagtggatagcaggtttatcttaccatgaaggttccaaatttccaaggcgatctcggcagtttgtctggagaggatgtgttggaataagccagacttcatctcaacttgctttacaggttagatatcttgatgcccacatcagatggaaggatttcatccctccagatcatattccctcagatggaaaaagttatgatgctgatttttctgctctcagaaatgctgtagtctgtgataaaaaaataattgataataagataagatacgcacttaagtttcgcaaccaaaagcatcttcctgtgcgtgtgacaaaaaatatcttggaatcagaaggtgatcaggatgaaaatagcaaattgtggttttctgaaaaccatgtgccattgtacatgctgcgagaatttgagctgcacgctggggataactccttgcctactccaggaatttcagactctaactgttttaccaatttgtacccacgacgagtaaaagcatatgctggagatgtcttttcctatctttttcacaagggagaagtctatccctgcacctcatgcaagaaggatgtcatctacagggatattgttaaatgcaacacttgtcaaggtaattgtcataaagagtgtacatcaagttctgttgttagcaaaggaagcagtgctacttccagtttgatatgcaagttatgccttcagaagcggaatcttatgcttactagctacaatacaaatgcaagctatatccagcctcaacaaaagggtaatggccaacaaccagtgaccgctctcagagttaagtttaaggttagttcttcccattctggtgaacctgctcccaaagtcgaagcccagctagtcgcaagcgttaaagcacagccatctgcgaaggtggaagctcagtcgagtatgaatgtgaaagcccggccagttgtaaacgtgaaaacacaaccatttgcaaaggtggaagctcagccaattatgaatgagaaagtccagccaactgcgaagatggaggtgcagccactcgcgaagatggtaactcagaacatcactggtgtccaagctctgccaaagacaaaagctaaaaagtcaaagtcagaaaaagaaaagaaacctaaaaaagttcaagcgatcacatattttggtctcgtatggaagaaaaataagactgacaaggatgatggaagtgagttcagggcaaatgatgtaatccttaaaagcaaggatagtataggttcatcaataagaccaacatgctgtctctgtgacaaagcttattctccggatttcttgtatgtacgctgtgagaggtgccggaattggtttcatggtgatgccttgcaacttgaagaagaaaggattggtgagttggttgcataccggtgctgtaggtgccgaagaagagccataccacattgtcctcattctgatggttatacaaagcctgaaccagaattaagtgaacaaacagttgctgcatcatctcagtcaactatgctatctagtgaggacacttatgctttagcagatcaggacccactgcttgcttcttacgggatagttgaaccgattggtgatgatacaatggatgttggtttgtcaatgaacatgtcaagctttgcccctggaagtaaccagaaactgtctataagaagagcacaagcaaaaagtactgaatacattgaccaaggtggaagacctgtgagtgagtataatatccaaaatcaacctccagggattggaaacatcaatctcagccacacgaatgaaatttctttttcagaggtagacagtgttgatgcttcagagctattggggtgggatttaccccaaggagctgcatatgctacacctcttgatttcactgctaatcaccagtcgaatgacacttgctgtggcagctttggaatggacgagtatgagccccagacttatttctcgttcaccgagttacttgaagctgatgatacacagcttgacaatgcctttgggatgtctgctggtctgcaaggtgattgcaatggcacaggaagctttgttcaacaaggagatggtttgtctttcatggtagaagatggagcttcaaatatgaacttcccaacaaatgatcccacccccgatgaggtagcgtgcagcaagtgcatgcatactcagccaccacctgatctcaaatgtgctgtctgtgacctgcacatacacaggcagtgctcaccgtgggatcaaggtgaagaacctgttgacagcagcaattggagctgtggtggttgccgggagtggcgatgattgacttctgaacttcattgcatctgttaatagtgccagctgccggctgttatcacaaggtgggaggtacatcgcgaagtgcgacgtggatctgtaggaaaaatctccaccaagctgttacgcagtgctaattgttgttcggatgctggggttggttatttgaccaaagtttaaccatcatacagttacaatagcaatgactcctgcgatatttacactgtacatactaaagaatgggtcgacgaagaccttttgtcattctttaggctgcttgtgtgtgtgttggtggggggggggggggggggggcgtagagataagggaggatgttgttatcaccatgtgtgtggttctgaaaaccatattcatgaagctgtgttaccttgaattctcgtgctgtctttcagatagaagtgtcttggtcagaggccatttctacgcatatgcatctttgttcgatatattttctccagctttgaaatcattatctcaatatgtgagaaat

SEQ ID NO: 25014 - DNA, 2500 bp, Zea Mays
gccgggtgggaagtgggaactgcgagcggaagcgcggacgtgtgatccgtcttctgagtcctgactgctgtctggcgtccctaagggtagagagaagttatagcctttcctccccgattcaccccccgcgtgttctcgacgaccgggcgactgccgccaccactctacgccaggtgttcgtcggcgatccgtaccaatcaggagtcaggacaacaattatggataccgtgatctacaaacatgatgacatttcccaagaaggaaccctgccatttggagagacaatgaacatgggaggaagcaatgtagaaattctcacaagaatagagctcgatattgcatttgcctccgagaaattattaaatttggagatgctggtgatggaaattgctcgtcaggctactgactttgagccttctacgcttgaagatgagtccatttcttctgagatcgcagagaatgctttggaattggacatcttgtatggtattcttgatgcagaagtcaaggagctacataacttgattagttctctccaagctgatattaaaagtatagagcatgaggtttatgaagaagagtctggaggcaaggtaaaaactagaatggatgcagctaaattgtccttgaagcagatgcaagagctaattgctgatattcagaatgaatctgcaaagtttgagaaagtcgttgagttttcccaggataaggaagggaccattgaagctgttggatgtgataatgaccatctgtcatatcaaactggtgcgcagacagaagatcaacacagaaatgttttacatatgttagaacaatccatagcaagtgagatagatcttgaaaagaaactctctgattccatatctgtcatagaagacctcaggctgaagctccatcatcaggaagaggaaatctatttccttgaggaatcaactgaaacagtttcaggtagaatgtttgaagcagaaaacgcttcggagctactttttggaacttcaaaggaacttataaataggcttaataacatgcagtttcatgtaagtgaacaaaaatgtacagaagatgatctcaagtcaaaactagaacaaagcttaacaaaattatcttttctggaaaatagcccagagaaggtggaaaaaggaagtaacaaagctggagctggatcaccatcattgcaggataaaatacaagagttagaaaaacagttgaatgaatccaatttgcaactgcaattagcactggcttcagcagaaacaaagcaggaggagcaaaatgcattgcaatctgagctgaacacattggaaaacacaattaagaatatcaaagatgatgtctcacgagcagaaagcagagcgcaaaatgcagaaataaggtgtatggagctaactgtagctaatatagagcttaatggggaactaaatgcccttaaaagcgagaagtcagataaggccagtcttttggagaagaagcttacagagtcaaatacccaattagagcatgcaaaggcagcggttgatgccattgttgaacagcaaggtatgctgaaatgtacgatgtctgatatggaacatattattgaagatctgaagggtaaagtttcaaaaactgaaaccagagctgagtgtgctgagtcaaaatgcacactgttaacagacacaaatttagaacttagtgaagagctagcatttctaagaggtcgagtagaaagtctagagaactcgttacgtgaagccaaccatgcgaaggtgtccactgccaaggacattggtgtgaaaactaaaattattactgatttggtcagaaaattggcactggaaagagaacggcttcatctccagattgctacgttgacaaagaagaacaagatgttggttaaaaaacgtgcagagggtattaatggtagcataaaaatgagcaaaaagggtacttccaatcatactgaattccagtcaactcaaaaggctgaggaaatatgtccagattctttgccatcacaaactgtggtggagaaaccatcagatccaattgacaatgatgaatctaagaatcagagtgctgatgtttccacttcagaggatgattccatacgggaggacattcatgagacagtgtgcaccatagagccatcgctgctaaaccggaaatatatttttatggcatttctagtgttgttggctgctgccgttgtattcttgttacatgaagacggcagcccagcatgatagtatgattttgctgatgcagtctacaactctacactgtcacctaaacatctaggtcgtttactcccacttctttgtctgtcagttggggagcaattttgtgtattgtattgtagatttgtgctagactgctcgtgccttcaacttggacccacccggcatttccattgttgctttgcggaggaaataatgttagataacgaaaatgttttgtaactgtgtttacttgtcagagtgaaagaatatgcagcagtctttttttcttgtggaatatttac

SEQ ID NO: 25015 - DNA, 3831 bp, Zea Mays
tgattacggtggcggtgggcggtggccacggttacggcgtcctgtcgagtgtcgacgaactcgtccgcctcttttctttttcgcggttggcgctgccgctaccagaaaacaagggatgagaaaaccggggatcgcgggattttttcttcttcttcacgagcgttaatcgtgccgtccgttttcctcctccattcagccggagcgttgccgattcctacgcctggttgttggccaaggtgggtggtcgttgcttgaggctccgaaactccaggacctccaacgtcactgacggcacgagtcgtgcgcaacgcacggcgcgttgaagccggcgcccgaatcggataggctcgacggcgatgtgatgataagtagcagatgaccagagtctactctccccagtcgagcgagagtgaagagtcgtagcggagcggagcggaactgagtgtcgatcgccgactcgaatcgcggaggccggtacccggggatgagggttcaggacggggacgtggacggcggcggcgaggtgaccgcgccgccgcagcacctggtgttcgcctactacatcaccggtcacggcttcgggcacgccacccgcgccctcgaggtggtgaggcacctggtcgccgcggggcacgacgtgcacgtggtcaccgccgcgcccgagttcgtcttcaccaccgagatcgcctcccccagcctccacatccgcaaggtcctgctcgactgcggcgccgtccaggccgacgccctcacagtggaccgcctcgcctcgctcgagaagtatcaccagacggccgtggtgccccgggagtccatcctcaagaccgaggcggagtggctcaactccatcaaggccgaccttgtggtttcagatgttgtacccgtcgcgtgtagggcagctgcagatgctggcattcgatccgtgtgcgtcacaaatttcagctgggacttcatttatgcagagtacgttgtagctgctggacatcatcatcgctcaattgtgtggcagatagcagaggattactcccattgtgaattcttgctcagactccccggatactgccctatgcctgctttccgtgatgtcattgatgttcctctggtggtcagaagattgcacagatctagaactgaggtgagaaaggaactagggatcgcaaatgatgttaaggtggtcattttcaactttggaggacagcctgccggatgggaactgaagaaagagtggttgcctgacggttggctatgtttggtatgtggtgcatctgatactcaagagctccctctaaatttcattaagcttgcaaaggatgcctacacacctgatttgatggcggcatctgactgcatgcttgggaaaatcggatatggcactgtgagtgaggctttggcttacaatctgccatttgtatttgttcgaagagattatttcaatgaggaaccatttttgcggaatatgcttgagcattatcaatgtggcattgagatgatacggagggatttacttactggccattggaaaccttatcttcaacgtgctatcacacttcaaccctgctatgatggtcccataaatggtggcaaggtagctgcacatatcctccaagatactgctgttgggaagaagtatatttctggaaagttgagcggagcaagacggttgcgtgatgccattgtgcttggctatcagcttcaaagggctcctgggagagatgtaggaattccttactggtattctcactctgagaaagaaattagtgttggcccagcgcccacatctcatgatatgaatggaagtgatgagtcatcgttcgaggactttgagatactccatggtgacatgcaaggcttaactgatactatgtcctttttgaagagtttatcagggcttgttggaaatgacttaagaagccctgagaagcaaactcgagagagggctgctgcttctgtgctctttgactgggaggaggaaatatatgttgcaagagcacctgggcgattagacgttatgggtggtatcgcagattactctggaagtcttgtattgcagatgcccatccgagaggcatgccatgttgctgttcagagaagtgaccctaccaaacagaagcaatggaagcatacacaggctagacaactagcaaatggaggagcagtaccagtgttacaaattgtatcctttggttctgaattaagtaatcgtgcacctacgtttgacatggacctttctgattttatggatggcgacaaaccaatatcttatgataatgtgaaggaatacttttctcgggatccatcccaaaaatgggctgcctatgttgctggaactatttttgtattgatggctgaactaggggtgcgctttaaagacagcatgagcattttggtttcttcatctgtccctgaaggcaaaggtgtctcctcttctgcatctgtggaggttgcttctatgtctgctatcgccgctgcctatggtttaaacattgctccaagggatcttgctttgctctgtcaaaaggttgagaatcgtgtcgtcggagctccttgtggagtaatggaccaaatgacatctgcttgtggagaagctaacaaactcctagcaatggtttgccagcctgcagaagtgaaggagttggttaacattccaactcatataagattttggggtcttgactctgggatacgtcatagtgttggtgggactgattatgggtctgtaagagtaggcacttacatgggccgcaagatgatcaagtgtgctgcatccaacctactttcagaattgttgctctcgtgtacgtctacgcaaccaggcgactcaagtcccgacgaatatgaaggacatggcgtcgacctcctgaaatctgaagcgtcaatggagtatctatgcaacttaccaccacataggtatgaagctgttttcgcgaaagaaattccggagacgatcactggcgatgcgtttttagagaagtatggagaccacaacgatgcggtaacagaagttgacccaaagcggtcttactgtgtcaaggctcctactagacatcccatatacgagaacttccgagtcgaggccttcaaagcgttgctaacagctgccaaaacagacgagcagctctcagcccttggagagctgatgttccagtgccactacagctacaacgcttgcgggctcggctctgacggcacagacaggctagtgaatctagttcaagaaatccggcacaggaagagctcgcgcgccggagggcccagcctgttcggcgcgaagatcaccggcggagggtccggcggctcggtctgcgtgatggggaagaactgcctgaaaagcagcgaggagatcctcgagatccagaagaggtacaaagcggcgactgggtacctcccgactgttttcgacggctcgtctcccggcgccggcaagtttgggtacctgaagattcggcgccggtccacgtcgccgtctgattgaagaagaagaagaaggaagagctctgctcggtcggccgtaccctcacggtcgtattgatcgtatcgtatcccacgcactacgcccaagatgccaataaatgggacagattgatcggcaataataatactagtagccatagaaaactctagtgataagctgcgaaacaacttgtatgtcgaagaaaatatttgaaaccatggtatctttgtggtcgatatctgaagtgagatgatgtgaatggctattggcgtatgttcatgtttgagctgtacggagaagaaaaggccgtatccaacaagagttcatctgcatagttacctcaaacacattatagaatgcactgaatataagagataagc

SEQ ID NO: 25016 - DNA, 981 bp, Zea Mays
cccgcctgctcaactcacctgtacttctgaatgctggtctcaactactggaaactcttccccttcctaatataaaatggatatgccccactgcaccttcaagacccgtgtcagtgtttggcgggttcccctccacagcatggtttgatgttgctgatctttctgaggatgctcctgatgacattgagggaatcgatgcctcagcagcacatgttgcgaatttgttgtcaactgaacctgctgacatcaaacttggtgttggcggctttagtatgggtgctgctactgctctgtactctgcaacttgctttgcccatggaaaatatgggaatggcaaaccattccctgtgaacctaagtcttgccgttggtcttagtggctggcttccatgtgccaggaccttgaagaacagaattgaagcctcaccagagtgtgcacaaaaggcttcatcaatacctcttttgctctgtcatggaaaagctgatgatgtagttgcctacaagcacggggagagatctgctggtgccttgaaggcaaatggcttttccaatgtgctcttcaaggcatacaatagtcttgggcactacactgttccagaggagatggatgaagtttgcaaatggatcacagcaaatttggggcttggcactaagtcatcttgattggaatttgatgcgagaaagactcgcagggacggtgtccaaataataccggtatcttttccaggaggtatatggtttaatagcaaatttgggcttgggtatacggccatgttctagcttttcttaacgcagacgtgtctgcgaatgatgtatgcttataatatctatattttggtctacgtcgatttggttgtggcacggataatgtttgtttcaaatattctgctctgcgaattggaattgtgatgttttgctttctccgcgtgtctggtttgccttgtgtcagaatcattttgtttgtttattgtataatattgtcg

SEQ ID NO: 25017 - DNA, 674 bp, Zea Mays
tagagaaaactttctgctgaaacagagaagatgatgtctatgttcaaagagattgagaagaaagcgtttgttgttcaggaagagtataagaaaacacaggagatgatagacaaccataaagttgagcttgacaaaactaaggaagaatacaccaaacaaaaaaaagcaatggatgaactgagagccacagaggttgacgctgagtacaaattgcaagatacaaaaaagcttgccaaggagtgggaaatgaaggtgaaaacattcaagaaaaggcttgatgaaattcatataataatccaaaaggatgctgttgatcctgagaaactcaaagtgactccaggtgatgagcaactaaatgacacatatgacatgaaaagggcaatggagatggtagcattgttagaggcccagattaaagatttgaacccaaatctggattccatagcagagtaccgcacaaaggcttgcttgtacggtgagcgtgttgatgagttaaatgctaccactcaagaacgtgatgatcttaaaaagttgtacgatgggttaaggaagagaaggctggatgaattcatggctggattcaacataatatctttgaaactgaaggagatgtaccagaaggtgttgttttcagtgtgaggcctccaaagaaaagctggaaaaatattgccaat

SEQ ID NO: 25018 - DNA, 2990 bp, Zea Mays
ctccctttctcttttctctcttcgtcttcctgctctcgctgagcctgcaggatctgaatccgagctcgctcgcatccactatctgcaggccccacgcgccctgttccttcctcccgctaacaatcgccctgttcccggtttgatccgttgaattctgcccggcgcgcgggggcttgcgggtgcgcaccggaggctgcatcttttcccggccaagattcggtccggtggggccgttcttggcacgatttcacgggccgtttggccttccctcgccggatttgttccggctccaggcaccaaattccaatcttttcctgctgctgctgcctctgcgacactttattcttctcccccaattagcggcggttagtgtggattctgatttgtaggttcatttcctggtttcctccgtgagcttctgcggttggcgtggttacgccagtccctcgcgatttacatctgtgattcgtttgaaaatctgggagtgtggagatttgggaggtcttctcgctcctgtgctctatgaggagcagcttcctgtcggagtcgccgtgcgacgagcagcgcatccatggatatggtttcaacccgcagtcatggctgcaggtggagcgagggaagctgcccaagtcgtcctactcgccttcctccattgagtcacttatcaagattgctgagccacatgtagtgccattgtataagcctttggattatgttgaggtgctgtcaaggatccacgaggagcttgaacaatgtaggccgagcgagctgccaggcctgtacttggtccagtcccaggtgtttcggggccttggagaagcaaaattgcgccagaggagcctccactctgcctggcgttgtgcaagcagcgtccatgagaaagtcatatttggggcatggttgcggtacgagaagcagggggaggagatcatatctgacgtccttgcatcatgtcagaaatgctgtcgagagtttggtttacttgatgttgcctctgagatgcctgtgcggaattttgaggtaattggttcatgggagacaggctcctcgtctcaagtttcttccatggtaaccttccaagtacaggatggtagggtgacatgtgataggtgcaagattgcgtctttgtcaataccattttgctccatgcttaatggaccgttcaatgagtcacagcttgagcttgttgatttgtcagagaatggtatttcgttggagggcatgagagctgtttctgagtttagttctacatgtagtttaggggatcttcctgtggaaatcttattggagatcctggtgtttgcaaacacattttgttgtgacaggctaaaagatgcttgtgataggaaactggcttcatttgtttcaacaaggcaggatgctgttgagctcatgccgttggcatttgaagaaaatgcgccagttcttgctgcttcttgcttgcaaatttttttacaggaacttcccgattgtctagctgatgatctagtaattagcctcttcttaggtgcaactgcacaacaacaacttatcatggttggacatgcatcctttttgctgtactgcttgcttagtgaagtagcaatgaacattgatccgaggacagaaacaactgtattattgttagagaagcttgtgcagctagcagttacccctactcagaagcaaatagcttttcatcaacttgcatgcattagacttttgagaaaggaatatagtgaagctgaacaccaatttgaggttgccttctctgccggtcatgtgtattcaattgctggtattgctagagtcgctggcattcaaggccaaaaggctttggcttatgagaagctcagttcagtgataacatcaaatttgccactggggtggatgtatctggagaggtctttgtattctgaaggtgatagaaagctggcagaccttgacaaagcaagcgagctggatcctactctcacttacccttacatgtatcgagctgcatccttgatgagaaaaaaagatgctaaacatgccttagaggaaattaaccgactcttgggtttcaagttagcattggagtgcctggagctacggatctgtctatacctggctcttgaagactataagtctgctatctgtgatatccatgcgattcttactctttcacctgattatcggatgttggaaggacgtgtagctgcttccaaaataggcactcttcttggtgcacatgtcgagcagtggaatacggctgagtgttggctacaactttatgagcgctggtcatcagttgatgatattggctccctttcagtgatctatcggatgcttgagtcagatgcagcaaaaggtgtcctctactttaggcaatctttgctgctccttaggttgaactgtcccgaggcagcgatgcgcagtttgcaattggcaaggcatcatgcagcaactgagcatgaacgactagtatatgaggggtggctcttatatgacacggggcactatggggaggccctacaaaaagcggaagaatctatttccattcaaagatcatttgaagctttctttctgaaagcctatgttttggctgattcaggagttgatccttcttattctgcgacagttatctcacttcttgaagatgcattgaaatgcccttcagaccggcttcggaagggtcaggcattgaataaccttggtggtgtctatgttgattgtggaaagttagattcagcagctgattgctatacaagtgcattgaaaattcgacacactagagcccatcaaggtcttgctcgtgtacattttctgaggaacaacagggaagctgcatatgaagagatgacaaagttgatagaaaaagctaaaaacaatgcttcggcttatgagaaacgctcagaatattgtgaacgagaacaaactatgacagatttgcaaacagtgacccaattggatcctttgcgtgtttatccatacagatatcgagcagcagccacaatttgtcgatggttttg

SEQ ID NO: 25019 - DNA, 2714 bp, Zea Mays
cccgcactcgagagcgggtgtctccaaccattccccattcgatccagcttgacgccgctccccgacgacgtggacgcccgtggagccctagaaccaagccatgcgacgggacgacgccggcggaggaaccgggttccacgacttgtttgactcggtgcgccgctccatctccttccggcccaccgcccccgccccggaagcccccgcgggcccattcggcgcgggggcaggggggatcggcgtgcggatcagctcttgcctccggaagtcgcgggggatggggctgctaggtctcatcactaaaagcccctcgccgccgcgccgcatgctaccgccgatgcccgatcagtcggacggcggcagcggagggggtggggccaacggcggagtcggagaggagaacccactgatccggtggcgtaagggggagctcatcggggccggtgcgttcgggcaggtctaccttgggatgaacctggactcgggcgagctcctcgctgtcaaacaggttttgatcggcacgagcaacgcgacacgggagaaggctcaagctcatattaaagagctcgaagaagaagtgaagctactcaagaacctgtctcaccccaacattgttaggtaccttgggactgttcgtgaggaagacacactaaacattttgctggaatttgtccctggagggtctattcagtcacttttggggaagcttggttcattcccagagcctgtcattaagaaatacactaagcaaattttgcaaggattggagtatctgcatagcaatgcaataatacatagagatataaagggtgcaaacattcttgtagataataaagggtgcatcaaacttgctgattttggggcatctaagcaagtggcaaagttggctactgtgacagcagccaaaacaatgaaaggcacaccgtattggatggcacctgaagtcattgttgggagtgggcatagcttctctgcggatatatggagtgtagggtgcacagtcattgaaatggccacgggcaaaccaccatggagccagcagtatcaagaggttgctcttctttttcatgttggaaccacaaagtcgcatccacctatacctgaacatctatcgcaagaggccaaagattttcttctgaagtgcctgcagaaggaaccagagctgaggtctactgccccagacttattaaagcatccttttgtcactggagaattagatgatctgcagccacgcaatcatgctgcacacaaggactgttttaatgaaattcatgcacatgatatgccaaatggcttgggtttgaatcattcttccaactggtcgaccatgaactccaatagatcatcaaaaatcaagcccttatgggaggggagctgtgacgatgttgacatgtgtgagtttgcagacaaggatgaatatgcaccagtaggatctagctataatcctatgtcagaaccatttgataactgggaaaacaagtttgacacaagcccagagcaaagttctcatgaaccaatggaatttggtgaattggccaaacatgctgaaagcagcataactgagaatgattttacgtgtcctgttgagggaagttgtgaagatgatgtacttacagagtcaaaaataaaggcatttcttgaggagaaggctcttgacctgaaaaagctacaaacacctttgtatgaggagttctacaacactgtgcacggagggagttgccaaacttccaagggaaaattcccaatcagtccaaaattgccccctcgaggaaagtcacctccaagtaagacgaggggaggtgcatgtgacactttgaataacacagctcccgaaagctgcagcaagcaatttcctagaagcagtgtggtggagagcagccgaattttgagagaaattgcttctcctcaacttaatgagtttgctgataaactccatcttgatgcccaagatagcccaagcatcagcttcaccgaaaggcagaggaagtggaaagaagagttggaccaggaacttgagagggagagagtgatgagattagctggctgtggtaaaactccatctccaaatagaggttccaacgtgaaaaaggagtgtcatgctgaccattgaacagacagcagcattcgtcgtctctttatatcatcccacagaagacacaacaaatgatagtaaagtacacagtgtgccagagattggtggcaacagcagtacagcctgtgccaccttatcatttgcggtgttagccaagctatgatcgcagaaccgtcctgtacaaaatgacagatttacgttgaagtggatcggtacagggggcactcatcacccattcaccctcaaatcaggatcattgtcgctgctgcctagaaggacgtcatgctgacacttccctgattttaaggccgcatttatcattctttttgatgcagtgctatacgtcgggcttcggttatgtatggtttatgttgagaaaacggtcttgccaaaattgtgtttgtaagcccagattggcgtggggcttggttttgtatggagcttgtttgcgaaagtgtgtaataagatagtgatgcgagatacgggtcattctgcatttctgcttgcagaatgaatctgagcttttctgaagctacaactgactgtaattaataatttcaatcaaatcgtgagtcctgtgcctgtatgttacacccggatttaagagataaaaccaggtgcg

SEQ ID NO: 25020 - DNA, 2329 bp, Zea Mays
cttgaagatgcagccaccgcctccgtgtcgtcttcctcgtcagcacgcagcagtcaggtcaccaccaacagcaacagcagtagtgccgtcgcgttgtctcccactcccaagtcccaactcccacctcccccgcccgccgttcaaatctccctagcctcccgaagtaggcaagtagccctccctgttccatcgaacccagcagagcagccagccgaacaacgaagcatgccgtcgaagccgaacgccgcgtcgcgcctcgtcttcctcgctttcctcctcgtcatcagcgccgccgcggccaacgatgacgccgcggcgcggcggacgatggagcagttcgccggcttccccgcctccgacgacggcgagggcccttccagcgacttccacgtcgactccgagggcctccagcgtcagatcgatgaactggcctcgttctccgactcgcccgcgccgtccgtgacccgcgttctgtacaccgacaaggatgtgcaggctcgaaggtatataaaagggataatgaatcaacttggccttgttgttcgagaagatgctgttggtaacatatttggccgctgggagggttccgagcctggactaggagcagttgcaactggatctcatgttgatgccattccattctcaggcaaatttgatggtgttgttggagttctgggtgctcttgaggcaattagtttgctgaaaaggtctgctttcctgccaaaaagatctttggaggttattatgtttacatcagaggagcctacacgatttggaattagctgcttgggaagccgcttaatggcagggattgaagaacttgctcaatccctccgaaaagtagttgacaatcagaatgtgtcatttttggatgctgcagaatctgctggctataagttgaatctagaggacctgcatagcgtatttttaaagacagacaaatactctgcttttatagaactgcacattgagcagggtcccatcttagaaaaggagggtatccctattggcattgttactgcaattgctgctcctgcaagtcttaaggtggactttgaagggaatggcggtcatgctggagcagtgctgatgcctgcaagaaatgatgctggactggcagcagctgaattagcattagcagtcgagaaacatgtcctggaatcaggatcaattgatacggttggcaccgttgatgatgaagctgctgcaactacaagtgatgaaggcgtgggcagcataaatgagatgggcttagatattgattaggccttatgggcttagggcatggcaataatgccatatttatcagttatttagtttatcctgtatttgttggacatatatagttgcttgctacttgctggatatatattttatttgccagtttttgatatatcatatgatatatattgcatactccttgctagacaaatggacacctaggcgtctaagcgtcctagcgcctggctagcgaattgcctcgccatggcgtcgtaataaccatgccaatgatgtgaagacctttgcatattttccactacactcgggcgtcacgtcactaaggtattctgcagttacatccaggagcaatcaatagcatcccaagcaaatcacacctagaaattgatgtaagagatattgatgagaagagaaggaatgatgtcattgagaagattcgccagtctgcagcacatatttcaaagaaccgtggagtagagctttcagaatttaagatcatcaaccaggacccacctgctctatctgacaaatcagtcgttgacgcaatggaatttgctgcaaaacagttaaacctggcatacaaaaagatgattagcagagcctaccacgattcactcttcatggccagagtatcaccaatgggtatgatcttcattccctgttacaaaggttacagccacaagccggaggagtatgcatcacccgaggacatggcgaatggggtgaaggtcctagccttgacaatggctacgctgtcgctggagtgacttgttagcgtttggaggaatcaagtcagcccgtgccaaaaaggcaaaaacaaacacctgtgttatttctaataataagctgcatagcattggcgtcatcttccctgcaccaggcctgtatacaaaccatcattcatcagggtttaggaataaagttgtcatctgtatctgtatgatctggacaatgattttctagcttgatcatattgatatatagtagtgattttctaaatctttatccatataaacaaactaatatagaaacgatgttatatcaattgtacattacctctatcgggtacacagggacaggataccctaaa

SEQ ID NO: 25021 - DNA, 630 bp, Zea Mays
tccatttctgcttcctgtcaggaagcctatggacaacttccttcaacgtatggaaggaattactctagatgatgtcgcaacatttgccaggaagatgctagcttcacgacccacaatggttagctggggagatgttgacaaagttcctccatatgaatctatttgcaagcggctacgataagtacccctacacaatgacctctggttgactttgaaggatccttccgttgaaaactaaacaatcgcttgtatgaagtgccctagctcaggaactgcttttctttggggcattcaatttagtgagcttaggatttcagcagctacgttcagttgtaactgttccatagtagattaggaagactggcgatcatttttatgtccattttctgcgactatggatagcaggagtattctgctggcctgaattcccggtgtaaacggcttctgaaattttgaatcattgataaactaatagtgtttggtttgaggaaatttttatttgtttcatatagaatggaaattgtaaaccatgacactgattagtcaaatgttccaagtgcaaatgacccaaaacactgttgggcagaagccgatggtgattgctatatactcgtttggctttatatatac

SEQ ID NO: 25022 - DNA, 5119 bp, Zea Mays
cgggcactgactgaccggaacaaaggaaagccaagcagcagccgcaccggcgcacgcacccacggccacgacccacctgcgggcggcgctcaacccgagtggatgtggacggagccgcccgcaggccgcacgacagacagagatagagagagagcacaggcggccacgcccgctcctaccaccgcaccgcatcgccacttacccctcgtgccgccgcgctgccttttcctccccgcgtccctttcgtccctcaccttgtcggagaccgacgcaccccccctctccgctctccgctcctcctccccacaccccaccccacccgctctccagtccacctcacgctcacactcccgcagcccgcccgccagccgccatcctgctgccacctctttcttccttgcgggggcggcaaccaggcgcacggcacctgctccctcccactcccactcccacaccgcgccagccaccagaataaagcagccgttgcggcgtcgcgtcggcgagcacagcgcagcgcagcgcgcagcggcccgggtgcatgaggagggggcggcggctgccgaggccgaggctgtgacgaaggagcgcggagggcgatgccgctggtcaggttcgaggtgcggaatgaggtggggctgggggaccccggcctctacggcggcggagctgccgctgccgccgccgccaccgccgccgcgggggaggaggagcccaaggcgctgctcgagggcgtcgccgtcgcgggcctcgtcgggatcctgcgccagctcggagatctcgcggaattcgcggctgatgttttccatgacctacacgagcaagttatagctacatctgctaggggtcgcaaggtgctgactcgagtacagaacatcgaagcagcacttccatctctcgaaaaggctgtgaagaatcagaagagtcacatacattttgcctatgttccgggctctgattggcacactcagcttcaaaatgagcaaaatcacctgctagcgactgatctgcctcgttttatgatggattcgtatgaagaatgccgagatccgccacggctttaccttcttgataaatttgacaatgctggtgcgggggcttgtgtaaagagatattctgatccatcttatttcaagaaagcatgggatacgatgagagcagataagaatgctaatgtacaaagagaaaagagatcacagaaaattaagagaaaaggatcacgactaagggaaccatatcatggacaagccatgcctaggcataggggcactgaatttcagcgatcacttactgctggccaacttgttaacaggcagtttgcatctcccagcaacgatggtcagggtatctcagagcataagtctacacctgatgcaagatctaatcctgacaatatgagcagatcttcttctcttagttcgaagacacaactgagttcagtagaacaagctatcgatacaaaaccttctgcagtttctcatgagaatggccatgggaagtcattggatactaagttgcacaagcctggtggtctgccttcgcccgtactgcttaacagcaccactgtggatgatcatagtgaccatttgaagcaaggttccccgccagatggtatggttgctagatcaccttatgttaaatgggatgaaaagactgcaattatcatgtctacaagttctatctactgtgacgatgttgttatggatgaggttgaagatgcagaacctacttgtattagctctgtgcagaaagaaactgaccataaggtaatggatacattgcaccagcaagatgccttacttaaaaagacaaaatcactgttagtgccatcagtcttgaaccaccatgatgacattccaggagaagccgacaactacatggatgcacttaatacacttgaatctgagacagaaacagaatctgaatttcaaactaaaaatcgggtgccagcaccttccttcaaagctgaagcccctcaagtgggggcaattgacaatattgttccacagtgtcttgattcctctgctgctgactttattgacacatgtcaagaatctgatattatttgtacttctgaaagagcaattgattttcccagtttgtcaaatgcagattctcttgaggtttcacaactagaactttcagattatacgtctgtaagcccctataaagagtcatctgtcatcactaatatccacgagagtggtgcagagggtgctcgtggagatccttgtgagattatagagcctctgcaggtccattcagccatacttgccaatgatggttcccctgtttgcaatgaaataccaaagagtaagccagatgatgatcttgggtattttcaagagattcctcaaccaggtttctccacctgtatggttattccatcaaacaaagagtctgctgttgccaacaaaaaccttgaaggtgacgcaaaaagtgatgatgatcttattgatggtaccgctgataatgttgtatcgggacctaagattgccaacatggtagttgatgaggtgggtttcaagatggcacctgctaatagaagttcacctggtgacccctctgatgactcatgtgtcattcctgaaagtaggcctcaggattatgctgtaaagagctatgagggagttggtgattgtggtgtgactgaagtgtctaagttatgtagtgagcctcttaacaaaccatcagataatatatgtgcaactcaagatgttcctacaaatacctctactatgtctgctggtgccagtgaagtgtctagttcgtggagtgagcctgttaccgaactaatcgatgacagatgtgcaactcaaggtgttccagcaaatgcctctaccacgtctactgttgtaccatctgttaaactctggacaaatgctgggctctttggacttgaaccatccaaacctccagtatttggtaatggtccaagggaggatactccacctggttttaaagaagctcaaccagtccattcaactgaattcacagaagtgcactgttcaaagccaactgaatcagcagctgtagatgtcccaaatggaaacacatccattaccagcagctttgtggaaaagcttgttggtattcgtcctggttctgcaaacctcaatagctcaggggcaaatcaatcagcagccagaatacctgatccaattcatagtcatacagatgggcactcagatttttcgtcatcctttgagcacaataacatgactggcaaacatacttcaataagcgaacttctagaatttgaggggagtgctgatactggcaccaaaatatactcaactgacatgagaaataacgctgtgtctgcatcaagcttttcaagcattgcacaaaggtttcttgctaatacacttcagagaagaacttccaaatatactgatcttcctatgtcttctgagagggcaaatgctgatacaagtgcaaaatctgaatctactctaaatcctgttgtagaaccaagtgaagcggtatttgcagaggaaactaagtttgagaacaaaacagaaaatggaatggatggattgtccaaaacatcaatattttctagccgccattactctgagaaatcgtctccgccacttgagtacatgaaaatatcttttcaccctatgagcgcatttgagatgtcaaagctgaacctagatttctgtgatggaaatattcatgaaatttctgatgatatgatgttaccgacatttcagttactttcagagtcttccattccacagccaggcagtggttctgagtctgaagatgacacctttggtaggtcatatagttattcttcatatgatgatctgagtccccggctatattcaaactctgaggcatgggatcaagatgatggaactggactggaggaacatgagttatatgatgattcaaatcagataggatcctcaacagcacctttatctagctacatgggattcgagcagatgaacttatctgacatgaagtcagatatttcacttgcaaacattggggatcagaatgtaataggcactttacaatcctgtactgttgaagaacttccaaactttgatacattgatgtccagaagtgatgatcaaaatggtgaaacccccattccacataatctggggaatatgacaccagatgaagatcagttgccaccaccacctcctctccccccaatgcagtggaggatgacaagacaaacaacttcactagaagaggaaacttgcattacaactaaagatatgcttagaaaaacttctagcctaccacatatacacacctctgcccaggaagaacactgtcctccaactgcaccattggatctacaagggcatgctggggaagtgggtgtccagaaaactggtggggtacgagaaattactaatcctcctagtatcatcgatataaaatcaagtttgcttcagcagatcagggataagtcagagcagctgaagcttaatggacatgaaaggtcaaaaaaagcagtaggcggtgacattaaaagcttagacgaaagggaggagttgcttcagcaaatcaggagcaagaccttcaatttaagacgcacaaacgcatctaaggcagatggctcatcacaatctacagccagttccaacgttgcagcaattttggagaaagccaacgctatccggcaggctgtggccagtgatgagggtggcgatgatgatacatggagtgatatatgaccacctaattgcagacgttcatggtagtcttttcctgtatattaagctattacaagatgaagtgattaaatgtgaataccatccttttcttcattgtaattagattttgcaggtcttgttttgtaccttccttagttcatattagtgaatcctaccgtaggtcgctgtggtcgtggaaatgtcagagcatttccacattatgtaaatgcatctttattatttatttatgatagtgagaacagctgaatagctgataaaaataagcatactaatctatctttttatcattgtattgattttttttgcaatgataataagatggagcatgatgttgcaaaaggttgtccttttagctgctatcaagtaaaatatttctaaagcgataggtctgcattaccttgccaagtcacgttttc

SEQ ID NO: 25023 - DNA, 3009 bp, Zea Mays
atggtggccggtggtgcggtgaaaggagatgacgatgtgcagcttccatgcgggcgcggggaagatgacgtggtgaagaccgccagcctctacaccgtctccagcaaatgtcgatgccctggccatggtgaacaaggtgatccttgggcaagcaaggtgtcttctactgaaggtaaaggacaacagaatgattcttggtcaagtaagatgacttctcgtggtgctgaggataccagaggtggctgggacagcaaggtgaaaggctcttcctgcaatgatgggggtaagtgggaaaatgctggtagcgttgagtgttagactgtgtgtgttagtgtgtgtgggcaaaacctcttttttttttttttttttttaatacaacagagccaaaccgagggaggagagagagggccagagaacacaaagaggcaaggcaaggaagcagggacagactccaagattgggggcgactggtaggcaagaaaggaagctcttctttttcgagtatcactgggcgattgatttccgccgccatcctttccgctcaattcttagctgccgcagataagagcgaggagcagaggcgctgttttctctctccgattccctcagcttcctgtggcgtggtggggtgtgtggcgacgaagggaggctcgccggggcgcggacggacgcccgcgatggccggcgtcgacgttgccaggcacgcgcacagcccggcgcaccacgccgtggcggcgcgggaccacgtcgcgctgcgccgcgtgctggaagcgctcccgccggcccgccggcccgaggagatccggacggaggcggactccgtcgccgaggaggcccgcgccgaggccgtctcggcggtcatcgaccgccgcgacgtgccagggcgggagacgccgctccacctcgccgtgcgcctttgtgacgccacggcgaccgagatgctcatggcggccggcgccgactggagcctgcagaacgagcagggctggagcgcactgcaggaggccatctgcgcgcgcgaggaggctctggcgcgcgtcatcgtgcgccactaccagcccctcgcctgggccaagtggtgccgccgcctgccccgcgtcgtcgccgccatgcgccggatgcgggacttctacatggagatcaccttccacttcgagagctctgtcatcccattcatttcccgcgtcgccccctccgacacctacagggtatggaagcgcggcgccaacctccgcgccgacatgaccctcgccggtttcgatggcttcaagatccaacgctccgaccagaccatactcttcctcggggaagggtcggaggatggaaaggtgccgcctggttcactgtgcatgatcaaccacaaggacaaggagattatgaacgcgctcgagggggcaggcgccccggcctcggaggcagaggtccagcaggaggtcgctgcaatgtcacagaccaacatcttccgtccggggatcgacgtcacccaagcggtgctgctcccacagctcacatggcggcggcaggaacggacagaggccgttggcccgtggaaggccaaggtgtatgacatgaatcatgtgctggtcagtgtcaagtcaaggagggtcccgggagcgatgacggatgaggaattcttctcatctagcaacgacaatgatacagagagcgaggggtttgacgatgttctgacagaggaggagaagaaacagctggaggctgcgctaaaaatggattctccggatgccggtggagaagaccagtcggactcatttgctggccctcgacatagttgctttgagccaagggagagggagatacccatcgagggcatgagtgtttctggaaatgtggagagtaagcatgacaagaaaggttggttcagtaattggggaaagagagctcaagttagcaagccagaaagggtgaagaagatggcacctccaaggagctcgctctgtgtagatgagaaggtgagtgacctcctctttgaatcaccctcaaatgcacaaacaagaccaggaaggcattcagtagatgtagtcagagcagatgacaacagaaggatcagggaaagggatagtaggaggtatgttccttctgcagagaatgggcataggcgcaaagaaggttccaaagaaagtgagtataaaaaaggcctaaggccggttctctggctctctccaaatttccctctgcggactgaggaactgctgccgttgcttgatattcttgcaaacaaggtgaaggcaattcgtcgtttgagggatctacttacaacaaaactccctccagatacatttcctgtcaaggttgccatcccagtcgtgcctacgatcagagtgcttgtgacattcacgaaattcgaggagctacagccgctagaggagttcggcacaccaccttcaagccctgacaaaagcaagagcccagcagtgcagcctccttcgagctcctggattcaatggatcaaggcgccttattaccgccagatgaacttgtctacggcgccaggcccgagcagccgcgtggaggacatccaccaccaggacccgttcgccatcccttcggattacgtgtggaccacacccgaggagaagaaaaagaagacacaggaaaacaagaacaggtccaagaaaggcaggaacgggtgatagagcattggtgggatgggatctaacaggagggacgagtggaagggaaggtttggagatttcggctgtgctggtctgagtctgacgtcgaatattgggaagcgaccgcttgtcttcttttttatttgtgttaacggatttgctgccaacattctttcgtttaacccaaatcgtttcggtcctgattactgttgcaatctgttggtagattttgagatgtggtggcttctatacaaccagtgatgcacatccctatctcctccgtagtgtctaggtacatcgcatttctttgttcctgcatctccaatagttgccaaaatgcattctatatttcggtttagaagaatattaacaaaaa

SEQ ID NO: 25024 - DNA, 1079 bp, Zea Mays
tccgtctagacgccggcactccgcagctggttcattccgtcgcggccgggtcggcggtccccagttctcctccgcttcttcctccacgctcccgtccccgccgcgcgaggaacttcccacttccaggcccagcttgtctggttaggattagggtcgtcgcttcgcacgtgtccggtgtgccgccgtcggagatgtcgcggacgctggtgcagccggtggggcagaaacacctcaccagcgtggccgcgcacctatcggccgcgagctaaacgaggatcctaaccttaaccctgggcagactgatactctactcctggatgacaatactaaactacttcggcaacaacattcccatcaacggatctatgtctggctgtcatcgcgaagatcatcctcgtcatcggtgccccagtgggccctttaacatcctaggcctggccaacgacccctaccaaactgccatcctcaaggtgaaggagatcaagaacggccgactgaccatgttctccatgttcgccttcttcatctaagcctatgtcaccgacgaaggcccccgtgtagaacctcgccaagcagaaggttcttcttgagggtgttgagacgtacaacaagttgcaaaacgaccatattacagcaaaagaacgactttagtaagagcatggtactaatatggcatgttgtgtttagtggaaacctccctatcttgaggtttcttcttgatcatggtgatgatctccatgaagaaggcagcctggaaggtcatgacaggacttccttctgaccgtgaggaggaaggatgcccgatcagtgaaggtcaagaggatcaaggatgttgttaaattcaaggtatgttgatccaagtacttgtacaccctctacgtctttgatgctgagaaagcaaacaagttgaagcaatctcttcccttagatagcgcagctttaattgacatgatattgtttctattctggtatatgaaaacttcattttggtagtattgtctttttggttggattggtgtcattttctttgttttaagtttctgtcaattagcggttccagtgaaatatgtgattggctt

SEQ ID NO: 25025 - DNA, 1652 bp, Zea Mays
ttaggttagctttcacttgcttcaattgaccctttcaagagctgaaaatttcttgttaggtgagcaaaagcatcctttgtcaactaaactcgcctaatatgctgaatcctacttaggaaacagtcacatagccatgcttttagatttgtgattttgctgttttatgctgtcattgcttaatgccttaaaaggatatggaaacaatacaaataatagtcatactaataatttcattaccaacgttaggcatgttgttaacttcggtagtattcattatcattggtggtaggtgagtaggtctatgtgacatctgaccaccattttggaatttggctcatatgggcccatttgtatgtgttgatgtcagattgtgggggtttagtcccaccttggttgttgagtgtgggttagaccaacatataaggactgtacattgtgagaagggtgggtgctctcgccctgttccatttgagaagaggaagtgaaagaaagagctagctagatgagcaaaccaacaggttgcttccccttactttgcttgtccttgtccagcgtgagatgggtgaggcgagctgagacggtgacagatccaaaatgcccaagggttgcaatactgaagtgtctgctatgctgctttggtcacattgcacttaaattctgttcacttttctgaaatcgcattagtagtgacaagcaccatgttctcattcagagtaaaggcaatatatgacgtgtcaaacgacccagtcgtttactttcgtctagctcgaatggaaaggggaagatctcagttctatatccaaacaagactaccacccccaagtcagttaaagaccttgaatttgatggtttctccttgactactgaccttcgtgagaatttgcaggacggacctttcaattttgttttgcttgatggcacctggagcaattctgctgcactgtacagaaggttgaaggagagatggactgcagtatggggagatgaagctctaccttgtattgcactatctacacttagtgcctcagtgatgcataaactacgaccgcagcctgcctgggatcgtacctgcactgcagcagctgcagctggcctcctctgggagttgagctcgcggcctgagctcatctcatttgggttggaaaagcaagccgaggcggtggagtgctcgttagacaacttgctggatgctctcactgccaggcggcttcgtctgggccgatcgataactcggaaacagagacatagtaggaactgcatatagggaaagaagaaactcacagtaacagaggagcatggtgtgccatcaagtggaaggctgatttcattcttttttgtagaactcaggagctgatcattgtcaacaagttttctcccctttctatataggttactagatcttcagttcagtgctgtagattacttttaatggtcattgacatgagctgttaccgctgctactgtcgaagaggagggttaccaaatattagggtgctaaaacttgggttgtattctgacagattttgccataccatgaaatcaagttgttttctcatgccaataggttacagctgacaaacaatccctcccatcctctcttttccagtcgcgtattgtatggtatcgtgcccagtaagggcttattcggtttt

SEQ ID NO: 25026 - DNA, 1257 bp, Zea Mays
gtatgaagtttctggtgttccaatagtgatacttcattccttgaaagtgtagctgttgtaaatctctgcctctgaactcgcatcacatcctttggtccatttggcactctcttcattgaactctgatcaattcttggagccagctgtaaatgttacatctgaactgatacatgctactgtatctcatggctctggtgctattgctgagcgaatgccgctcattcaaattcttgtccctcatattatgggtctgaaagagcagctcaaagatccatctaaggtcagttttcgagttgaataccctgaggactatcacaccttttccgaggaagaccgcagggattttagacatgttagatatgctgttagtgatgtgctacttgatgcaactgaagttcttgggggtgactcgacgctaaagctactttccaccaagctagctcaggcatatgggagctgcaacaatgagcagaaccccaagtggcaacctgtagaggctgctctgttctgtatacaagcaattgcgagatcagtctcaattgaggagagggaaattttaccacaggttatgtcactgcttccctgccttcctcaccatgagcagttgctacaaacagtttgttcaaccattggagcattttcaaaatggattgatgctgcaccagctgaattatctattctaccacctttagttgatattctcaataagggtatgagtacatcggaggatacagctgcggctgcttctatggcctttaagtacatatgtgaagactgtaggagaaagttctcagggtccctggatggcctcttccagatataccatattgcaatcagtggagttggtggttataaagtttcttcagaggactcgttgcatttggttgaagccctaagtgcggttattacaacgcttccaccagaatctgctagtagagccctggagctaatctgccagccagtaatcaatcccttgcaagaattaatccagcaaggtgatcaagttcttcaacaagtccctgctcggcatttaactgtacatatagaccgactatcaagcattttcagcaatgtgaaacaaccagaagtagttgctgaagctgtatatagatattggccgacactcaagagtatctttgatcaacgagcatgggatacccgtaccatggagtcaatatgccgatcttgcaaatttgctgatctggccaccaggacccccttcgcctgctgtgatagctcggggcccctctacatgca

SEQ ID NO: 25027 - DNA, 1411 bp, Zea Mays
atcctgtctgctgtctctcccgagtgacctcaaagtcagcgagcgccacatccgactccgagggccaccggtggccggttgcccgttgacgccgcggcacgcgattccgatcctgggttttacctaagaaataaacaactctgaatttcccaagacctgaagaccagccagcgcaagcctgtggctgccacggtgccaccatgtcccgcggcagtgccgcctccgtattcctcggcgtcgacgttggtactggcagcgctcgtgcaggactcttcgatgaaaacggcaaattgctggggtcagcaagcagccctatacagatatggaaagagaaagactgtatcgagcaatcatcaaccgatatctggcatgcggtctgtgctgcggtgaaatctgcgtgctcactggcaaatgttgctcctgaggacgttgctggccttggctttgccgccacttgctcccttgttgctgtcgatgctgatggttcccctgtttcggtttctttgagtggtgatacaaggaggaatatcattgtgtggatggaccatagagctgtgaatcaggcagagcgaatcaatgctaccaattcgccagtactgcaatactgcggtgggggtgtttccccagaaatgcaggctccaaagctcctatggatgaaggaaaatcttctagattcgtggtctatggtatgtaggtggatggacctaagtgactggttagcatataggtgacgacactcgcagcttatgcacaactgtctgcaaatggacatatcttggacatgcacacatgaaacagtggaaggaatctgattcacgtgatatggaggcatgcggatgggacaatgttttttgggaagaaatagggttgggagacctcctcgaaggaaattgtgcaaaaataggacgcagtgtcgcttttcctggtcatgctcttggttctggtttgacgcctactgctgcaaaggagttaggcttacttcctggtactcctgttggaacctcacttattgatgctcatgctggtggagttggagtcatggaaagcattcctgatgcaggatctaaagctggtttgtctgatgaacatgcaatatgtcaccgtatggtattggtatgtgggacatcaacctgccacatggctgtttcaaaggacagattgtttatacctggtgtctgggggccgttttggtctgcgatgatccctgagttttggctcacagaaggtggccaaagtgcaactggcgctctgctcgattacattattgaaaaccatgttgcttctcctcttctttctaaccatgctgcttctcaaagtatatccatatttgagctactgaacaagatgttgctttctatgtcacaagagcagaatagtccgtttctttctgcattaactcaagacacccaga

SEQ ID NO: 25028 - DNA, 725 bp, Zea Mays
tttggagatcacacactgacgacacttgtgctggtagtagtacgtacggtagtaggaatatggcgaactagctagtagcttttgcttgccttgcctgaccacatcattggccagctagctagcaagcatatatagctagcactagcaagctgctgcgctgcgcattgtgtggccgcgcgcagtctcggtgccggtggagagcgctagctgtggccatgtcgtcgtcgtcgaactcgaagcaggagaaaaaggaagaagaggaggagggtgatgtgccgccgtgcatgaatggcgacgtggggagggacgacgacaacaacggcggaggaggaggcgaagaagaagaagaagaaagagaaggcgagttcgcggcggcgatggcgcagctggcgccggagggcgtgcgggcgctgcacgcgcgggtggaggccgagtggggccccgtgctgcagagcgcgtgccagacggcggcggcgcgggcgctctggggccgcgcggtgcgcgacccggctgccgggctgctggccggggagcgctacctcagggggcttcgcgacaagatgcggcgcgacgagcaagccggcgcgagcgaggtgcacggggtcatgatcgccgtcaggacgctctggttcgacgcccgcgtcgaggccgccgtcgccgcgctcggcggcgacccgcaggtcgtcatcctcggtgcagtttgttagccgagaaggtggggaaag

SEQ ID NO: 25029 - DNA, 4839 bp, Zea Mays
ctggcagcaacacagaagcgtcgctcacatcaacatcacatgttcacatccatcttcgaaccccttcttcctctcttcagcgccgcacccgcgcccgcgccgtcgaaggcggcgcctagtctcgaggcttgcacgctgccgcggaggatcgcctcgctactgcgcgccatcgcctccgatctcctctatctccaatctgctccctcatcgccgtgcagtggaaactaggggaccgattcctcttctcgtttgtcgcatatttctcgctgcgtgccgcgtgctgcggtgagtgattctccaagaattctggggacgctgatctgagtccgcacagaacgcagcggcagcaatgatgatgtcggacgatgacgatgctgagccccagctcaacgcggtggagggctactacttcgttgactccaagaacgagaaggagcctgtctgcttctccaccctgcctttctggttcggggacactgatgatcttcctgacggcaagaagaagctggtgctgcgcgggactggtgacccgggcgtcaaggtgtacgatgaggtggtggcctgcaggctgggtctcgaggggaaacaacccgagtttgcagtgctcacagcaaaaggcagacgttggatacgtctcattaggcccttgaacagctacgaggaaatgatcaggactgtgttgatcacagcgcagatgctgcattttctaaggaggaagcctcatgagccagaaaaaaccttgtggaaccacctttgcaaagtttttaacaagtttgacgttccaccctcagaggacgatttcaggaaccactgctcactgatgaagcagtttgcggcaaaagatcctgtcttagcaaaatcagagattttgcgagtatttattgaaggaaaatctagaaaaaaattcactgaggttggtgcagaccatattgatgtcaagcagccgttcatcactgatgatgagggcatagatgaaatgaatgtggaagatgtcgataatgaatctgatgaagatgacgatgaatatttgtttgattcaatatgtgctatttgtgacgatggaggagacatattatgctgtgatggcccatgtatgcgctctttccatgcaaaagaaggaagtggtgaagactcctgttgtgttacccttggatacactgaggcagaagttgaggcaatgaaattatttctttgcaagaattgtgagtataagcaacaccagtgtttcatctgcggagtgttggaaccttcagatggagaagcagccaaggtgtttttatgtaacaatgctacatgtgggcacttttaccacccgaaatgtgttgcccaacaacttcaccccatcaacattgatgaagcctcagaattggagaagaagataacagaagggttttcatttacatgcccaattcactggtgctttcattgcaaaggtttggaggatagaacacaagaacctttgcaatttgctgtttgcagacgctgtccaaagtcatatcacagaaagtgtttaccaagcgaaatttcctttgacgaaaatgaagaggacgatatcatcatacgggcttgggaattatcaaaaagaattttgatatactgcctggaccatgagattgatagtgaacttgagacacctgtcagagatcatatcaagtttccaaagattgaaaaaccacttcaatttgtaaagaagggatctagcttgttgcctaagaagaaaaagaggacttacagtgagacagttcttgagcaatctcccaaagatactgtgaaaaggaaaagcaaggttcacatgctagaaagggaacaaaacaaacaagacaccagagaagtttctgcaaagagtttcactcaaaaccttgttgacacacctgtaaagaaaaaagccaagttgaaagagaaaatacagttgccgtatgtggccaaggatcattttataagcagtccaaaatctgtgaaagagcaagaacaagagttggtacctttgcccttatctgccatcaggaagagttcatttcctaaagtggacagtgaaactgaaaagagggtgattaccatattgggaaataaagtgtcttcattgacaataaaagatgtaacgaggaattgcagtttgccatcaactcatgtatactctggcagattgactgacaagataccactgggaaagattgaacgttctgttcaggctgtagaagcagctttaaaaaagctggaaaatggaggtagtgtcaatgatgctaaagcagtatgtgaacctgaagttttaaggcagcttgcaaggtggcatagtaaactcagagtgtatatatcaccttttattcatggcacaaggtacagttcctttggtagacattttacaaaggtggagaaacttgttgagattgttgatagacttcactggtatgtggaaactggtgacatgatagtagatttctgctgtggggcaaatgattttagccgtcttatgaaagaaaaactcgacaaagttcagaagaagtgccatttcaagaattatgatcttatccaaccacagaatcgcttctgctttgaaaagagggattggatgactgtgcagccaaacgagctgcctcatggatcccaactaattatgggtcttaatcctccttttggagtcaaagcaagtcttgcgaacaaatttattgacaaagcattgacattcaagcctaagctcattgtactaattgtccctaaagaaactaaaaggttagatcagaggagaacaccttatgatttgatttgggaggacagtgagtgtctttctggcaagtccttctatttgcctggttctgtggatcttaatgataaaatagttgaagggtggaatgcatctgcgccacccctctatttgtggagtcatcctggttggacaaagaagcacatgcaagtggctgaagagcatggtcatacttgtatggggaagatagcttgccatgttgaagagagtaatctatcagatgacctgtccgtgaggaaacaatctgatgctacaaacaaactgaactcgagatcagggaaagagactccattcaatgacagaatgtccaatctacttgatgatggttctgctaggaagcaagcaagatctgaagaagagaagagaactctagggaagatagaacaccatgtgaaaaaggctaatataccagataacctcccagtgaagaaagaacctgaagcttccagcaaagtcatgtcgcattctggaaaagatagaaagattggcagatacaacaggaggagacatgacaacaggagcagcaaggggacacctgatcacacagagagcctcccccctgaaaagcaagtggaagttgcatatgaggaaacaagagttattcctagcaaaaagattgctcataatgaaaaaaagagcgcgcagtacaactacgagcaaactgcagcagggatgccaaacatgaggtctagaggaggggattctgacatgagtatctcacccccagtcagttgcaatgctcgaagcaaacccatgagctattccctgacgagaccaattgaacacttggatacgaatgctcaccttttggcagaagaacctagtgactctgtgctcaatagggttccaaatcatgacagttatttggcaatcaaagaggaatactgtgatggatttaagaggaaaaatgatcctatcttcagtcacattgatgatagctcaaggatgaggggctccagcatcgaagaagtgaccaagccgtatattactgctccaaacagtgatccgtggtctaaaggagatggcagcttttacaggcatccgagctcagaagatttaaacgctaatgctgatgtgcttatgccaggatacagtgcaagatatggacaaattggtggtgacagtaacccacaagctagtatggtcccactagcaacagattcaagactgcatggtggaacggttgctgataattacctctcggcaagatactcccttggatcttcaggtgctcgcgttagccaaccagctccaactgttcccccttttgggctctcaggtgcaagttcacaacgaggctcagtaatggacaggtattcgtatgggctttcgggtccgactggaacacagcgctcagttattgacaggtatgcgccgtccctcgatggaacgaacacaacaagatcgaggagctccttgcctgagcagtacccgttcggacaacctggctcttccggtggcgggtggcctcatcactgatcgctggaacttggtcctcagatttgaccagcaaaagtgcaaccgatttcttgagtccggtggagcctacaacctatctacggcctaactttttggatcctactagtcgtttcttcctggcgccttcgacgaagacatcacctgtgtctaccaatacagaagtgtagacttcaattcctacaaatacagaagtgtaggcttcaatcctattgtttgctctggatttctgtttatgagcgtatttacaagagtatgtttggtctatgttagtatattaggaatacaattccaaaaccgttgtaccgtgccaaagtttaatactatacgtttgggtctgtcgatgagaaaaaaggacgagtgggtgagaagatgctgccctccgcagaactcgatcaggccggttcctctgcgcgtcctgctatgagaggctaacctgagcccgacagaaccggcttggtcgatttgggacctggtaggccggtatttttttattgaagtgtaactttctaaattaggtcttgttggtttgcgttggattgcgtccggaatcgtttcaagtttatataaattagagaagcaatccggttagaaatcgtttcgat

SEQ ID NO: 25030 - DNA, 1660 bp, Zea Mays
caaacctcaaccgacactccccgtggggggcggtgccgtcgccggcgactcgccaattttgatttgaagaaaagaaaccaccagccaccacgcccgcggccgtcagccggaggtgaaggtatacagttggaaagattacacctattcagagacgtgaagtgcgagcttctgattatggttccagagcaagtttctggatgaacttccccaaaaatggttcacgacttactccttcacatcatgctgataattttaaatggaaagactactgcccaatggtgttcagaaatttgagggagatgttcaagattgatgcagcggattatatggtttccatttgtggaagtgacgcacttagggagctatcttctcctggaaagagtggaagtgtcttctttctatctcaggatgatcgatttatgatcaagactctacggaagtctgaagtgcaggttcttctacgaatgcttccagagtattatcaccatgtccgtacctatgagaacacactcataactaagttttttggcctccacagggttaaaccgtccagcagtcaaaagttccggtttgtagtgatgggaaacatgttttgcactgaacttagaattcaccggaggtttgacttgaaaggttcatccttaggccgctcaacagacaaagtaaaaatcgacgagaacacaacactgaaagacttggatctaaactattcattttatctcgagccttcttggcggcagactttgcttgcgcaaattgagaccgatagcaaatttctaaagcagcacgcaataatggattatagtttgcttcttggcgttcatttccgggctcctcaaagcctacggacacaggcatcctttcatcaagcaatcctaccagataggctggctgttctttcagaagaaggtgctctggaggaggatgttttgaacagtcctgaaggactggttttggttcagcgagctagtgatcaaaatgatgttgtcattggttcccatataaggggggcccgtcttcgatcatcaagtgcaagttttgaggaagtagatctcttgcttccaggcaccgcaaggctccagatccaacttggggttaacatgccggccagggcaaaacagacggttgaggatgatgacagtgaagataatggtcaggtgtatgatgtggtgctgtacctgggaataattgatatcttgcaggagtacagcataaggaagaagattgagcatgcttacaagtgcatccaatataactcattgtcaatatctgtcgtggaacccagtctctactcggagcgcttcctgaaattcattcaaactatctttcctgaaaattcataaaataaaatccagtaattcttcacctacaggagcaaagtgaaagaaacattgttcagtgtgcattgtggccctttgcaagttcaaattttacataatagaaggtgataacatactctgtccgtccatacttttggaagcagcagcagcacctgctgtcatccacgagctaagcatatagaagcagcagcacctgccagagacttatccatccatgtccctatattcaaacttcaatacagtttatagtgcaaaatagtgtttcgaataatggatacggtcattttaagatttgcttggatattcacctcaatccacat

SEQ ID NO: 25031 - DNA, 3695 bp, Zea Mays
gtctcctcctatccatttctccagtcgtttctctcccctcgcgctgcccatggccatcccggaggacctagaggggacctcgggcgatggcggggtgacgaatcgcgggagtagagggcggcgaaaaggcgcggcgaaggggcgcgggaggggcaggccgcggagcgccgacagatcctttccgccgccggcgatggctggggtggcggtcggggacagggtgctcagggagaggaggcacacgaccaacgttttctgcgagcgcgacacggatgttgacgatgagtccatttattttcaggatgatgttgagacagttaggtccaaggactcaaggagtggcgatgttttacagactgcaaaaaagaggaagaagggaggtgcagggaaggtttctgtcacaaaaaggtcgaaaagagagggtgaagaacaaaagaaggcatcaccctccaaggataaagattgtgctgaaactaatgggaaaaggaagatgttgactggggataatgccctgatgtgccaccagtgccagaggaatgataaagggagggtggtctggtgtaattcatgcagaaataagcgcttctgtgtgccatgcattgaaagatggtatcctaacttgtcagaagacgaatttgctgcaaaatgcccatattgtcgcaagaactgtaattgcaaaggatgccttagaatgagaggggttgaagagcctccaaagaaggaaatttctgaagaaaatcaaatctcttatgcttgcaatgttgtgcgcttgttgcttccctggttgagaaaactgcgacaggagcagatggaggagaagaaattggaggctaaaataaaaggtgttttggtgaatgagatgaagttggaacaagctgaatataatctagatgagcgtgtctactgcaataattgcaaaacttctatagttgattttcacagaagctgcaagtactgcttttatgatctgtgccttgactgctgtgtggagatccgcagaggtgagattcctggaggagaagagataatgagagtaaagcctgaagatagaggccgagcatatctttttggtactactaactcaaaggatgggagtaaaaggttctccatgaggaggcacagctcatccctggagaatgagccttccaatgtagtaggttctagtgagggggcaaataactctctggagctgtggaaagcagaaagtgatggtagcataccttgcccaccaaaggagctaggaggctgtggcggttcgattttggatctcaagtgtttttttccagaaaagatgctttcaaatttagaagaacgagctgacagaattatgaggagcgaagtatttgcaaaagcagtagccaaaagaagtgaccagtgcccttgttatgaccattcaggaaacataagaactcaggacgtgcgagagactgcaaatacgaaaggctcaagtgataaccatctctactgcccagttgccactgctatcaaggaggatgacttggcgcactttcagatgcactggacaaaaggcgaaccagttattgtttctgatgttctgcatttgacttctggtctaagttgggaaccattagttatgtggcgggcattgcgagagaaaaagactaatggtgacgtagaagatgagcactttgctgtcagggcattagattgccttgattggtgtgaggtcaggagttatatttcattgaatgtttgagtgcatcctgtgaccttttatatttatgtatatatttaaatgtttccgtttgtattcctcttagatgtgctgttacttatttttgtagacttccctaggtgcatttagagagatgttcatttccctagctgatttttgtagacttccctaggtccctttgtgctctgctgcatatctttgtcccatgctgattttcatggtcgtacaactcttctagaagatttctttattaccatgacaagaaacaggacatgctctacaagcagaacgcatcacatgacacactggcctgagatgcttaagctaaaggactggccgccatctagttcttttgatcagagattgcctcgccatggtgctgagtttatcagtgcattgccatttcctgagtacactgatcctcgatatggtccgctgaatcttacagtcaagctacctgatggtgcattgaagccagatcttggaccaaaaacttacatcgcttatggattttaccaagagttaggcaggggtgattctgtgaccaagcttcactgtgacatgtctgatgcggtaaatatattgacacacacagcacaagtgccctatgcgcgttatcaacttgagaagatagaggaaaccagaaagaaaatgaaagaacaagatcttcaggaactttatggtgtttcagaactaaacctatcatcaccttttactgattccaggaatataagtgctgatgaaatgtcaaagacctcatgtaactatggtttggacgtcaatgatgtaccacctgttaataatgaatctgaggtacaaagtggggcaggccagtgttcagattacattgacaaggatagaagttatgctgggatgcataacggggagagaaccggtggtgccttatgggatattttccgaagagaagattctgacaagatacaagattatcttaggaaacatgccacggaattccggcacatcttttgcaatcctgtgaagcaggttattcacccaattcacgatcagactttctacttaaccgaggagcataagagaaagctcaaggaagaatatggtgttgaaccctggacgtttgagcagaagcttggtgaagcggttttcattcctgctggatgtcctcaccaagtgaggaacttgaagtcttgcattaaggttgcgatggactttgtctccccagaaagcgtcaacgagtgcatgaaactgactggagagtttaggcggcttccacctgatcacagggctaaagaggataagctggagatcaagaagattgctcttcatgctctgaaccaagtagtaaatttcttggatccttcctcggagtggtcgaagagttggtttgcccaactcaagaacaaaaaaaaggctggagctgaagaacaggagaagcctaaaaggaagcgtggccgcccatgtcgcaagtccaacgatgaagctgctggcgataggcacagaaagaagggcggccgccaaagaggtcggaagaggggatacggcaagtccaaagatggcgctggcgctgttgatgtgaagcctcctaaaaggcagcgcaatctcctgaaaggctctggcaatcgtgtaggtggttgattgtttcactgctgactgggaagatggaaggcgtaagggctgtaccgacccaaccttgacgtggttattttggtaccaggttgtaagtgtagactctagattgtagaatagaccaggcatttcgtcacccctgggcgccattatggcgtcttgcttttgttcatatgtggcgattgccggttgacaccgttttggaagaataatatgctagatgctcgttgtaccagactcttcatgtagcgggctatggtgaattgctgttcagcatgtctgatgctgatgttggtaattgacctgaatagatgtggtcatttgaactctctggattctgattttacatatccaatccattggctgaggctgagcattcttagttgaaaaacga

SEQ ID NO: 25032 - DNA, 111 bp, Zea Mays
caacgaggagaatgacttgatctaggtggcgtctcccagttgactttatggcgacaagaatggaatttagtttgttttatatttatccttttattttgtaagacttccgct

SEQ ID NO: 25033 - DNA, 2208 bp, Zea Mays
ttatttcttttgtgtttgtgtgtacctctatttttagatgaaaaaaaacacaacatgcagcatccatcaagagctttatttcctggttactgaaaatgttatgcgtcttcacgttgatggtttcctaactgctgaggcccccctttgttcactgtttgatgagccagacagtcaggatgattcaaaccaaattagcttagttggaaatgatggcaagcttgaaggctatatctataatatcgaggtttcatatgtactaggagctataaaagaacaatacacaaagaacccaccatttaagttatctattgactattcatgctctgatggaatcgaagagggtgatgacggcatttggagcatcgttggtgggaaggcatcttgccggagaaatttcattttggaagtagtactaaccaacgcttttggtgaacctgtgaaggataaagaggtcgtttcttcacttgtctatgctgatgatggaacagtagttgcaaaatcaagggatgattctgagcctcctttgcttattacttgcgaaggacttgaatatgcagcgataagcaggcctctaccaattatacgtgggcgagcactatttaaactcaagatatctcagctctcttccaaatgtgacaataagctcttccgtattaaattctctacacttcacatgcaaagatattcttttctggaagcatattccaaaccgattcgctgtatatctcgaagccgcactgtccgccccttgggtcctacaaagcgggcgagttctgcaacagcaaatgaaattgacatgctcagtaatggccaagggtttgttagtactgacaaagtaaatagtcgtggacattcagtgtgtctgcatacgcccatgtttcccaagatagaagatggaatggtggaggtagtagaggcccacaaaatagtatcacagaataagaatgccagaaaagtggtagtaagcaaagaagcacagaatgtaatagggactgattcctcaacatccaactatgacagctttgattcaggaagttcttggagtggatcagaaggagatgatggtattgaaaccttttcagacgctgtggttttcagatactgtctagacagcacatatgaccggtcaaagtttcttagaggtgcatctcttactgttaacaaagatgacttggtaaaacttgcagaccgagtctcgttgtatagtggatgctcccaccacagaaaccaaatattaatgtcgaagagattgctcagagagggtgctgacacttggaacatgatctcaaagaacaatgaacgtgctctttggtcatctgccattccagagatcataacaaaatttacgaacattgcccattctgtgcgtaggggtttatcagagcaggatcttgaggttttaagaggcattgctggttgtggtgaggacataggaagagatgaatttgataggctatggtgctggttatacccagtggctgtttcattatcgagagagagaattaaaaagctgtgggattgcacagcacctagatggatagagggcttgattacaacagaagaagctgagagtgcactaagaagttccagggaattgttaaaggaggcaggaacatttgttctcagatttcctatcacccgaagctggccacatccagatgctggaagcctagttgtcacttacattggctctgatagctcaattcatcataggctactctctcttgattccagtgatgctagcgctgagaaactgcaagatttgctgctccaggaaccggaactatcacaattgggcagggttgatcgggtctcaatcaccatccggagatgaccgaggcttcaaacggttaaacttacattcaaaagcaggatttaggatgctgccacgagaagagggtcagcagcagctcgacgcatacaagttcattgtcatccaagagcatagcccataacacccattgcctgttttttttttgaatcaaacacccattgcctgttgttaccatgtacaggttgtaaattggttcccttggtagtttagttcgtacaaagagaggtactagtgaggtctagttgcttcagaaaaccaacagtaacatgagctaccatgtgtgtcgcaaaaagaaagaagctgtcatcatgtgcctcgaaactggaggattttcagtggctaacatgttgcatatagaattgacagttgattta

SEQ ID NO: 25034 - DNA, 2429 bp, Zea Mays
gtgtgtcaaatcgaacgcacatgcggcgcgactccctttcacggcctccccgcgtctcagcctacacgtccgagccgccagccgtgcgctttaagtgagcgcacccacgaaaagcagccaggcagcggagccggagagaagaagcagcagtagcagcagggccgtcaacaccatggcggtgggcgcgaccgccacgaagctcctcccgtcggcggccgcggccgcgcgccgcccatcgatgctccacctcgcggccgtcgccgtcctctgctcgctgtcctacctcctcggcatctggcaccacggcggcttctccgcggggcccgccgccggcgactcctcctcctcggtctctatcgccaccgccgtctcctgcgccacccccgccccgacgaccgcctcctcgtctccccccgcgggaccgctcgacttcgccgcgcaccacacggcggagggggtggaggcggagggcgcgctccgccatcgcaactacgaagcatgccccgccaagtactccgagtacacgccctgcgaggacgtggagcgttccttgcggttcccccgcgaccgcctcgtctaccgggagcgccactgccccgcggccggcgagcgcctccggtgcctcgtcccggcgcccaagggctaccgcaacccgttcccgtggccggccagccgcgacgtcgcctggttcgccaacgtgccgcacaaggagctcagcgtcgagaaggcggtgcagaattggatccgcgtcgacggcgacaagttccgcttccccgggggcggcaccatgttccctcgcggcgccggcgcctacatcgacgacatcggcaagcttatccccctccacgacggatccatccggaccgctcttgacaccggctgcggggtggcgagctggggagcctacttgctgtcacgcaacatccttgccatgtccttcgccccgcgagactcccacgaggcgcaggttcagtttgcactagagcgtggtgtgccggcgatgattggggtccttgcctccaatcaactcacttatccggcacgttcctttgacatggcgcattgctctcgttgcctcatcccatggcagctttacgacgggctgtacttgatagaggttgatcgtatcctgcgtcctggaggttattggattttgtctggaccaccaataaactggaagaaacactggaaggggtgggacaggactaaagaagacctggacgcagagcagaaagccatcgaggcagttgccaggagcctatgttggaagaagatcaaggaggagggcgacattgctatctggcagaaaccaactaaccacattcattgcaaggccatccacaaagttatcaagtcaccgcccttctgttctaacaaaaacccagatgctgcctggtacgacaagatggaggcttgcataactccactaccagaggtcagtgacttaaaggaggttgctggcggctcgttgaagaaatggccggagcggctcactgcagtgccgcccaggattgccagtggcagcatcgagggggtcacggaagagatgtttgtggaagatactgagttatggaagaagagagttgggcactacaagtccgtgattgctcaactcggccagaaaggccggtaccgcaacttactggatatgaatgcaaagtttggcggattcgctgcggcattggtgaatgaccccttgtgggtcatgaacatggtccctactgtggggaactcaacaacccttggggtaatatacgagcgtggcctcattgggagctaccaggactggtgagggcatgtccacttatccccggacctacgacctcattcatgcagatacagtgttcacactgtacaatggcagatgtgaggcggagaacattctgctcgaaatggacagaattctgaggccagagggcacggtcatcatcagagatgacgtggacctcttagtgaagataaagagcatggcggacgggatgagatggaatagccagatcgtggatcacgaagatggtccgctcgtccgtgagaagctcctccttgttgtgaagacatactggactctcgatggcagcgaacaatagcaataacgtcaaataaaagagttggaatgattatatggcatgatcggcagatgtgactgcctacccatttgccctgtgaatctggtggagtttgttttctgtttttttggggggtattcattttaggagatagttaacataatggagagataatctccttgttaagatatcaaagagcagcccagcacagattttgacataaaaacaacaaattgtgcgaagtgggtaaatagaaagtacagtactgggatcagttctgtctccgggtgcacattgttttgttgtacttatgatgttctgtgatcccttttatatgaatgtcataaaaatctaaactaggac

SEQ ID NO: 25035 - DNA, 2150 bp, Zea Mays
gcaaaatgctcattcagccaaaattctggttatagtagctgtatagacagtgtaatcactttgtcagaaatgccttctgcatccaagtccaaggcaaaagaaagatcagctgcaaaagttgcaaaagagcaacccaaggttgctgcaaagccaatgggaaatgctacacttgcaagttcttataacaacctgtctggaaagttccatgttctggaaccatcaagctctttgttgggtagccaaggcatcgataaattcaggaatacagatgaaatagatgagcattctcgcagctcccatggtacaggggatttcgattgtgcctccaacaatggtagctgttctggtgactcagaggatacaaaggaaaaatcaaccagcactgcgtcccgagtagactctgttcctggatgtgatattgataaacgtgagaagattagacagaaaaatgagaagaagcatcaaagacagaaggagaggcgtgcccaagagttacacgagcgttgtaagggatacattatgtccagaaagttggaagcacttgcgcagaagcttgttgcgatgggtttctcagcagatcaagcaacgatggctcttatacaaaatgagggttgcgttgaggagtctgttacctggctctgcaactttgatgccagtgaggaagctaaacaacaacttgtagctgatcaacagtctggagttaacttgaagattgatatagctgatgagctttcaaagattgtgagcttggaggcaaaatataagtgtacaaagcaagaagttgaaagggcagttgtttcctgtgaaggtgatctagaaagggccgaggaggccttgaagacacacaagcaagaatcaactgcaatcccaccaaagcctgaggggtctggctattcaagtggcttgcctaataagccgcaagttgtacttgcacagaaccctgcaaggcctcaaacaaatggattatcatcagtaggatctcatcagatgagaagagaggagaaggacataaactataagcttttgatgaatggtagtggtccaaaggaacctgcaattaaaggttttcagccactggcaacaccgattaagccagatttggtccgtcagcaatttgttcaacctgagaagagacgtctcaatcccaactcgaatccatcagttccttctgtggcatcgtctcctttgcctgttgcagtgccacaagtgaagccagacatgcggcatgtggcagggaccaatgaggtgaaaagtttgatgcccaatggaagcttgcgagagtctgtgattgtaatgcagcgtcctcaatctgcaggtaccaaacagagcctaccatccactagccatagtatgtttgtgtcagaaccatctgcaagggattggtacttaaatggcgtgtcaggtgtggatatgatgttgaatgggggcttaggtcatggactaaggaatatgagtttggacagtgctagttctgccaggtcgtttgggcatgcaaaccatcaacaaaatttggtttctaatcctatagagctggctgccaatggttggggtggcacctggagttctggaggtacatcatcttcccgttctgtggtgtcatcactcggggcatttagagggtggaatgcatccgagtcctctgcattgcctcattctgattggagaaccaacggggcagcaccttatgactacacctcagtagactggagcgtcgacacaacactattgaacccagcagcaaagagcgagctgctgtcggacacatggtcaaccatgttcatgggtggcagatcaacaaggacacctgggaacctcagtggtgcaggcatcgctgggttgtatgacagtaaccgtccaatggatcctgctccttcggctcgtccatatgagtggcctactttctgcaggggaggatcttcctagtttccccaaccctgtaggcaagaggccattgaataaaaaaagtaaaagctgtcatttgtttcttttcttgttttggtctcagttgcagttggttgaaaaagttttactttgtctatcgaaccgagcttgtgtacccttgactgttggccgagataagtcatctttctgtgaaatcgttgtgcatgaaaaatgaaggaagagaactgaatctatcttggctgaaatgc

SEQ ID NO: 25036 - DNA, 2631 bp, Zea Mays
gtacttccctcccttgtatgcctgcctctgccagcgcgttgtcggcgaggggactgcccccgccgccgccgctcgcgtcggctgccgtcagcccgtcacccacccacgcgacctccggtgatggcagaggccgacctcacgctgcacgacgccggcggcggcgccagggacaagccggaccggaaagccgacgtcttcgcggatcttggctcgccggtctcgccgctgcgcctgcgcccggcagcgacgccctccacctcgtcctcctcgtccggctccgccaagtcgccggcgcccggtaatgcggccgcggggaggggaggccgggggaaccactcgggcgagctggcgcaggagagcaccaacccgcctggccaccgtcgcgccggatctggcccgctcattttctccggtgccagcagcagcaccaccgccagctcgccgctcaccaatgcgctccccaccggcaacatctgccgcgtcgccggggcggcggcggcggcagcagccacgcagccgccgcgcgctcgcccggccgtgctcggatccggtaccggccactacggccacggcagcatcatgcgccgcggcgggggagcgactcccgcgaggaccagcggtgacgcggccccgctgctccacggccacggcagcaattcctcgaggtcgaggtccccggcgagctgccctgcgccagcgccgccggccaccagcggtggcctgcaggagattactcgcgcggggaacgagtggtacaagaagggccgccacgccgacgcgctgcgccactacgaccgtgccgtggcgctgtgccccgacagcgccgcgtgccgcggcaaccgcgccgccgcgctcatcgggctcgggcgcctagcagaagcgttccgcgagtgtgaggaggccgtccgcctcgatccggccagcggccgcgcgcacggccgcctcgccggcttatgcctcaggcttgggatggttgagaaggcaaagacgcacttcacactggctggaagtgcaaaccagtctgatccggctgagtggcagaagctgcatgaggtagagatccatcaaggcagatgcatggatgcaaggaaaattggagactggaagagtgcactcagggaagccgacgcagccatcgctgttggagcggactcctctcgattgcttcttgccttgaggtcagaagcgttgctttggttgcacaaattagaggaagctgatttgactattacaagcttgttgaaactggatgacgcgtcgttgccttcgacgccaaccagagtctcaggcatgtcagctgactcttatgtccatatcgtccaagccaaggtcaacgtgacatttggaaggttcgattcagctgtcgcactggctgagaaggctaagcttattgatggcgtgagctcagaggttgaagtgatcctaaacaacgtgagattagtcgcattggctcgagcccgggggaatgacctttttaaggcagcttgctggtcaaagctgggtcggtgggcaaaagctgttgaggactgcagcgaggccctaagagtccagcctaactacacaaaggctctgctaaggcgtgcggcgtcatatgcaaagcttgagcgctgggcggactgtgtgcgggactacgaggtgcttcgcaaggatcttcctggtgacactgaggttgcagagtccttgttccatgcccaagttgcattaaagacagcccgtggagaggtggtatctaatatgaagtttggaggggtagttgaagaaattatcagcttagagcaactccaagatgttatccgttcacctggtgagtttctcctctacatgcacctagcctgttgtaggcatttcacctccttcttggttcttgttgtgctaagaagtggacagttaaccaggtgtatccgttctttacttcatggctacaatgaacaagcaatgtgcacaaattaccccgtctgtggactccctttgctccgagtgccctgcattgaatttcctgaaggtaaacgttgacgagcgccctctggtagcaagcgcggagaacgtgcgagtagtcccaagcttcaagatttacaaggacggcacgagagtgaaggagatggtctgccctagcttgcaggtcttgcgctattccgtgaggcactatgctgtctccagctcttgaggtccggcactcagttcgctggccctgttagtgtcaccacatgccaacatttcaccaacaaatctgtccctctatagtatcacagcatttcccccttcccatcgcgtcacttaggctcctcctaccgcaacatctctagaaccatttgatccaagcttaagcaattctcatgcctcgctttccaaagtgatgacttcaactcctgaagaaaggctccctgtggtggtgttcagggaataggtaaacacggctggctggttttctcattacatgtacatatattcccgtatagcaacacatcaaacccattgatagattggttcactgtggagaaaaggcggggttcggacttggatgaagagtacaggtctagttgccattgaatgtagagatggagaagatagatgggtcgtgttgttggtatggtacgtagagagacagaggagggaggtggctggtgtggttca

SEQ ID NO: 25037 - DNA, 1479 bp, Zea Mays
gttacattaccccattaaaatgtggatcggaagtacaaacactattatcatcggatgcaacttgtaatgtcatcgtttgatatggttgctggttctggagctgccaagccttatactgcagttgccctccagacaatctcacggcatttccgatgtctaaaggatgctatcaatgatcaaattagtgttatcaggaagaaacttggagaggatgacgatgcatctggcaaagagggcaaactaattcgccttcgttatatcgatcagcaaataaggcaacagcgagctttccaacagtatggtatgctacagcaaaatgcttggaggccacagagggggctacctgaaaattcagtctcgattctccgggcttggctttttgaacacttccttcacccgtatccaaaagactctgaaaagctaatgttatcgagacaaactgggttaacaagaagtcagatttcaaattggttcatcaatgcccgtgtccggctgtggaagccaatgatcgaagacatgtacaaagaagagataggtgaggcagagctagactccaactcttcctctgacaatgtgcagccgaacaaggacaagccgccatcttccgaagaaaaggaccataagacctcaacaagccaggtttgccaaaccagccagcttggcgaatccaaagccaacattggtggagtggtgagcttttgtggagcgccagccggcggcttccacaacgatgccaaccccgatgacagcttcatgagcctgatgctgaaggcccagagaccgggcgaaaccgatggcagcggtctcctccatgatgccgtcgctcatcactccgatgagagcgcgcggttcatggcgtaccacctgacagagtttgggaggtatgggaacaacaacgtctcactgactctggggttgcagcacgccgagaacacccagccgggcttccccggcgtcagagaccaagacatctacaactccacagctcctctcaacgtcacctccacatcttcagagtatgattcggcgagccaaatagatcaacaacggcagctgtttgaggtgtcacctctgatgcatgatttcgtggcctgaatttcagctgacgcactggaaaacgtggggaagtgacttgtcatttgtagtgccaggacgaacaatatgcctggactgaattttcaggcgtggaaatgtagctgtagttgtaattggggtacagaatggacgaggtatatagcataaatgttatgtaaatttagtgggggcaggggtgatagtggtaaagaaatcctgtaaagatggaatacattttatacgtgtaaaatacgagtatttaagggccacgctgtaaaaatagatttacctgtaactgtaacgagtgtttgtaatgagtgtaaagaactgccacatgccatattttcgatgggtgagaagatatagaaatcttattttctttgttaattgttaggtagcatggct

SEQ ID NO: 25038 - DNA, 3843 bp, Zea Mays
cccccctccagcttttcttttgcgcagccaccctctggcttgccgttaatttctttcccgtttcactcctcgcgtttttacacttggcccccaatccaatccccgccaggccgccatgccgacgccggtgcccgccgcgcgccagtgcctctccccgcccgccgtcacggccctcgacgccgccgtcgcctccgcgcgccgacgggcccacgcgcagaccacctcccttcacctcatcgcctcgctcctcgcccccaccgccgcgccgctgctccgcgacgcgctcgcccgcgcccgcagcgccgcctactccccgcgcctccagctcaaggcgctcgacctctgcttcgccgtctccctcgaccgcctcccgtccacccccacctccgcctccacccccacctcacacgagccccccgtcgccaactccctcatggccgccatcaagcgctcgcaggccaaccagcgccggaacccggacacgttccacttctatcaccatcaggcggcgcccacctcccccaacgccatcaaggtcgacctctcccaccttgtcctcgccatcctcgacgacccgctcgtcagccgcgtcttcgccgacgcgggattccgcagcaacgagatcaaggtcgccatcctccgccccgcgccgcccgtcccgctgctcggccgcctccccacgcgcgcgcgcccgccgccgctcttcctctgcagctttgccgccgcggacgacgccgacgtcccctcgcccgcgcccgccctcgcgggggccgcaccgggggaggacaactgccgccgcatcaccgacatcctcgcccgcggacgcaaccccatgctcgtcggcgtcggggccgcctccgcagccgcagatttcgccaaggcgtccccgtaccgcatcgtccccatcggccccgcctctgccaataatcaggcggcaccgacgacgcccacctctggccttatcttcagcatcggtgatctcaaggacctggtgcccgacgaggccgacctgcaggacgcggctcgccgggtggtggcggaggtcacgcgcctgctcgagacgcacagacctgctgcccgccaaacccaaacggtctgggtcatgggctggtccgccacctacgagacctacctcgccttcctttccaagttcccactcgtcgacaaggactgggaactccagctgctgccgatcaccgccgtgcgcgacgccggccctgcagcgggactcgtgcctcctcctccagctccagccaccacggtcgctgccttgtccatgcctgccactacaagcttcgcggagtcatttgttccttttggaggtcttttgtgcgatacctatgaagcaaatagtctcacaacaaatttctgccctcaggctctacgatgtcaacattgcaacgatagatatgagcaagaagttgcctctatcattagaggaagtggcgttacagctgatgctcaccaagaaggtctaccttctctgttgcagaatggcggcatgatgggttctaacaatgagtttgatgcagtcaagtttttcttcagtgcaggttagagatgatcaaatggtattgagtacaaaaatattgaatctagagaagaagtggaatgagtactgtgtacgtctccatcaaggttgcaatagaatcaacagagatccttgccagttatttccacatcacattggtgttcgagttgacagggaaagatgtgcaaatccaaaccaaagcgcacagacaattgcacttcagagggatattattaaaccttgtgcattgtcttctccatacaccaatataactgcaaagagtatttcagcaccagaccaaataaatgcagaccttgtactaaaccttcaagtgaggcagtcgaggagtaatgaaccccttcaaagtggggttgtgccattccaacatatcaactcatcaaattataacaaacccgaagaatcatctgctgcacctgtgacaactgatttagtgttggccacccctcgtggatcttccttcaaggattcaagtagtgccctgtgtaaacgtgtagaggacattgaagagacaatccagctgatgcctaacaaggttgacgatctgaatcttaaacctcctcacttgtctatacaaccttacacttgctccaagagttcctcatcaaattgggagcaaacatcacctagtgctctgcattcaacatctttaggaggcacttctgcctttggccaatggcagaggccttcaccgctcgcaacacaaagttttgatttgagcaattacaagctacttatggaacacctgtttaaggttgttgggaggcaggaggaagcattgagtgctatttgtgcatccattgtgcggtgcaggtcgatggagaggcgtcgtggtgcaaacaaaaagaacgacatatggtttagtttttatggccctgacagcattgccaagcggagagttggtgtggcacttgctgagctaatgcatggtagctcagggaacttgatatatctggacctaagcctcaatgattggggtaaccctagtttcagaggaaagcgtgccaccgactgtatctttgaagagctgagaaagaagcggcgatcggttatcttccttgacaatattgacaaagccgattgccttgttcaggagagcctgattcatgcaatggagactggtaggtacaaggacttgcatgggggacgagtgactgatcttaatgactcgattgtggtgttgtctacaagaatgatccaaggatgccaggatgcttctcttggggtggaagagggcaatgctttttcagaagaaaaggctgtggcagctcgtgggcatcaactgaagatcatagttgagccgggcacaaccaacatcggtggaggcaacgttgtagtttcgtcaaggcattccttgggaagcagtgaagcctcaagttattccagtaagcggaagctccacatctctgatgggcaagaaaagacagaagaatcggcaagcacttcaaagcgactgcatagaacatcaagcatcccattcgacttgaacctcccaggcgacgatgaggaagcccatgatgatggtgatgatgacaagagcagtggcagccacgaaaactatctagagggatctgtcggaaacctcttgcgttgggtggatggttcaatcaatttcaagccatttgactttggcaagctttgtgaggacatcctgcaggagttcagcaatactaccagcaaaattctgggcaccagggggtgcaggctggagatcgacgctggggctatggagcaggtagtggcagcggcatgggcatccgattcgcatgagaatgagaagaggcctgtgcggacgtgggtggagcaggtgtttggcaggagccttgagcaggtcaagatgaggtgtgagaatctgagcagctgtaccctgagactggtttcctgtgaggtgaaagaagatggttttggagctttgcttccctcgagaataattctggattggtgatggtgatatgtgtcgtttgcattattgctgctagctatctagctgtaagtattggttagttagctgacaccacccaccgtactgtagcatatataggttcatatcattatttggtggcttcaaaataatgtaattaagctggagtatgtacgtacggtagtctagcaattaaactactcgttcaagtccatgacctggggatggatggctgtatttattgttgctcctgcgtgtatatatatatttgtaagaccgacgtgatggccttttcatgtggaattccatatactgatgtcatttaactgtctgtgcaagacaattgcataattcacaagtatggaaagcaaaa

SEQ ID NO: 25039 - DNA, 2704 bp, Zea Mays
gagcacaagtgttttggtggctggaatgacttagccttttctggttttctcttctaatatagccaatgttcgtctatgtggccaggccacatgccccaagaacagaaaaggttgtgagcataggatttcaacctgggtttgatccatacaagattgtaagtgcatctcaagctggagacatccagtttcttgatgttagaagggcagcagaaccctacctgactattgaggcacacaggggttcacttacagcattagtggttcatcgttatgccccagttgttgctagtggctcagccaagcaaatgattaaagtgtttagtcttggtggggagcagttgacgataattgggtacctgccatcttttatgggccaaagaataggcagtgtaaattgcctttcttttcacccatacaagtcactcctggctgctggtgctggtgacaatgctctggtctctatctatgctgaggaaaattacaaacatgcagtagctggtctggtgcattattttacagcgacggtgtctagggtgaggaattttctttgggaaatcaaggatcaggtccatattgtcatctctagtccttgcgagaggccctcaccggcggcggcgagtcaccgccttctgaggaagaagccactgtcagacacaggcgagggagtaaggattccccaaccccaaccccaaccccaaccccccaagaagcaccgcacagaaccctctgctcctctcaccctcacgctccaaggcggcggcgccatgcacggcggaggcgcggcctcgcccgatgccgccatatgcatctccccagaagctgggcccatcgtcggggtcgcccccgccgggatcagggtcgaaaactgctacgtgttcaagagccggctgcaggagtatgctcagagggttggcattccaaccccggagtaccacacgctgaaagaaggcccatctcatgaacctgtcttcaagtccacagtgttcgttaataataccaagtatgagtcgctgcctgggttcttcagccggaaggctgcagaacagtctgccgcggaagttgcgctcatggagatagccatgtccgctccggtgaccgaaattaggaacatgccagcagttcaagaaactggcctgtgcaagaatctccttcaggagtatgctcagaagatgaattacgccattccatcttatatttgcactaaacaagcttcgggtgtagctcctttcgtatgcagtgttgagattggtggcatcctatacattggtgctgcagctaggacaaagaaggaggcagagataaaagctgcccgaactgctcttcttgcaatccaaagtcaatcagaaggtggtgcaaatggtgccaaaaagtacattgttgttcctgggcaaaggccagataaggagacgaataaaaatccaactgaaacccccataccacttagagtcaagaagcgtggttccaggaagaaatggaacaagaggaaattcaggaggatggctgaccgaattgttgatgctggaaaggatgcagaggggcttggaacgcttctacatgatgactatgaggaagctagaagaataggatatgagttacctacagatactgctatggttcaatttaacaaggaagttgtaatgacacaacctggtgaaggagataggatagtacaattggagccacccagagatcctgcagaggtccaatataacaaggaagctagaagtgttgaacaggacccacccagagatcctgcagaggtccaacataacaaggaagctagaagtgttgaacaggacccacccagagatcctgcagaggtccaacataacaaggaagctagaactgtcgaacaggacccacccagcaacacagaagtgtggaagcctgacaataaggctacaactacagagcaggagtcggtgagcgctttcatagcattgagatctaatggggattctacagatgtggaggcggcaccaggcgataccttgatgatgcagggccaggagtcggaagccacaatgcaagaagcatctcacgctggtgaacaggcccagcctaactaggaacctgaaagcaaaaaaaacttcctgaacaggaagaccgaaatgtaggtcgaatgcatgcattgctgtaggagaataagtccactggaggtacatgagcctaaaataatttgtggagtggtggttgactccagtggtaagtgccttccagagtgtaccggcatgcccaaaactgaaatttccggtttagatagaattgggggcgcggaagagggtgccatgtgtgtgtttgtgtgtgttgcctgtggatggaggaattgatgggagtatgtgaactgatgtagctagtctatgtttgttaccattgagggcttgttcggttagctctcaatccatgtggattgagcgggattggatgggtttgaatcccaaacagctcaaacttcttcacaattttttccaatcccatccaatccatgtgtattgggaataaccgaacaagccctgatgatgattgtgtttggccatgttttcactgtcatattggttggcgaccgctacttgcatgcacaatgcattcgaggtagccggtccaagcctccatttggtcactggatgattgcttaaatgatgtttgagttctcttgtgttaaattattaatgcacaaggaaaataaaaacaattgcaaactgga

SEQ ID NO: 25040 - DNA, 4496 bp, Zea Mays
cgatcgcctacgccccacgcaacgccacgagcccacgacgcaccccgcaagcgaagcaaagcaagccccaggcggcgccgccggcggaggacgcgatggggaataagatcgcgcggacgacgcaggcgtcggcgacggagtactacctccacgacctgccgtccacctacaatctcgtgctcctcgacgtcgtcagccgcggccgcttcctcaagtccgtccgctgcaagcacgacgaggggttgctcctcgtcaaggtctactttaagcgcgccggcgagtccatagacctcaaggagcacgagcggaggctggagcggattaggaacgcgttcaaggggatcgaggggtcccacgtatggcccttccaggtttggctgcaaacagataaggcagcatatctcttgagacaatacttcttcagcaacttgcaagatcggttgagtacacgccctttcctcagtcaggttgcaaagaaatggcttgcctttcagttaattcatgcagtggaacagagccatagtaagggaatttgccatggtgacataaaatgtgaaaatgtgctcgttacttcttggaattggctatatcttgcggactttgcatcattcaagccaacgtatatcccggatgatgacccgtctgatttctcattctactttgacactggaggaagacgacgatgctatctagcacctgaaagattctatgaaagtggtggtgaatcccaagttgcagcagacgcacctctgcaaccatctatggatatattttctcttgggtgtgttcttgctgaacttttccttgaaggccagccactttttgagctttctcaacttctggcttaccggcgtggtcaatatgaccccatacataccctagaaaagatacaagatactggtatccgtgacatgatacttcacatgatccagttggaccccaaaaaaagggtaccatgtcgaagctatctgcagaaatatgaatctgttgtgttcccattttatttttcaaaatttctgcacaagttcttctcggatatcgttccacttgattccgatgctagggttgagaagactcaagaaaattttggaaagatacaggaaataatgatgggtagttcaacaattgaacaaattgagaggtctacatcgtgtgagcatagtgaaccatctgggagaaaaggcatggaaggggaaattttaaactcgccaggaaattatagaaatagcacatctgtatttaagaaaaatactcctgtagaccatcaacatattattggagatatcaatttcctcctcaaagaagtggagggcaggagtaacaacacaagcacaaaggtcacaaaagacacttatcattttgttgcaccgagcattacctgtgcaaatggtgttcagtcctctcatctagttaatccagcaggaagacaaattggaactggtttgatgggccacaaacatgttgtatctcatgtgaagatctcaaagagtaacatacgctccttggtggctacttatgatgatcaatcagatacctatagttttgatatttttcagcagacagactccaagattcaccagcgaagaggcaagataatttttttcgccagcttgcagaactgaggaaatctatttatgagatagtgcaagatttggtgatgggacaaaagcagacacctaatacccgtagagctcttctgcaggatataggttatttgtgttacttctttgggcacaaacaaagtaacgattttcttcttcctatacttccagcatttctaaatgatcatgatgagcagctccgtgcagttttctttggccagattgtctatgtttgctattttattggagcaagaagtgttgaggaatatcttctgccatatcttgaacaggcactaagtgatgacatggaggctgtccttgtaaatgcacttgattgcttgaccatgatgtgcagaagtggttatttgaggaaaagagtaattgttggtctattggtaaagattctccccctgctccggtatccaatcaattgggttaaacagtctgctgtaagatttgttgctgcctgcagcgagagcttaggatctgtagatacttatgtgtatctttctcctcatctaaggcagttcctacacatggagccaccttcattggcctctgaaactgctcttctttcatgtcttaagcctccactaccaaaatcaatcttctatgaaggtttagagcatgctcaggacattggagacattttactgaagagcagtggcaagaaagaacagatagtacatggtggaagatatcctggtacagcacaaagtggatccttggccaaccttgaagatatcctgcgaccgaaaggccctaatatttccagcagcatgtccttgtatgtcaaaaactctgtttcttttgaaaaatcactatattctggttttgctctgcatgcatctgctgcaaatagctccttttatgatggcttatctaaaggaataccatcatattctttttgtactgataataagcggggtttaggagaaacacacatggtccctgattcatcagtgtataaagcttcaataaggctaccttggttggaaccaaaccgtcctgccatgcagaccagagatgatcattttagtagcacgcgacaagatttcagcatcaatgactctatgaagagcaattcctctttgcaaggggatatcattccgaactctgatactggagggttgcctttctccagatcagcagtgaacttggagactggatggaagcctcgtggaattctagtggcacatctccaggagcatcgctcttctgtcaatgacattgccgtatcaaatgataataccttttttgtgactgcttctgatgactcaagtatcaaaatatgggatacaagaaaattggaaaaggacattgctttcagatctaggttaacatacagcatgggtaatagccgagctctatgtacgacaatggttcatggtacttcacaggttattgtcggtgccagcgatggaacattacacttgttttctgtggattgtgcacgcagcgttgggactgttgtggaaaggtatgctggaattgttgatgtaaaaaggaacgagattaaagaagacgcaattctcagcgttgtaaattgttcaaccgacagctttagcccgactgttcttttcagcactgaacattgtggcatccataaatgggatacaagaaccaactcagaatcttggtcttttaaatcctctccggaggagggctatatatcggcacttgttgtgggcccgtgtgggaattggttcatctcaggttcttcgagaggcgtccttacactgtgggataataggtttttagtacctgttaaatcgtggaattattcaacattaagcccaatagagaaactatgcttgcttatacctccaccaagttcgatatcctctgctggaaggcctttagtttttgttgccgctggatgcaacgaagtttctctgtggaatgctgagaatggaaactgccatcagatgtttagaacagcaagcactgacaatgaagctgtgatgtcaaaggcgccatcgaggcctgttaacaagccagtcatcaaagatataaggcgagcaggcaattataagtacagaatcgatgaattgaatgacccacctgtacgccatccagggatacgttctttgctgcccttgccaggtggtgatctattaactggaggaacagatttgaagattcgttactgggatcaagcaaggcctgagcaaagcttctgtattgctggtccctcggcgaaagaagtccgttcggcaaaaggagatatcttggagaaagcagttggaaacgatgagtcttacgatataagatccagttttggaatacaggtcgtgcaggaaatgtacaaacagagtagctcggtctccggtttgacgcccaagactcagctcgcggtggcagctgcagattctgcagggtgccatcgtgacgcaatactcgcgttggcatccttcaacttgtctagccagagattggtatcaggcagcagagacggcgctgtcaaagtgtggaaatagcttctccagcatggggtaagattacaagtccacaggcgtgtacatattttggcctgtctagtgctcatacagtacatatgccactagttattgctgtacagaagattattccgatcaatacaagtcaaatttgacatgtacgctttcatccggtgtgaccacctcatctgtttcggttgatataaactataatcacttatcttataggagtatcgtggaatagcaaaaaataaaataaaataatcatgacgaataggaggcaggaggctgtccgactacaactgtatagggctccaatgtctaatcatactcctctacacaagaagtgtttgtagatggctgttattttggataatgaagggcctctaggtagtgttggggccgcaattaaaagaggcctggatgctgaattggc

SEQ ID NO: 25041 - DNA, 2402 bp, Zea Mays
gcgacgcgaagagggcagcagcaagcagccgttcccccaaaaaaggccagagctcagcagagccccgcaggccgcacccaccagaaaccccagtcgatcggcggcggcgatgtcgctgtcctcggtgaagatcggcgaggaggtttggctcacatgcctctcccacgccctcactaccgagaccgaggaggtcatgggcctcctcctcggcgacatcgagctttccagcaagggcgccaccgcccttatatggggagcgtctccgcagatgaggtgcgagcggaagaaggaccgcgtcgaggtcaacccggagcttctcgccgccgcatccgcgcaagccgagaaaatgacggccaccatcaagaagactacgagggtgatcggatggtaccactcgcacccacatatcactgttctgccgtcccatgtaggtaaaaaattcacatttcctccatcggtgaatcattttgtgcccagggttgcacatttgcttcaactagctcaagtggcctgtggccccggtttgatgttggcgtttgcttgtctcacagaatagcggtaatgctgtcaaatatgtgtctgttcgatattcacagactacctcaagtgatttatcccttactagatcccaacttatgttcacttgccatttctgataatggatatcaagtatgataactgtcatagcactaagtactaagtagctttgcttttgagtgctcaggctttggaacgtgctaaaaatagacattacctttgctccagagcttcaagatgacagtgacatataatttccttcattacaagggcagagggtctatttgttgaccatttgacggtggctatggtcctatggagtatggagggcttgagaattcactagtgtatatgcttttatatgtgtttctcttcattctcctgtgacatgcttcccatctacaataagtttaaactatattttgtataatccccatgagtcgtattttccagatgttcgtacccaagcgatgtttcagttgctggatacaggctttgtgggccttatattttcttgttttagtgaagatgctcaaaaggttggaaaaatccaagtgactgcctttcagtcagagggtggacaacagcatgcccttcctcttgccattgctccagttattgaccttgattcatcccttagttcatcagataatgcactcacttcacattctgcattggttgaaggcatggaacaggacacaggggattccagggcctcaaagcataacaaggcctggaaaagatctttggatttctactctcatcctgacacaaatcattccacgaattatcaacccaatgaaaacactctcgctctgtacaatcctgataacacacaagaagcgcctgttgatccatacgattcagatatgactcaaagcctccaggaggctttgcaccggtcaactatggacataagtggtgcagagtatagagggaaggaggtgccactttttgtgctcccgacaaggtatctcctcaagctggacaccacgatgacctcgtactgtgatatgcaacgagtcctgtttgaagaggagcaatcagcatataatcaagctatgcaacaaaatatttgtgatgggaaaattcaccctcttacatccattcactgtacgtctacatacaactcctctctatgcaaactaatggagtattggaccgcctgaaggaaaatgaacttcggctatctatgttaaaagaggagtgtaagcaactggaggctgatacccaaggcatgagaaatggttctcctcgtcgcctcatgaatcacggagctggtggcagcggttcacctatggctcagagcaggcatcctttctccagccaagggagccctagaagcccgagcggcggcagccggaggagggcttgatgatgatcttgctccgcctgatgcgttgatgaactgtccgttgtggcttaaccagatgcttcctgaaaacccagatatttgacggacgaagtgcccccagacaacagacactgtacctgtacatacccattgccgttcagcgctgtgctattgtggaactccaacggtctcattgtgctttttttttgtagtattgggggggttccttatcctgttgccggagctgtgccattatcctttccatggttcatggttggcatgagcttttatagcctgtacactgtagactctgtactagaggttttccagaaaggctgaactgccgctgctgggatgtgttgttccgggcatattcaaagatgaaggctttctttgcttttgtaattgaaaaaaaaacccgacttcggtagcaatacattttcttgaaatgctataactctaagctacagccacagtgccacaccttgcctggatagtgccatagctgttt

SEQ ID NO: 25042 - DNA, 2244 bp, Zea Mays
ccgctgcatgattgggctcgaaggtgtcgtgctaaagaaagcaaagaagattgcaaacgggaagggagatgtgaatctctcgctgggatcgtttgtggacactcttgttgtttgcccagatgaccttgtacaagttattgcaaagggtctttcactcccccttaaaggtgtctgtaaacctcttgattccaacgtggttgctgccagtggatccttgaagcctcaaatttcacatgcaaatgacccaaaaatgtctaataaaactaaaaatatgtctccacttatgcaagctgagaaatgcacctcggtgggtcaggagaaaaatacttctgttaagagaaatggtcaagataatggtattactacaagtttaagttcttcaaccagacatgtgggggcatgtttatccaataattgggattctaggtctggaagtatggtgcctaaagttgatgttatcacaagttcagcttcagctgtgcccgtggtggcttcaggtgttaaaccctctcagccagtcaataattcagttgccaagattgtcacgtcaagcaaaactgctgctaaggaattcaaactcaatccttccgcaaaggtcttttctccatcttttgcaagttctaggcaagtacttgcagctgcggcccctgttgacacatactacatttcacactctgcccctgaagtaccaatgggtgtgcctgtatatgaaccaaaatctgtgtcaggtgtttcacctctatccaacaaggtttattgtagtaatctatctcctgcaaactatgccatttcacctcagtatgtgccgtctgtaagtgcttcgatctattcttatgtgtttttgattgtttcatttatttcgccttcattggataatactatattatcctcttgatatttaaaaaggctattggatggcaacttgtaacatgcctttggttcaagttgataacttgctgcatatggcttaggcttactccgttatcatttgttctatatttgaggccatgcacgtactcagttactcctatgtgctttgcctttgcagttgagctattcaagccattcttacctgttagctgtctaatttacttgtctgttggattaaatgaataaattgaacttgtaaactgattcttcatgtcaacttacagcttatcagctttaatttaattctgatgcaagaaaaaaaatctttttactccgaactgaaaaacctagctcacatgtaaatgtattttttatgtttgaaagcttcttttaacaacttgccttttatgttctattactgtactttgtgcaagcatattttaatacacttaaatttggtcttgcttgttgcctctatcatggatgtctaacattaccatgcttctggattctggtactacttaaccttttgggtcatagatcatgggccataatgcatcaaggctagacccatccagaattggcacaccataccatcctatgcaggtgggggcaacttatactacccctagtcctcagcctgtaatggctgggaagttcagtcctgttgtttatgttcaaccaggtcctcaggatgcaatgcatggaacaaccgttggttttcaaggatggccttgccctttgttattgaattcgtaccaagctagcatgcagaaattccaaggcaaccccccggtgtatttagctcctccagtcatggcaactgggaaccttccattggtggtaccaagccctgcatcacttgtgcagccgttcgaggccattcatcccataatggtccctgctgcaagcagcatggtcccaggaaaatacatgtaaacttgtcgtaccaatgacaatctccttttgttggaagaatcctggcgtacccattttgtctgaaaggactctagtctgttgattcacttgtcagttgctggtctgtgtccgtattttagttggaagggctttgcaacttcttgtcattcttcatgcttggtgtgggtttccaattttttttaggggcgggacagtaaaatgaattagggagaaaatgcagcgattctttgttatcttagcgacacctcttcttccaagagcagtatgtacaatgtgacattgtaaaagattcatatagtgaaggccttattttcacgaggctaatgtacatccatcttgcaagtgtaacagcttctgaagttctgttttgagaaaataaacttgttcgacaatattgtttaggtaatatcagcagtatatttttggatattagag

SEQ ID NO: 25043 - DNA, 1663 bp, Zea Mays
ggagaatagtttttatattaactacctaaattattgatttaggaagtcttttatagaactactggagttgctctaatagaaacttgaacagagatcagacccttaaaggatatactttaaaagtttatggacaggttgaaacaagtagccaagtttgaggacgggaattgtaatttacccatccaaatttattgacgtatcgaaactccggcggccagatcttgagaagacaaataccgccagctctgtcatgcttatcactcgacatctcctcaccatactcttctatagaagaagcggtaaggaaggcctcaaaacatggaatttttgcatcgctgaatatgaacggaggcgagtaggcgtcaggcatgcgaggtagccgcatgcgctgcctcgacaaggggtcgcacacggctagctccggcaacaagcccaatgccctgaatgtaaaccccagaggtgcgcacttgaggagggcacgatcgtcacggaggtcacaaatctcccaaccaaggccagatgcagtgcgacactatgcaagaggaacccctcgctgtggttcttatgctgcgtgcttcattaattgcacatgttatgctgagcgctttattagttgcaagcggtggatgtttgcgataggattaggtatgggagaagctgtttgcttttgtctgagatctgcgagccagtagttacttcaaattttggtagacctgatgaactaaaactgatactaatcgatttgctctgtctgaacccactctgaacgagagaagtaccacacaagttcacaagtatttggtaaacttggaagtaggacacatctcaaatgccagcgattactgctggtttgagtaattcactttcctatgtagaaggtggtgctaaaaaattgttgcaggattcggtgcatttgtagctccctacaattttccttctctggcaatagttcatctggttatctgtgtcaaatagtcagtctcttcatcgaaggagaaaggcagagatttggaaaaattcaagggttaaataaacgcacaacgtccgagggacttaaggaagcattttctaaatttggtcaggttattgaagcaagagtaatcactgataggatatctggatactccagaggatttggctttgtcaaatatgcgactgtacaagaagctgttccttgacagttgggttattttcgctgagacgccacacaaccatcacaacaaggagcaccagcttatgattgaagttgccatacacggtcgatgacatacactgtatttttctgccgagtgtaatagtggatgttgattgccggccaaacatttgcagagagaatgtagcttgatgtgctccttgaacttcctttgttgtggttaacattggacttactgcaacctcatgcgcgtggcccataactttcgtctttcatttacaggtcactacattttttttgaccactgtgttggaaggaggttacactgcagcagaaatgcaatgtgttggaaggaggcccacctcctccttcggccaaaaacagtataaaataaatatgtcgaattatacaagaaaaaaaattgacccctcaaataaaattctaaataaaatcttatgtacgccactcagtcgtaccaggccgggaacccgagtcttggtccgccgcttc

SEQ ID NO: 25044 - DNA, 1760 bp, Zea Mays
gattaatgttaaatccaccccctttaaaggtttacatggctgcaagaaagaaaaagcctttgcttattgcttgccaagcaaccagtgccagaataacaagatctcaggctgctgcaaatagtacaagatctgggctggctccttctgtaccagtacctctgaaaacggagcataaccatgcagcgaaaaaaaagatgaaaagggaagcttcagatgaaaatgcttctgctgatgctggagcttcagctcctctgcctaaaaggcgtacagttctcaagaatgtaactaacataagctgtgctaaaatttccaaaaggtgcactgctgtgactgggctgaagttgggtccctcccagaaggctgggcagagcataaacaagcaatgcacaaacaagatctccatgcttctccctctggctgttggagggagttcacttgtggatgattctaataatgctgaagaaacacaaatggtagaccttttggcacagaaagagaagcagattgttttgcttaaggaggctcagccattacagaatactgaacaaaacaaaggcggtgcttgtgatgaggcatctgttgaggaaagaaatgccatgaatgtacacgaaactgctgccttaaaggctggggtctctaatggtttaaacattgtagatattgacaaaaataatggtgatcctcaaatgtgtgttacctacgttgcagagatatacagaaatctaatggcctcagagcttataagaagacctaggtcaaattacatggagactttgcaacaggacatcacagctagcatgcgaggtgttctaattgattggcttgttgaggtttcggacgaatataagcttgtggcagatacactttaccttacagtatatcttattgaccaatttctttctcagaactgtatccaaacgcacaagctgcaacttcttgggataactagtatgctgattgcctcgaaatatgaagagtattctgctcctagtgctgaagaattttgtaacataacggctggtacatatgcaaaggctgaggttctggaaatggagcaacaagtgcttaatgatctgggctttcatttatctgttccaacaacaaacacatttctcaggagattccttagagcagcacaggcttctcgtacagctcatctgaccactttgaattatctggcgagttatcttgccgagttgactttaatcagttacgatttcatgaaatttcttccctcagaggtggcagcatcttcgattttccttgcaaaatggacacttgaccaatctgaccatccttggaaccctactcttgagcactacacgtcttacaaaagcttcgatattagaacttgcgtgcgggctctacaggaactgcagcacaacaccagtaattgccccctcaacgccatccgtgagaagtatgggcagcagaagttcgagtgcgttgccaacctcaggtcaccggagctgctgcggtcgctcttcagttgatgtgctcccctgcactctgctgattcactcgccatttgctgcaacgatcctgacactgtataaaatatttcttcagtttctgttccatttccaaactttcttcagtttgaacatgcattctgtgacttgggtcaccgacaaaagaggcgcgacacactaatatatcaatttgtaactcaaagcatgtttcaccatttttttcataaaacatagaacagaaataaatgcacacactctgcccctacaccatgagtgcctttgaaaaac

SEQ ID NO: 25045 - DNA, 4404 bp, Zea Mays
gttaacaagtgcggaaaacttgaaacttggcttgaagacatgtgggcttgtatgaagcagttcaaagatgcagtctgtggtgtgatgaatgagccaggccctattgcaactaaactacttgctctaaagtttgtggaaacatggattttgtgttgcacacctcaagccaacagtgaccaagtacagccaactgagggaaaaaactggagatttgatacttcacgatcatctcaatttcatcctagccttgatcctgctattttggaagctgatgcacatcgagctctcctcctcctcctggatattctgcgaacagcttatgcccatcgagggtccttcctagttggcaccatcaactctcttgcagcagttgtaaagatccgaccgatttactatgaccgcgtgttgccagttttgcttgattttgaccctggcttggagactgcaaagggggcacattcagcaagcctgcggtatgctgtaagagcagcttttttggggtttctacggagtccccaccaggcaatgattgagtctaaagacatattggtaaggcggctgcgtgttctcagccctggtgaggcaatggaacaaaatattaggcaggcagagaagatgtctagaaatatagagcgtgcttctcgtgctagcaaggatgagtctacatcatgggagatgccttatggagatataaatcggaagaaacctgctgttcgatcaagtgatacttttactacgtctgatggcatagctaagagagcaagatttgacatgtctgccacttcaaacctgccagttctgggattgtctgattattctgatatgcaggctgacaatgatgccagtgtgggtcattcatccgatccagctatattgaataatgaagtgtctcctgtcgagaagatgattgaaatgattggcgctttgcttgctgaaggagaaagaggagctgaatccttgggtattcttgtctcaacagtagaggcagatgtcatggccgacattgtgatagaaacaatgaaacatctaccggaagcttcatttcatttagcaacaaataacggtgtccagcaactgaattttaaatattcctctggtctcgtaacacaaaaccttccagccaattcagactccacactattcactgcacaatctacacccacagcagatggagtcagcatctcaccatctgatgcctttgttatgactagcgttcatgatgctaagcgtgatccaagaagggaccctcgtcgcctcgatccgcgtcggatagtttcatcttctgctgtaaattcgatacaggtgaagatggaaaccaatagtgtgcatcaaacagataatttgtcgaacacactctactccaattctcggaaggctgaaaactattcagactatcaaggagatttacacaaaaatgaaggtgaacagcagtcagcttctcaacctaatcaaacaattgccaaagacaagttggagcttctggatgttgtcactgaaccggagccaacatttgaagtcgaggcaccagtggatgtcaggattcattcttctgatgttgatgaagatatagtgaaacccatgtcttcagtggttaattcacttgacgaatccgatagcatggatttagaggttgacccctttttaccagctccaaaggcaccaacaccagacgacaccaatgatgacttgccaattattacatctcagttggaattaagtgaaaaagggaaaatctcaattaacaaactagccattggccggatacttgatgattacaagaaaaatagtttcaatgccagattttctttgcttgctcatttgatcgcgcagagtgctgctgatgataacattatggatttgattcagaggcacattatctttcactcacatgatcaggaggggtatgaactggcaatgcatgtgttgtatcagctgcagagtatcagtgttgctaattcaccagaaagctctacctccacctctaaacattacgagaagttctttatatcacttgcgaggtccttgattgattcactgcctgcttcagacaaatcttttagcaaacttttatgcgatgcaccatatctacctgagtctttgtttagattactggaggatctttgcatgtcagaagacaacagccaacaattaaaggatggagatggggaccgtgttacccaaggcctgggaactgtatggagccttatcttgggtcggcctccgcttcgccatgtttgcttggatattgctctgaagtgtgctgcccactctcaagatgaagtcaggggaaaagcagttagattggttgcaaaaaggctctatgatctaacatatgcaacagaaaaaatagagcagtttgccatagagagccttgtgggagttgctaatgagcatactgtggacacagatattaattcgaaatctttgaaagaatcgacagctgagattgaggtaggtagtcagggaacttcagtaagtggctcccagatcccagatactgagttctctgaaaatgggccattcaagacatcatcggtttctacaaaacagtcagcagtatctgtatctgaggcaaagcggcgtacttctttgttctttgcactttgcaccaagagatctagtcttcttcaacatctgttcaatgcttatggaaggtccccaaaagttgtcaagcagtgtatccattggcatatgcccaaccttataagaaatctggggccctcgtgtcctgaattgctgaacattattcataatccacctgaaggcagtgaacatcttattaccttgacactgcaaacattgactgaagattcaaatccctcagctgacctagttgctgctgttaaacaattatataataccaagctgaaggatgcatctattctgattcccttactgccttcatttccaaaggaggaggtattgcctatatttcctaggctagttgatctcccgcttgagagattccaagacgtacttgctcggatattgcagggaactgctcatactggtccagcattgactcctgctgaagttctcattgcaattcatgatattaaccctgaaaaagataaagttgccctaaaaaaggtcacggatgcttgcacggcttgctttgagcaacgcacggtatttactcagcaggttttggagaagtcacttaatcaattggttgacagaataccaattcctcttctttttatgagaacagttattcaagcgcttgatgcttttcctgctttggttgattttgtcatgggaatactctccaggctcatcgataaacagatatggaaaatgccgaagctctgggttgggtttttaaaattgtcattccagactcagccacgttcttttgatgtcttattacagctacctccaccacaacttgaatttatgttgaataaatatcccaatcttcggacacctctttcttcctttgttaatcagcggaatatgcataacaccttgcccagacagattttgaacattctgggtatttttagtgaaacacagcaggcaccgatggcatttgtgacagctacattacaaacagcggatgcaaccacctctcttcctggtgcaactctgatgtgaatatactgtggaagccatcagatgcaagaaaggtcgatgcacatacagatctttgtagacattagtacgcagaacagacagatctgtgtcaatgaagattgccgcccctctgatgtatactattttgcaatgacgggttgattataagctactccgcatggagaaagagatgttgacagaagccaccgaggtgattgtatggcgtgagatcctgtctgtcctggagattggagagtttgctccagcggaacggaagtcatccaacttgtatagtagctttactgctgtggcaaaatgtagtcccgtcgtcgtggtcctgggagtctggcccttgcaggcagagacgaagaagacgcaaggaggatgattacaggaaagtccatattaccccatcttaactgttttcctaagtcagattacagctgctgcattccttttatagggagcaggcatttgaccgatttagtctaaccattgttgtaacaacttctgtacattagttaattgagttttgctactagtgttagcaaacacataatcgctgtcgttagcaatttcctgcggtgacctggtaatcaaggaaaatattttacatcgggtcaatgcatcatatttgtttatttctttgatttcattttccggtaggtttcattggagtttgtaatgatccaaatgaccattagtaagttaataataagcattacgcgagctacatctactggacgtgaatagcatttaatgtgctgtttggtttatatatttgtaacgtaataagtaattgataatgttaaactatgtttgaagtcc

SEQ ID NO: 25046 - DNA, 2056 bp, Zea Mays
cccagtccagacgtcgccgtcgtcgccgcccgaacccgatggacatccgccgcgggccgccgccgccgcgcaccgcgtcgggcggggtggagccgcggttccgccaggtgggattcgtcacggccgccgagcccgcgcggggggccgccacgccggcgcccgcgtcgcccgccgcgtccgacggcctctcccccgtcatgatcccgcccccgctcatccccgtccccgtccccgtccctgtcgcgcccgcttccgagtccctcgcgccttcttccccgcccccggactcctcgtctcgccccgacgccgtctccgaccttgacgacgacgacgacatcgacgtgtcctgggcgcgcccacccccgcccgccttcccaggtttgaaatcaacagccatggcttctgatgctaacaccaagcaacccaaaacagcaaagatatctctgaagaaagatgtcaaccaagttaactctccagttgcttctgataagaagactggtgaacgaccgcctgacaaagatagaaaaaaagatgctcctcaaccccgcatgcaatttgacgatacacatcgggtggtgaaagcaaagaagcgttcagttgttagacaatcagaagctcaaaacagggtcgaactgttcagacatctgcctcaatatgcacatggcactcaactacctgaccttgagtcaaaattttttcaacctgatctgatgcatccttctgtgtacaaggttggacttcaatatttgtctggtgacatatctggtggcaatgctcgctgtatagcaatgcttcttgcattcagagaggcaataaatgattactccatgccttctgaaaaaattctgaatagagatcttactgctaaaatcagtagctatgtgtcatttctcatcgagtgcagaccactttcaatcagcatgggcaacgcaattagatttttgaagaacaggattaccaagctaccacttgcattttcagagtcagaagctaaagttagtcttcaatctgatattgatcgctttataaatgagaagataatagttgcggataaggtcattgttagtcatgctgtcacaaaaatcagagatggtgatgttctattgacatttgggtcagcctctgtcgttgaaatgatttttgataatgctcatgaacttggaaagaaatttcgtgttgtggtggtcgactctcgtccaaaccatgagggacaaggattgttgcgccgattagttgcaaagggtatcagttgcacatatacacacataaatgctgtatcttacatcatgcatgaggttacaagagtgtttttgggtgcctcttcagtactatcgaatggtactgtctactccagagttgggacagctttggttgcgatggttgcacatgcttttggagttcctgttctagtgtgttgtgaagcgtacaagtttcatgagagggttcaactcgattctatatgctttaatgaacttggtgacccagatgctatttcaagagttcctagggatgaaagtttgagcaatctcaaaaactgggctgagaatgaaaatcttcatcttctgaatcttaagtatgatatcaccccttccgattatgtttcaatgctcataacagattatggaatgctcccacctactagtgtaccagtcattgtaagagagtaccggagggagcacgtttggatatagaagccaccgttttcctttctggttttgtttgaggtatgataatctgaacagcttttgctgcctaagtgttagtggaatggtaagggggtggtgtgagcataccagcaaatgtttatatctcagttttgcaaccatcaaattggttgttttctcctgtagttcatttctatgttgatgcgttttgcatttacctataccgttgctaatgggggagtatatagcctataaatctgccctccataattgacttctgatatgctcttttatgttagtgaataggggtgttcctcttctgcacgagcatatttgactattttctctatcatttgccaaaatttctcgctgtcacacaaattatgtttttt

SEQ ID NO: 25047 - DNA, 3733 bp, Zea Mays
ctccgactccgactccgagggcggtgcgagtgaccttgcccttgtttggattggacgacgactgggtccgcgagctgccagcgcggtctcccaccactatccctctctcccctctccgtttgtctccatcctttctacctcggctgctgcgttgcgtgtggcgctgtgcttgggcagacgtgggcaccatgcctgggtgacttggtgtagcactgtagctgtggcatggagctgaggaagacgacgacgggggagagaagaatgctccccgggtgctaacttggccgccgctgctcaggggacgagtcgagggggagaagaggaaagtccagtttcttcagcttcttggttggatgcagcgaagtgaggcgcaggccaggaaggcatcactcgccgagtctgttctagcagccatctccgagctgatgccttcagcggcagccgccgtcgatgctgagcacgagagcttcatggatgtcggcagccacctccaccatggagccctgcccacagtgtcagtggaggcgcagaaggtgcagggttccccagccaacgcgctgcacgtgatggagtatctggctgccaatgttgacctcgccaaggacctcgtcacaaggtgcagcgccatcgcgcagcagctcatggacgacgacctcctgggcataaccgaggacttggacaaggtcatcaagaacataagcaatgagctcaacaagatgccagcagcgacgttcgagagcagcaggtttgcggaaccagcggtcagtggacaccttcaggttgtcaggaaccagcatgatctgttcgagcagcaatcctttgatggctactcggagggagatatgccaatggtcgtggcaatcgagaggccacccaagagaagaacgctgcacaacagtgacatgccgaggctggtggacttcctgcagggaatgtaccaggagtcacatgagatcggtggtcagtcatttggttcactccctgaagtcgcggaatatgtggagccattgtatgattctttcttctgccctctcacaaacaaggttatggttgatccagtgacaacggagagtggcatcacttatgacaggaaagctatagaggattactttgacaagtttacagatggctctgaacctgtgatatgtcctgttacaaagatggccatgcagagcaagacactgaggagtaatcttccgttgaagagcacaattgcagagtggattacaaggaatgaagcgacacgggtcaggatcgcacgcaccgcgctctctatggcgaccacagaggctatggtgcttgaggccatacatgagctgaaggtgctggctaggctgaggagaaagaacagggatcagatgcacaagattggcatcaccaagttcctagcacggcttctggaccacaaggatgcacttattcgctgtgactccctcgacctcctctgcttgttggttgaggatgatacaggaaagtcagagttgctgttggagaacattggatcaactgctgggagcatactgatcctcaccacgatgaagtttaatagctcatctgatcctattgctgccgagaaggctggagaagtcctcgagaacctggagaaatgccccaagaatatcaagtacatggctgaaagtggctacttggatcctctgcaaaggcacctagttgaaggaccagaagatgtgcagatggagatggtgagctacctcggcgagctggtccagaagcaggagatgaccatcaatatagcagggagtgcatcagagatcctcatcaaaatggtgtgcagtggtaatacggcaattcgaaaggcgaccctcgatgtcctggttcagatctcgtcccaccaccccaacgccaagacgcttgtggatgctggtgccgtccctgtcatggtagaggagctcttcatacgaaagattgatgatgagcccatgggctctaagacagaggctgccgcggtgctcgccaacatcgtcgagtctggcttggatccagaggccatcaccgtgaacaaggaaggccacgtcatcacgtccaagtactcggtatacaacttcgctcacatgctcaagtgctccatgcctgacaccctcaacctaagcattgtgcgcgtgctgctcgcgctgaccgctctccccaagcctctcgccacggtggtctcggtcatgaaggagcaagacagtggacagacggtgattgagctgatgggctcgctgacagagtcgcttgtcatcgccgcaatgaggctgcttattgcgttgtccccgcagatggggcacaccattgccgagaagctgtgcaaggccccggggcagccagggaggcttgtcaagagcattggcctgcacgggcggatcatggagcggcacgccatgtcagctactctcctggcgaagctgccgtaccagcacatcgctctgaacctggcgctgatcaaccagggcgcgatggttaccgtgctagccaagatagaggagatgcagcgcggcgagacgcgggcaagccgccatgcgaaggcgtatatggagggcctcatgggtgtgctggtccggctaacgacgacgctgtatgacccggacgtgctcttggcggccatggatcacaacctcacgtcggtgctcacagatctcgtgcggtccgcaggcagcgacgaggtccagcggctcgccgcgattggtctcgagaacctcagcagccagtcgcccaacctttcccagcccccgaccgaggagcggcgcccgaagaagaagaacatcctccggcgcctgcgcgaggcgcacgcggggcgggtgcacgacaaccggaggccgccggcgcacagccgggtttgcccggtgcaccgtggggtgtgttccccgtccaccacgttctgcctggtggaggctggcgcggtggagggcctcttgtgcgtcctggagagcagcgagaacgggcgcgtggtggaggccgcgctcggtgcgctgtgcacgctcatggacgacgcggtggacgtgacgagcggcgtggccgtgctcgcggagcacgacgcggcgcggcacgtgcttcgcgcgctgcggcagcaccgtgacgacgggcggagagggggcggcggcgctgccgcaggcgagacggtcactcggaggtgtttctgggcggtggagaggttcctggctcacggcagcgagcggtgcgtgagggaggtcaccagcgatcgggcgctgccgagcctgctggtgggcgccttccacaagggcgacgccgccaccaagcaggtggccgagagcgtgctccggtgcctgcaccgcatgccggattactccgcgacctacgaatccgtcgaactgtaaccaacacatgacgcgcacgactgcgcatgtcttgcctctcttttatcaagcttcgtctcttggttatgtttgtaaaattggtttttgtgtgtaacatgggttgatgtattgtttggtgtagctaaaggaaaatagaaaaggaaaaactgaagatgcagttatgtatgcaagtataaccaaagtttatagcaagggaagatactagtcttttgattcttcttactatttttttgtgtgtgtgttcagtagttcttttttagggaccgtgttcaattcagtaggttttgacaagagtgcctcctaaaatcagtctccagataatttgttttgtaattttgatgtttcgtttgacatgcctctctagccttttctcgacacgactactagcaagtattccc

SEQ ID NO: 25048 - DNA, 2843 bp, Zea Mays
ttactctaataaaactcacaccgaaaattgcctccaaacacgaaaaacacggaggtcgggtactagcggttggagagcgcagtccccggacctgaccggtcgagtccttcggccttcccaaaacgcggaggtcgggtactagcggttggagcgcaggctgcgcagtccccggacctgaccggtcgagtccttcggccttcccaaatcgcatctcttgacactgcttccgtcccgtcgcctcgccgccgcgacgagacgaccccgcccctacaaatacaccgccactttggccgcgtcagccgccgccacttcccagatcccgatgtcccgcgcccagattccactcccttgttgcatcgctactctgttcccagctcggggcctctgacgaggcccgaggcgcaggcgccaacctcccggcccgccctagggtttggggctgatcgatccggctaggtcttggcgggagctgctccaatgggggatcgggaggaggacgaggagctccagatggcgctccgcatgagcctccagggctccccgccggcgcagcctgagcccaagcgcagcaagcccccgccccccgctgcggagtcgccggaggcagaggcgcgccggaagcagcgcgagctcatggccgccgccgccgagaagcgccgccgcggtgcagcgtcaccggcctccgtctcggtggcgcggtctcttctgcagccagtggtggtggagtcagcccccgccccggaggtcaccaaagagcaggtggaggagccggaacaagctggcgtatctatggaagaagcgaaggaggtggaggaggaagaagaagaagaaaagggggaggagttgcctccagatgtcgctgagaatctatgggcaatggtgtttgggagaggtgtttcaaaggcggtcttggcgcagtggagtaatcagggcataagctctgatccagaaacaactatgggacttgtacaacatgaaggaggtccttgtggtgttttagcaaccgtgcaggcttatgtccttaaatatcttctgtttttttctgatgacttgagtaatccagagatcagtaacccgctgtatactctgggacaaagacgcttttatcagagttcttttgctgcaggggatgatttttcatcccttactgatgatagaaagacaagagcattggttcatgctatggtggagattctttttttatgtggaactggaaaaagagctgttgtagcatctgttgcacgtgccaatcgtggaaaaattgatgcagctttggaagatctttctgtcgaatcagcagtggatctgcagaaagttcttaaaacaagtacatttacttcaaggaaggatgcattcaacacccttttggctaacattcctttgtttcaaagtcgactgggagccatgctatttcttatttctgctttgctttcacgaggattggaagacatccaagcagacagggatgatccaagccagccattggtcactgctccatttggtcatgcttcacaggaaattgtgaatttattactctgtggagaggctgttccaaatgtatttgatggcaagatggaccttggtggtggcatgtccttgaagggcataccaaacaatgttgaagttggttttcttaccctcctggaatcactaaatctctgcaaggttggtcagtacttgaagtgcccaaagtggccgatatgggttgtgggaagtgaaagtcactacacagtcctttttgccttgaaccccaacgttcaagaggagaatgagctggaagagcgcgaatcaaaaataaggagggcttttgatgcccaagatcaaagtggaggtggaggctttatcagcgttgagggcttccaacaagtcctcagggatactgacataaattttccttcggataaactcgaggacctatgtaatgctggaattatagtatggagtgaattctggcaagcattgctacagttggataaaagggctggaggcatgaaggatccaactggtcttatgggcaagaagcaattcaccatcttccacttcaatggaattgccaagtctgtgccgaatgggaatgcaagtgcaggtggttcatgtcctatacagagacccaggttatgcaagctaaatgtcactgtccccccaaggtggactcaagatgagtatctggctgatgttgtaagcgcatcaaccagcagcagcaaggacgacagtattctttctctagctcccccaggtcagactaatcagcacgcaccattggtggactgcattaggacacggtggccacgagctgtttgtagctgggttggagatgttccaagcattgtctgacacagtggatgtcgtgtgcgcactagtcgctctagctatgttgctcgtaacctcgttctgaagaatctgctcagagcaagccacttggagcttcctgattgttcatgccctggaaaaaggaatcgcccaattacatggtttgttcggtcaaaatgagtgatgttttaaaatgcgtgttattaatcaagggcctggatattcttttttttttgcttttattgacattagatgtacacttgatttatggatatgttttgtgtcttgggttacattcttttctgtacacatatagtttcgtttgtgtttatcatttcatctgacacagtgagttgtctagccagaagccggttgagtaaacaaggatcaaacttcaacgatcatatcatgccgctgtactctttgattttatgtttgggttagtttgaatctgcttaggcactttccattgagacactctcttcttgggatgtgtgggtagaaataaagtcatgtattgaaacttatgaagt

SEQ ID NO: 25049 - DNA, 1536 bp, Zea Mays
atggggtatgaagagagcaaaaaacatctcctcagtctcagctaccctgagctgcaatgtttgtgcaaaaggtataaccttcctgctaagaagacccactctcagttagcaagttcgctcgcctcgctgcttgaggcatctccatctcctgctcctcctcctgtccaattagcaaatatgaaagaagcatccacatgcaatcatgctaacaacaaaagaggcccatacaatggcagggatgatggtaaaccacttgtgcatgcgaaacatcaaaaaggagatcagacacctgttgatgaaacatctaaaaaggggattgacactggtacgagtatacctccagtttctatgaaccatggaagaccagaatatcatggccatctatcttctgacctgagaactgctcataatttacagtcccaatgtgacgtgggaattgcaactaatacaacaaatctagaatttgttggcaaacatgattgttcacctgctaacgtaattgatcaaatctgtccccctattattcaaaaatatccttctaatggtaatggtcaggcttccactaagttcggccgtatgaatgataacacagaaaagggttgtcggctgtctgataagatatcagcaaatgctgctgctgttcaattttctgtaatgtcagatgagggcattgatcttcttgttgatctgaactccagttcagcaacatgggccaagaacttcatggcagaaatgcacattacccctccgtctgaacatgggaatttctctagcttcattagcagtttgtcaactaaggatgatcatagcactgcgtcaccatctggaaatatcattgttgacattcagaacaagggagctgagaacattgttccttccactgattcatcacttgcttcagatgttggtgagagctcccgttcagtgctctatccagttgatacgactactgtgaactcagtgtcatccacgtctacagtggctggtaccccagttgaactttctgggtatcaggagggtgctccagtggtatgttcttcatgtttaacagctgatgttcagaacaatgtgacatctgatatgccaggtgcttcggataacgaggtgcttcctccagaacctgctgatgtctttttgcagtctgaaagaatcactgcaccagctgtatgtggttcagtgcaaccaattggcaataaatgcacaatgagttctggggatgaggttagaagtggctccaatgaagactcctgtccaaaatcttcaggaaaacaaactggagatgaaaccctaatggaaaatgaacctgtgaaggcagtagcagtggaagaaaatataggtcgtgatgacagtttgtccatttcttatcaactagcctgtaagacagtagcagaactgcctgttacagatgcccagtcgcctgctagttcttctggtcattttattgctggaaattttgacaacacacatccaacatcttccgccacttcgtttacctggatggcttatcagttcaacctatatcccttatggcttcag

SEQ ID NO: 25050 - DNA, 229 bp, Zea Mays
ttgtttaagggtcacggcaatgatccttccgcaggttcacctacggaaaccttgttacgacttctccttcctctaaatgataaggttcaatggacttctcgcgacgtcgggggcggcgaaccgcccccgtcgccgcgatccgaacactaaaccggaccattcaatcggtaggagcgacgggcgggcattcaaggggcagggacgtagtcaacgcgagctgatgactcgc

SEQ ID NO: 25051 - DNA, 474 bp, Zea Mays
ctggagctgaggaacccttgtgtagttgtgtgcctgcctgtcaactgtcgtatacccatccataatctaaggtctcgctcgtcggcgtggttcggagaggccacggccacccacccacccatggcggagaggctggaggcggccgcttccgacgagtacacgcaggacggcacggtggacctccacggaaacccggtgctccggtccaggcggggcgggtggagagcctgcggcttcgtcgtagtgtacgaggtgttcgagcggatggcgtactacggcatctcctccaacctggtcctgtacctgaccaagaagatgcaccagggcgtggtgccgtcggcgaacaacgtcaccaactgggtcggcaccatctggatgacgcccatcatcggcgcctatgtcgccgacgcgcacctcggccgctaccggaccttcatggtcgcctccgtcatctacctcagcgccgtcaatatt

SEQ ID NO: 25052 - DNA, 1539 bp, Zea Mays
ccaaccccatgaccgatttatgatccggtgatccactgctatcattactgccctattttgctggctgcaggcttgtgataatggacaaccttgggcatagagaaaatggcaggcaaaggcctgagcaatataaagcgcttcatactcagtggatgatacctcaaaggcagctaaaagaccatcaaagtatgaatctcctggcactgatgaatgagaaggacagtgccatccgagaaagggaccatgctctcgctgagaagaaagcagctatagctgagcgagatatggcattcgcccagcgggatgctgcaatggctgaacggaatgctgcaatagtggagagggacaacgccctagctgcactcgaactcgcccgtacaaatgggtttaatatgaatagtgggaatggatttcaccaaggacctcctctcaatggaacaaagaacatccatcaccatgaccatctgtctcatgtccaaacatccccgctgcagctggccaattctccatatgaccatgtcagggagatgcacatatcagaagcataccctatcgcaacagctcccgcaagtgttgggaaggctaagaagccaaggaagagcaattctcaagcttctccatcgaagaggccatcaggtgtactccgaaaaaccaagaaagcaaccagcgactggaagaatgcggggactactggtggagcaggagattcagcccgcgcttctgtgatgaagaacgagtggaaggaccaggatctcggcctgaaccaggtggtgttcgacgagtcaaccatgcccgcgcctgcctgctcatgcacaggggagctccaccaatgctacaaatggggcagtggtgggtggcagtcgtcttgctgcaccatgaacatgtccatgcacccgctcccggtgatgcccaacaggcgccacgctcgcatggggggaaggaagatgagcgggggcgcgttcgcgaagctgctcagccggctggcagcagaaggtcatgacctctcgactccggtggacctcaaggaccactgggccaagcatggcacgaaccggtacatcaccatccggtagccagccggcggccacgttgaagcctgagcctggaaggggggagagatcacacaaacgtcgccttgccctgcatcccctaaaccctctcttttgctatgctctgtaatgccattggtttgtagtggatggagcacttctgcgttcatgaaaccacagcgttgtaggttctcccctccattgtgctggactagtaaactgtgctcgcgagctggagtgctgaagtccgcgagaatccatgtgtaattgtagctcagaagtattcgtcgcgtgatagctgtacagtttgacatctggattcgagtcgagtggtggtagttgaaggtctactgtatatagttggcttcagtatcatggccgccgttgatctgaagccgacgttccagaaatccagacagatacacaaaaaaggtggtgtctgctgctgaattattcgcagaactatagtctctaggatacccagaaacag

SEQ ID NO: 25053 - DNA, 3017 bp, Zea Mays
aacccaaatcaaatttccccaaacggaggaaagaaacggaagccgaaaagaaaagcgtgctcttttttcatccttcgtgcgtggtgcgcgagcgtgcgcctcccttaccatctcgcgatcccaattcgatccgctcgccagctctccccatcagacctgccctccccggccgggcgattcgccgccgctactcgaattcgcgtggacccgtcatccattctcgctccccggcgccccaaaccctagatccgctgctgttcttcccaccgccgccgccatgttctggcgcatgaccggcctctccgcggcctcgccccttacgtgacaaggctcaggtggaacagttgcttcgttatgttgtggaagaagttccagatgatgctgaaaggaagcgatctttcaagttcccatttattgcttctgaaatatttacttgcgaaatcgatgtcattttgaggaccctagtagaggatgaagagctaatggatttgcttttctcatttgtgaaacctgatcatccgcatagtacattattgtctggttacttcagtaaggtggtaatatgtttggtgctgcggaagactgctccacttatgagttatgttcaggggcatccagagatagttgtccagcttgttgacctgattggcatcacatcgataatggaggtgctgatacgactgattggtgctgatgagaccatatattcaaactatggtgatacgttgcagtggttagaaaatacaaatgtacttgaaatgattgcagataagtttaactcgtcggattctcctgaagtgcatgccaatgctgcggaaattctatgtgcagttactcggtgtgcgcctccatctcttgctgcaaagatatgcagtccaagttttgttcggaggttgttccatcacgctcttgaagaatcaagacccaaatctgttctgcttcattcactgtcagtgtgcatatctttgctggatccaaaaagactagcatcagcttcgtatcaagcattcaaaagcaacttaagtcatggggcattggtcatggccagtccagagacagttgatggtatgcttgagagtctaggcaacttgctgaatttattggacacatcggctgctgaaagtgtgttgccaacaacttatggatgtttgcgcccacctcttggaaaacatcgtctgaagattgttgaattcatctctgtgctgcttacaattggaagtgaaactgcagaaaaggagctagtaagacagtcagcaataaagcgatcgattgatttgttctttgagtatccatataacaactttttgcaccatcatgttgagaatataattgtttcttgcctggagggtaaaagacctgaagttgttgagcatgttcttcatgaatgtgatattgttggtaaaattcttgtttcagaaaggctttcatctttgtcgactgagtctaatgggcctactgttcccactgaaggaaaaacacatccaagagttggaaatgttggccacatgacaagaatagccaataagcttattcagttgggcaacagtaacaacacaatccaggctcacttacaggaaaataatgagtgggttgaatggcaaacaaatgtgctggtcaaacgtaatgaagtagagaatgtttatcattgggcttgtgggcgcccggcgtcattacatgaccgtggtagggacagtgatgatgatgacttccgggacagggactacgacgtggcagctcttgctaataacttaagtcaggcatttcgttatgggatatacagcagcgatgacatcgaagaggcacaaggatcacttgaaagagatgatgaggatgtgtattttgatgatgaatcagctgaggtggtaatatcttctttgcgtctgggagatgaccaggaaggctccctctttacaaattcaaactggttcacatttgatggagagagaggcattgatgaccgatcatctgcctctgttccttcatcatcccccaattctgaggagacatcactaaagactgaggaagctgatgatggtaaagtcattggcactgaggatgaaatggaaacagtgtatcttggaaatggtagtgttgaggaggtaaaagatgtagcagaatgtactgaacagccaaattgttgtactgaggaagagcgattgaaaaatgaagaagggatggaatggcatccaaatgcttcaaataacgataccgaggctgaggctgccgcagagtcttcagccccatcagttgagatagtggcagagaaaacagtagatgaaccattagaggtgggaagaaaattggatgaaccggcagaatcatctttggacagttctgtctctgtagctttgccagctcctgttaacggtagtgagcctgccaactcggaagtatcttctgaacaagtagcccatgccactgatgtgcagcaaccagtgaaggaagctcctgccgaggatgatgatgcaaagaaaactgatgcagccaaaacaaacgagtgaagtagcaacatgctgggctgagctgatcagagcgattgcttgtgaactgaaaactctgtagagtgcagcttgggcatccatcttgcttcatgtgtgctcagctgccacaagatagtctgaagcaaactgctgtacaataagcaagtaattgctctaccatcaaccgtggcatgccactgtacaaatgagcaccactgactaacgcacgtcagtcgccttgtctgaaactggtcattttctttgaagttcaccctccagtccatgtgctttggtggcagtcttcatggcatggtatatgatacctgaaagaacattctttgggtggcaactggttttggctacttagtcttctgttgctttaggttaactttggaactgtaatatgagatgtgattttatttctagtctagctattgtatttttttttcggactctacatgtgtcagttcgatttgaacatgttatttttttcataaagatttgaagacatcttgatcgacggctcctcgtctaccc

SEQ ID NO: 25054 - DNA, 3054 bp, Zea Mays
ccgccacgccttcctccggacgccagtctgcgagcgccgagcgcccgagcgcagccaggtgtcgcccgcccgcccgcctccggcaaatgtgacttgcagacgaaggtcgctgcagtggcccgtgctcgatggtggcaaggtgcgcgcacgccgacgccggcgggttccgcatctggccgatcttctccgccgcctcgctgcggaggaaggtgctagaggttctcgcgtgcggcggcggtggcggtggcggtgacggaggcggttcctgccgtggacggacggcctaccggtcgccacagcggattccgaggccgagaccgcggtcggacaggctcgcggagctgctcagggccgagcagccgtccgagtgcagcgacgaggctgaggccgaggccgaggcggcggccaggaaggtggaggcgttggaggagctgaagggcgtggtgggggcgctccgggacggcgggggcgacggctgcatgtcccgcgtcgaggcggccatggccgtgcggagcaaggccaaggacgacgccggcgctagggagatgctcgcgatgctcggcgccatcccgccgctcgtcgcgatgctggacgagggcggcgacgtgggggaggatgtcacgaccgcagcgctgtacgcgctgctcaacttggggatcggcaatgacacgcggcgatcgtgcaggccggtgccgtgcacaagatgctccgcattgcggagggcggcgcgctaacggaggcggccgtggtcgccaacttcctctgcctcagcgcactcgacgccaacaagcccgtcatcggcgcgtccggcgccgcgcccttcctcgtgcgcgcgttccaggccgcgtcctccactgagcaggcgcgccacgacgcgctgcgcgcgctcctgaacctctccatcgcgcccgccaacgcgctgcacctgctggcggccgggctcgcgccggcgctggtggcggccgtgggggacggccctgtgacggaccgcgcgctcgccgtgctctgcaacctcgtggcggcctgccccgagggccgccgcgccgtgagccgcgcccccgacgcggtgccgtccctcgtcgacgtgctcaactgggccgacgagcccgggtgccaggagaaggcggcctacgtgctgatggtcctggcgcaccggagctacggtgaccgcgccgccatggccgaggccggcgcctcgtccgcgctcctggagctcacgctcgtgggcacggcgctcgcgcagaagcgcgcgtccaggatcctggagatcctccgcgccgacaagggcaagcaggtcgcggaagacgcctcgggcgtcgtggcgacggtgtcggcgccgcaggagcgcgggtgccgcggggaggagtcggtggacggggagttcgccgacgccggcatgagcgcggagaagcgcgccgtgcggcagctggttcagcagagcctgcagagcaacatgcgccgcatcgtccgccgcgcgcggctgccgcaggacttggctccggcaccgactgagagcctcaaggcgctcactgcctcctccacctccaagagcctaccgttctaggagatcatgcagaatccatatgccagaagaagaagaaaaaaacgcacaggtaaaaaagacgagcttattcatcgccgtcccttcacagctacacatcactgttttcgtctggaaccttaaattctagctagttgatcagtgatcactcagctaccatatcaacattcaacactgatcttgcagtttgtctgccattgcagtcgttggctgaaccattgtctcacaaaaggctgctactaaacaacaagtctaatcagccatggaaatttccacttggccctagcaaacaataatatatttcccacgaaccaactaagcacatttttagactttttctcagtttctttaatctttgaccaatgtccaatccaccacagccaacgagtacacgaacttgaagggtctagtagtatttttgtactgtcctaaactacaacatcaggcatttttctggaagaaggttgaagtcttgttcctggcttgggttgtgtcgtcagtcgccactcctttacctcgacctcgagagcgagaccgcggtcattaacagctgctttgttgctttctgggaaagcaagctcgagtccctacagtccattgtcgccccctacccaaaaaagctcgagacaggtcatcatcgcgctcacttttgttagttttatcctgcaagtcacagctgaatagctcatccactgtcattactcctgtaaaccagctctggaatccatggaatagtttatactactactagacatttttctatatcctgctgaactgtactgttgcttttgatggcgggccagacagttaaaaaagaagaagaagaagaaaaactctctctgaatctgtcttggcagcagggaagatgaggccaggagagttgatgaggagactttgctgcgttccgttccgttgctgcatgcgtcggagaccgggaatctttcgggcgccctgaagcggaagcggagtgacgagaagatgggggctaatctaaagcagttgtttaaccgcgctgctcgttgccgcttttttttcttctcgtgcctgctgacggaacccacgtgcgcggaccgacctgttcaagtccaggctctgacagacgagagctggcctcgagatgttctcctaatcgctttcgcatttcttaatcgccttcgactcgttatcttccgcttctgtatatgggaatagctataggatagtaagtagtttgtttagccatactacacctagtggtcagtgtgttcggggcttgctctttgggcacatgttctttcttgttgttgctgaatgtggtagtagggtagtggaaagtcttagaagaactagaaagaggatgcgtgtggacgttttatatatatgtaaactatgatgatggtttcatctttgagtacctgatttcagtgcacgggacagcttcagatttacttcaaaacagtcaaattgtataaaaagttattcaaacgctctagctacaacaaaatggtgaaccc

SEQ ID NO: 25055 - DNA, 4154 bp, Zea Mays
gtggaaactgccaacgcgctaggatccgtagcggacggcgatctgtcttcgactgctctctgccatcgctgtggcgaccccgacggagccaagcgacggttcatcttcttgcggcggcggcgacctcgagctgattgcagcgagaaggcggggacaaatcgatctcccctagctggctacacccgatggagccgagggttccttgcgttgacggcggcggcgacggcctcgagctgagggccgcgagaaggcatcgacgggagggcgggcgaatccacgtcctcgatgcgcaaatcctggagcctcagcgacagagatcgaatccattcaggaacatctttcatctattaactcaacgagaggtcttacctcgaacgaaacaccatgctaaaaggatatggaataactctccaaaatatgatcctcatttaattgagttaaggttttcagatgcagatgctaaacttggtattttatcttgggcagaatcactgtccctgcatcgctggtctgccaagtattgccctcttttgccacctcctaggtcaactattgcagctgctttcagtccagatggaaaatcacttgcgtccacacatggtgaccatactgtgaaaataatggactgccatacagggaaatgtgtgaaggttttgagtggacatcgacgcactccttgggtggtcaggtaccatcctttacattctgacattctggctagtggaagtttggatcatgaggttcgtctgtgggatgctaatacttcagactgtattggatcacaagacttccatcggccaattgcgtccattgcatttcatggaagaggagagattctggcagttgcatcaggtcacaaattgtacatatggaactacaataagagagatgatgcttctgtcccaaccatcatactaaggacccgccgttcgttgagagctgtgcattttcacccgcatggcgctccatatcttctaacagcagaggttaataatatagagtctgcagactcaccgctgactctggcaagatcatctggatattcaaactacccttcggccctgctggtgtcaaacactaattctagattctgtccacttcctgagtccaatgtgacgtcaccgtgcttactgtggcctgcgtacctcagagatgatgggattttacatgtgcttggcaatgccagtagttcaaccattgtgcagcagagatcatcattagttcaaccttccacatcagatactgcaaatctacagcttgaacagtttgctacccctatggatgtatgtcctggagagccaacttcatttaataacatatcagatgcagtaactgtgcctacttcaaatgcaattgaaatgcatggtgctggcggccagtctaacccaagactgcagggcagcagctctattagtaatcttgagaggttcagtgctagagatgctttgcaagtgtcttccctgagcagcattgagccaatcccatcaacagctgggtcttcgggatccaattcacgccgtgctatgccactgaatatgctcctcactggtggattagatgttcaaatgttccaaagaaatgtaggaagtggacaacaggatcattttctcttcggcgactcaagtaactgggaagtgccatttgtgcagggttttttgatgacccaaaaccatacaggtgcttcatcatcgattccccttacttctggcagttctaggagaccaaatcgacactatgcctcacgctctgtgcctggggttgggagtttgctcctagtaggtcctcaaattgacgaagctgaagctcatgctgcttcactaggtgctggttcagaaatcactgcgtcgatgcttgctcctggtactgaattgccttgtacagtgaagctcagaatatggcggcatgatatcaatgaaccatgtgttcctttagcacctgaggcatgccgtctgacgatttctcatgccgttctttgcagtgaaatgggtgcccatttttccccatgtggacgatttcttgtagcctgcgttgcatgtttgttgcctcaaacagaaggtggccgtggtagccaattgcctgtgccttatgaagaggctggatcatcaccaactcgtcatccacttccctctcaccgagttatttatgagcttcgggtttattcgcttgaggaggagacatttggggatattcttgcttctagagcaataagggcagcacattgcttaacttccattcagttctcacctacatccgaacacatacttttggcatatggtcgtcgtcatagctcgctgcttaggagcatagtcgtggagggagaaaatgggattcctgtatatactattttggaggtatatagagtttcagatatggagcttgtgagagtgcttcctagtgccgaagatgaagtcaatgttgcatgctttcatcctttaccaggaggtggccttgtttatgggactaaggaagggaagctcaggatccttcaacacaatggcgcaaacatgataaacatggggtcgggttgcttcattgaggaaaatatggttgagatccagaggtatgcattggaatgctgaataagcttgaccacatcatgtgaattttaggcttacttccatgaaagacttctctgcaggcttcatctgtgtgatccgtccaagggaaaacattagatccatctccaactacattagaacagataattctcaatgggctctttcaagtgccttggggactggtatgggactctttgcactttaggattaactaatattcctggtatggatataatatcttttctctgctgctagctacaagggacctgagtatcttaagtcgattttgtacacagtaggataatcaagtaattaatgctgtaggaaacattggtatccagtttactgattggaatcgtgtccttacaagcatcattagctcttacaacttgctgaagcaagctgccctacaaattttttccgctggatcaggagccttgaatatttgtccagttttgcaggtgggcttggatgtccaataagctagctcgattttgacagtaggttgctttatgtttttaaccctttggagcgcctttgcaacctttgatcatccttatctgcctttacgttttttgtgtggcaaccgtgctatttatggttaagtctgtctaggttaatcatgttttgtaaaaaatggatatggttctagtggaaaattgtttttctaaccttggaaaaattattctagtcccgttcatactattttctgcatttaggtgtttggtttcttagtcaccctcctttctatttgggaggcctccttgagacatattgtttggctttttagggacaaagtgactaagtttaggaggtaggaaccaacaccctcttagtgcatgttgtatggacactaaagttacttttgaactacatatgttacgtgtaaacacgatccagtaaaagaatgtttttatcatagcctctagaatatatatttctttggcagtagaatgattctaatgccttgctatttacaacttgatttaggtctttgcaggggcggcaggagatgtaaatctacatggccaccgtcgtggctgccatcacgatgcttctttttgttgtatacttcacctatcctaacaagcggtcgatgatgcaagaaattacaaaggcgaatgggattctctgggtttgattttacacgtgataatcatgtatttttttcctgttctcgtctgggttgattaatcattaaacgtttggagtttctatatctgtatgaaatagcatctgttgcaacataagaatatggttgacactagacgtctacaagggctggtctagaatgccgtgctattgtcattattttttaagtttaccaagagctatctgaacgcgttccatttggattgaggtgtattgaagtggatggatgaggattttgattagtagtggatttattccctcttaatccttgtagatttaggagaaaacgaacatggcctaaattatttttttcatttcttccctggtggaatattattagacgccagttacatttaatgctcggtcgacaaagttgtcatgaaaatcatggaatcatttggtttctttgggatttttatttttaaccctcaaaaaaataaaaaa

SEQ ID NO: 25056 - DNA, 1983 bp, Zea Mays
ctcaccagttcgccacggcagcaccaccaaccaaacaagcagctctccctccctcccacttctcattcaaacaacaaagctccctgcgataaaccgtcgtcggtttcggcatttcttggccccaaagcacgcgcgcgctaatgccttcgtcgccaacatcgcctactcgcttcgcgttgtcgtcccctttacttgttggacagcacctttaggtggcgcgtctcgtcgtccttgcttcccaagagaccgtcgccttacatctatcgctcgctgccttattgcctgcacctccgtgctgtgctgtactgcacctccgtgctgcgctccgaggctgctgctgctgcagagcaagtgcttctttcctcacaaattaaagcgtatagtcctgtgcgacgcgtgtgccgacggccggagcaaggaatagatctcgggtcctggtcacgggaaggtatcttggaagagctggatacaaggaaagttgtgagggcggccgccgccggccttggaattagttcgttctttcaactggagctatactagtaggagggcatttaagatgttcaacatagtttcgtcgtggaacaagaggcggagaagcaggtcactcgaccagctaaatccctgggtgtacaagccggctgagctatggcaggcgaaggagcaggagcaccaccacccgccgcccaagaagcgcagctgcaccatggtgttcacgctcaaggagatggaggaggcgaccaacctgttcagcgaccgcaacctcatcggcaagggaggcttcggccgggtttacagaggcgtgctcaaggatggccagatcgtcgccgtcaagaagatggagctgccgacttgcaagcaggccgacggcgagcgcgagttccgggtggagatcgacatcctgagcaggctagaccaccccaacctggtcacgctcatcggctactgcgccgacggcaagcaccggttcgtggtgtacgagtacatgcccaggggcaacctccaggacatcctcaacggcattggggaggtgaggatggactggccgctgcgcctgcggatcgcgctgggagcggcgcgggcgctggcctacctgcactccagcacggccgtcggcgtccccgtcgtccacagggacttcaagtccagcaacatcctcctcaccgaccactacgaggcaaagatctcggacttcgggctcgccaagctgctgcagcaggaccaggacctgcacaccaccaccagggtgctgggcacgttcggctacttcgaccccgaatacgcgctgacagggaagctgacgctgcagagcgacgtgtacgcgttcggcgtggtgctgctggagctgctgacggggcggcgggccatcgacctgagccaggggccgcaggagcagaacctcatcgtcggcatccaccaggcggtgggcgaccgcaagaagctgcgcaaggtggtggaccgggacatgcccaggggctcctacacgctggagtcggtgtccatgttcgccgcgctcgccgcgcgctgcgtctgctttgacagcgccggccgcccgcccatgcaggactgcgtcaaggagctccagttcatcatgtacgctaacatgaagatatgatcactctcgcgggtgcaaaccgcgcgtgggttttctttacttttgagacggggggcggggcatgcggatgcggctgctggattgcaattgcaggtccgcagcttttgtttggttgatgaaacgaattgtctaaaagggctttatacagttacatagtagtgcttgtttggtagagcttgtagctctagccaaaccagttctactagtgatttctcccatgaagtagatctgtgtgactctgatttatccagttagaaaaaacgttcgttagaataatttttattggtataaaaaaatcgtgtacttacacagttgcattgactaggcatggcaatttcaaccgaaaacgttttcgatgggtatatctgacc

SEQ ID NO: 25057 - DNA, 4325 bp, Zea Mays
aggcagagaaatatatcgaacaactacttcccctccctatcagatctccttcttcctctagaatctcccttctcctactctcgtcattcctagattatgttgcttggagcggacgctcacaaattgatatcggagacactgatctaagcgctagcacacacctactacacgcgtcgcgcgaaggaatccggatccatggagcccaacctgaagatggcgatcgaggaacaatccaagcttcttcgcgacatctgtgaccacctctttgctcaggagacgcgttggtgcacgctcgagacaaccgtcgcgtggaacaccgcgtcaccgcaacatctggaagccaacatcgccatcgagagtctgacatcgatccacgtggaactcgacgcccaggtcaccgcagcgatcgagcgcctcgatgaagtcgaggccgctttcgtaatgcgcctcggtgccctcgtgtcggcttacgcggccttcgagtcgtggcggcccgacgtggaggcttcggtcgacgagatccacacctccgtgcatcttctgcgtgacgaggtgtccaagtgggctgcccaagcgccgccgccacagctcgataccgccgcgggtattctcggcccgtaccagtcggtggcggagcgctcgcctgctgccgcgtacaacaccgacagcccagatgggaattgcttcgacaaaaatcgctgggggcatggttttgggcatctccttgcccaaaaccatctcccgatcaatggaggagattgtggaggcatcaagaattcgggagtacaagaaatttgattccagtacagccagcaagactccatctcgtggtccttttccgctacctccaccgcccaagtctgctcctggcaagctagtggactctaaagccctagaacatcttgatgcaccagttatggcggattgtctctactccgtctatgctttttgtaaggcctagggcctctgctacaaatgtggattgtcatatttccgaggccatcaatgtccggatactgttccgcttcacttggtagaagaattatggcatcagtttcaacctccatctaaagataatcaatcagtgttggggatcaaagccgagctcagggtgctccatctatgtcagtcggttgtaaccactggagcaaacctgaaaaccatgagatttgtcagctagctagcaagattttcattgctcatttttattagaatcgggtggttcagtttcctttgtcagctccaccataacaaggcactgtccaaatattgttccactctcgactcctttatggatccaagtagcgaatggtgctagtgtgtcttgtgtttcagaggtgctcacagctgattagtctattcaaggataccatttcacctctgacctcaagatattggatctcccaacctatgatatgattgtggggatggattggttgtctacacatagtcctatggtcgtgcattgggcagataagtggctatctctatcaactagtggcatttcagttaagctttttggcgtgcaggcatcacaaacacacggtgctctggtgtagctatgtagcctggataccttgcccgcatctgaacaagaactagtcaaagagcttcccacagatcttcaactgttattggacaagtactcatcagtgttttagttacctactagtcttcctcctgtcagggactgtgatcaccagatccctctgctacccggagctaatcctatgcaaatgtgtccgtatagatatgctccttctttcaaatctgagattgagaaataggtgaatgagatgttggattctgacataatccagcatagcaaaagtcccttcgcatcatcggtaattttggtaaaaaagaaggatgggactcatcggttttgtgtggattatcgccatctaaatgccatcatggctaaggccaagtttcatgtacccataattgatgagtttcttgatgaactccatggggcagcatggttctccactttggatctccgcgctaggtttcatcagatcagaatggcacctcctgatctgtacaaaacaacgttccaaacgtaccatgggcattttgagtttcgttttatggcatttggtctcacgggggcactggctacatttcaaggagcaatgaactgcaccctgaagccattattgcggcagcgcgccctggtattctttgatgacatcctgatatacactgacacttggaaacatcatctaaaacatttggaacatgtgttgcagttattgcttcaagaccactggcaagtcaagcttactaagtgcacatttgcaaaacaagaaatagcttacttggaccatattattagtaaagttggcgtggccactggtccggccaaagtggaggcagttgtatcctggcctacaccaactaactctaaggagttgcgaggttttcttgggttgacaggttattaccgcaaattcgttcaaaacttcggtgtcattgccaagccccttactgctctcctgaagaagcatgttgtgtttttttatgaacatcggatcatgctactgcttttgccttgttgaaatcagcctttgtcttcagcacccgtgttgggcctcctagattttaccaaacaatttgccattgaaacaaatgcttctagagcaggtgtgggggcagtcctgctacaaaacaaccatcctctcgcttacgtaagcaagcctttgggtgtcaagaatatgggtctttctgcttatgaaaaggagaacctcgccatcttgcttgcagtgaatcactggagatcatacttgcagcatggaacattcctcatcttcacgaatcagtgaagcttaactcatctcaatgaacagcgtctgaagactccttggcagtagtgtgtcttcactaaattgttgggactccaataccaggtggtatacaagcagggatcggccaacagggctgtggatgccctctctcggtgtcctcattcgcctctttcactcaatgcaatatcagtgggcactcttcaatggctatcgaatgtggtggtaggatatcatcaagattctcacgccttaaactgttggcagatctgtctaattcctctacaacagatggtccttacaagttgtaggaaggcattattcggtacaaaggccgcatttggattgtccacaatcccacactacaacaacagataatcttctcattgcacgacagttcggttggccactctggttttccagtaacgtacagtcgcctgaaacatctgtttgcctagccagcaatgaagtatgttgtccgacaatacgtctactcctgtgacatctgctcgcgtgccaaatcggatagatctcagtaccctaggttgttacagctgttgcaagttccttcacatgcttggcaggtgttgtctttggatttcatcgaaggcctccccaaatctggcaagtttgactgcattgtcatcgtggtggataaattttcgaaatttgcccatttcattgtcctcgctcatccttttactgcctacaagatagctcaggtgttcttggacagtatctaccgcttacatggtatgcactcggctattatctcggatcgcgatcggatattcacaagtgccttttggcaaggcttgttcaagctttcaggaactgagttacgcatgagcacatcttaccattcgcaaacagatggccagatggccagacagagcgagtaaatcaatgccttgaaaccttcttgcgttgttttgtcagttctcaaccgagccaatggagcaagtggctgcctcttgcagagtattggtacaactcctcattcaattcctccttgggtaaatctccgtttgaggtgttgtatggctatcatccacaccacctgggtatatctacagtagatgcaattcccttgtcagacttgcaatcatggttatagcagagggagcttatgacccatgatgtccgtcatcatctgctatgtgcacagcaacgtatgaagcctcaagcggacaaacgcctatcggaacgtgtctttgctgtcggcgacatggtgtatcttaagcttcagccttatatccagaattcagtggctactcgcgccaaccataagctctcctacatatattttggtccttacaaggtactccaacgtgtcggcagtgtggcatacaggctgcagttaccatcatctccgtcaatccatcccgtattccatgtgtcccagctgaagcccagtgtcaaatcttctattctggtcagcacttctttaccttatacatgtgctcgaccgacgatccttttcttggggcggccacaacgtcgaccaataagttcgag

SEQ ID NO: 25058 - DNA, 875 bp, Zea Mays
cgcatcgcctctccctgcagtaccccctacctggggttcctcttctctctcacgctagatcaggcggagcactattcatcccccaacctttccttccggaggatggcagcgagcgcgccttggcgaagaaacctcccgctccgttgcggtgggtttggactccagcgcggaggcctggacacgacaatgtgcaaggcggaggaaggccgactcggatccgctcgatctcgccgacgacgaggcccaacaacaggacgttgcggcgctgaggaagcattcccatcgattcctccctgagctgatccctggctcctcctcctcctccccgagaccccgaccaactactgcgttgaattgctgatcaagaacaagagccaactctggttatcaactccagcgactcaggcagacaagaagatgagtacttcatctgaagatatcagtgttcaagtcattttccctggatcacaatatcaaacaaatgagcaggagcagccaaagcatgtctcctctgctgtggatagtaccaatccagttggtttggcatcctcggctgctcctctctctgtgtgtgttcattatttatttttcggattcctgttgcttttcagtagattccattcacaaatgctcctgcacttttttaccgactgcgattgtgattgcttatcaatttcagttctaagagattttcagtaatcaagtgttccattgtatacttaattatgggtttttaaaatttagaaattaaatagtacataattatacacattatgtgcccctcaatattttatggagattatatgtctaaattgaaaaaaattaaatcaattattcaatggatttgtacgttaagaaaataaaaattgaaaaaa

SEQ ID NO: 25059 - DNA, 905 bp, Zea Mays
ttatgcacttatgtaatctccagcaacttcagggttcttaaaatatgatgctttatggtgctatctttggttgtttatcaccaattctgtccgttgctgctttcctgagttataaatctccatttctctctccaaaagatgagaagcaaaatgtggagaaagcaaaagccacattattgaatgagaaccttgatggatctagttctgtaacagataataaacaatccgatcacctgctaatggtaattgcatacgacaaatggtcccgcatactgctacagaatggtgataaatctgctcgtcagttttgccattcattctacttgaatagtactgtgatgcacatgatcagggacatgcgtcttcagtttggtaccttgttagcagacattggacttatagatcttcctaaagatactctgaggcacaaggtgggcagtagaaaaaataatctcgagagctggttttctaatatgtctcttccattcaatgcctatgctcgctgcacctcggttattaagtcggtgatgtgtgcaggtctataccctaatgtggcagcatctctagagggtgttgatcctggagctctaggtggaagaaagccatctgatgttctgttcagtaaggaccgtcctcgatggtatgatggaaggcgagaagttcatatacatccatcatctgttaatcacagcttgaaagctgttcaatatccatttttggtgtttcttgaaaaggttgagacaaccaaggtgttcttacgtgatactagcgtcgtttccccctactcacttcttttgtttggtggttccatggtaatccaacatcagtgtttgtccatgactccatgtgacttttctggtgacagtagagggtggtggaaacccttcaatgtgaaccttttttag

SEQ ID NO: 25060 - DNA, 2101 bp, Zea Mays
agccattacattctgttcactgatatcacttgctaacaataatatgggtccacaagttctggagattcattatttagcatttagcaatccttttcccccacaatcatggttgaagctggaaggcgttcctcggttttgaatttctttggtaggagcaatgaatcctagctggccagagaaaccactggggttattgtctctgctggatgaggaatctactttccccaatgccacagatcttacttttgcaaacaagcttaagcaacatcttaactcgaattcttgcttcagaggagaaagagacaagggatttgctgtccgtcactatgcaggagaggtggcttatgatacttcgggttttctggagaagaatagagatttattgcacatggactcgattcagctccttgccaaatgcaaaacttttctgccaaaaatgtttgcatctaagatggtcaactgttccaacttatgcaaagactggaaagtacaacaccacactttattcgttgcattaaaccaaataatttacaacttcctgcaatttatgaacaaggacttgtgcttcaacaacttaaatgctgtggggttctcgaggttgtccggatttcaagatctgggtatccaacaagaatgactcaccagaagtttgctcggcggtatggctttcttcttcttgaggatgttgcatctcaagatccactcagtgtttcagttgcaattcttcatcagttcaacattttacctgagatgtatcaagttggctacacaaagttgttcttccgaactggacagattggcaaacttgaagatactcggaatcgtactctacacggtattctaagggttcaaagctgtttcagggggcatcaagcccgtcatcatgcgagagaacgaataagaggagttttggctcttcaaacattcattcgtggtgagaaagcacggcaaatttattcctctttgttgaggaaacatagagcagcagttattttgcagagtaacttgagatgttggcttgcaagaaggtatttcataaatgtccggaaggcctcagtgataatacagtctggtattcgtggcagtcttgttcgaagatgtaatggcaatattgatctaataaacgtgctaagagagtttgaatcaaaacaggaggcagagggtgaccaaattttgatcaaggcatcagtcctggccgagttacagaggcggatactaaaagccgaggccacagtacgtgaaaaggaggaagagaatgagacgcttcatcagcggcttcagcaatatgaaaaccgctggttagagtacgagcagaaaatgaaagctatggaggaaatgtggcagaagcaaatgcgttcgttgcagtcgagcctttccgtagcaaagaagagtcttgctctgcatgagacacctaggatgtcggactcatcagtggatcagagctgggaaagcaacgggaaccatgtcagcagcgggtctcagctggtgccacgcactggtgggcgcgaaatgagcgctggcctgagcgtcatcggccgcctagcagaagaattcgaacagcggagccaggtttttgctgatgacgccaagttcctggttgaggtcaagtccgggcaggcggatgccagcctaaacccagacatggagctccggaggctgaagcacaacttcgactcgtggaagaaagatttcagtggccgaataagggagacaaagatgatcctgaacaagctcgggaacggcaacgagtcatcgcccaactccgtgaagcggaaatggtggggcaggctgaacacctccaagttttcgtgagtttgttatgtatactgattggtaattcgtagatgtaccggtattttacacgccggtgtggttctagcttcctagagtttctattctacggggtgtcgtgacttgtgaaagtcgagtgtgttgggctggagttgtgttccgtggagggcgagttgtatagttcttccacaatggcttcctttgaggggggtcaaggactactgaattgtgatgtaattacttgctgaagtagttgtcgaagcgggaagattgtgacatcgctcactattccactatcctcgtgctttac

SEQ ID NO: 25061 - DNA, 3947 bp, Zea Mays
tttgctctgttatagagtagtaaaaacttcacctttggatcatttacctcactctctacaactacaagtctacaaggtaatgctcatgtaaaaaattctctttgaagggcttaacgaagagttttacagggataggcatgcaaatcctaaagctatatccgcttaaaaaaatctaggaatccgtaaacagtgtacaggtcaaaacaaaagaaagaaaaaaaactgcacacgacgtcaatcactctcactgcctctttccaccctgctgtagactgccctttctaccgttatatacccagcacaggatgtcgcgaccgatcggtttcccgagctgcagaggaattcttgcgtggatgctcgtctcttgcctagttgtttgtttcttgcagaggaattttttcctgaacttgtccccgccgtcttgaaggtttcttgtttgggagcagggcggaggcgctcctttccttcttggccgacgatggtatggactgggcagcggcgcgcgcgagcgatttttgcggcaaaccccctgcgagaaacatcgtccgcagaacacctcactttcactttttgtactcttccgtctctgccctcgcgttattgcctcgtctcgctcgcctggctggctcgtgccttgccttgctcagcgtacgcgaacgcagcgagaaggaggagcaaggaaatagagagagagagaaaaaaaaatcaagtcatccccctttcctctaagctcgttccatggagaactcttctcacaagcggacgcgggaggcggccgacctcgccgccggaggctgtggagaggagggctcgccgcaggccgacgccaagaggctgcggccgcaggacctgctcgacatgctggaggacgacaccgacacggccgcggtcggcgacctaccgtcggtcatgcggagcctgtaggaggagatagctagcttcgacgaggccgcggagacgccggcgccgacatcggggcagcagccagagctgggcttcctactcgaggcctcggacgatgagctggggttgccgccgacgggcgccgcctcctcttcgtcggaggaggctgggcgcgcgggggcaccggagcccgcgctcgacggccagatctggggcttggagggcggaggtgctcctttccttcttggccggcggcggcatggactgggcagcggctttcgggtctccgtcgtggagcgcggtggcgacggaccctggcccgaccatgctgtccttcgcaggcccgtcctcctccgccaccgacgccgaggtgcgactccaggatttcaccgtgggtcgcatggaagcggaggcgacggtcgcgagcatcacgcacggatgggggcaggcgatagcacggcatgcagacgcccaagtccagcaatgctggggcatcacgagcgggcgggggtaccgcggcgtgcgtcacggggacggggcgggcgcacgggcgggcatcgcgatgacgggtgcgggagcaggcgggggcacgcgaatcacgggagtggagccacggtggtggtggacgccctcgttagtgtcttatagagtagtagagatagagattgtaggcgtccacaattcccagtggcgcacggttctgctgtccctccatcctcccgcgctccctccgtgctacatcaacgcccgcaggttctgcctctccctgtcactacgccgcctgcccccgccgcacccctccccgttactaggtgcggcgccgcgccgcgccgcctcctcggcctcgcctccgcgctcgccgacgactcgtcctgctccgacctcctcccgctgttcccagtccccgccggctacgccgcctctgacgccgcggatccccgatgccgagagctgcccgtcgcccgctgccgtcagcagcgtcttcagtaagttccgcgacccggcgccatctcctgtgacccctgacgacgctgcggcggcgcctgacgagcccagggatcttggcttcgacgatgacgacagtttcgacgccgattctattctgtgcggcgtccaccagagcgcggccgagggcatcgatggcatcatggcttctggcaggatcagaatatcatcatcaatcaagcgctgaagcggcatagtgtcgatcctgaatggtggatgtgccctgccatacctgtgaaagacattaccccggcaccaccgccttcagtggcaatggcgaaggaagactaagaagaagtcactggggacaatatacgaggaggggactcctgagcctgccaatggcgacgacgatggagctttggcactgccagagacaggattggggcttagcttgaatactgatggggtgctcaaggcgtggtgtggcagaggctctgcgtttgctgatggcaatgggcctgacttgccattgtcccctgctcatgtggtagtaagtatttccagcttatctaaagatataaaagatcttacatttccagttaaaaattaaagatggctagagctcttggaaccctgagtagtacctgctattagttcatatcgtctggtaagtagaatctatttcacttcagtagaagtacagatcgtctgttgttttatatcagcagtgatcagaaaaatcttggcatgcattgctttgtttcagtcccttcgcatttcttgtcaatggaagatttctcccagaagaaaatctgtgtctgaaatttgctaatatgaaatagtacagtatgcccaccagtacttgactttactggctcaatgggccaggcagaaggaaattccaattggttgttttctttgagttgaatcattataacaaacttagccctcattatgttgtatctgcagtttttgaattcaattgaagtaaaaggaaatatcatagtttggtcctttcgcgaattttttttgtccaattttttgtccttgtaggtttttccgttgcattagaaaacactgtaggctgcttccttgcgttgcctctccgtttgcaggaacaagagaccagtttttatgtcatagacatgaactactttcctggtatgtggctgctttcttgcgttgtctctccgtttgcagggaagggtgctcccagcccccgtcatgccccttggcccctcccaaccctcgtcgtcataacggagggtgctgcgacaagccagcggatgagcgtggcgatcccgctggagcagtccatcacgccggtgctttaggactttatgaatctcaacatatgctatctaccagtgtattactgtggagcctcgtcgtcgactcccacgtccatgagaccacctaggagttgctcgtgtacagctagctctaccaattcgagggatacataagtgggagtactgagggaggtgccgggggagaaaatttttctcagtttggtgctgatttatcaagacgaatgacttattgccacagagctaaggatgacagtactggactgcagagagaaagttggggcagatttccggcttcaatttatgtccttatcagcactacaacagcaacgacgagcacagtagcaaagcagtccgagccttgtggaggagagcctccacaagaagtgcctcgacgggttccctacctccgccgccggtatcgtgtcattgatgggccacttcatcgctatctagcacaaggtgcaacacccccttccctcgctccttcgctcttcctggctccaatctgatacaccctctacgttagggtatgagtgaccgagtgacacttgatctgtcgactttaaccggggcagtcgacaaagcacgcgcctggatgccctactatatgtattgagtacataggattattagtacacttcctttgcactgtcacagcgatctagatctccacgaactaaatgtggatcctctctcttggcgtgcacaccgatcttttcattcacactgcactcaccgtcatggcatccaccaaggacttctcgttcgtctctgccttcaggt

SEQ ID NO: 25062 - DNA, 2360 bp, Zea Mays
ctagtctgtcatatgtggacgctatgatgcatggacagtgggcttcttagggcctttatgggccaggaattcgtcgaagcctgaaggaaggaaaaaaaaaacctaaagatggtcgctgccaccaggtagtttccaggcttccacgtttcactccaccgcttgtttccagttaccaccactccacttctaggttccagccgtgccggcgccgccgcttgcgctactctgcgcgccctcgccgctgcttgcttgctcgcaacttagaaggtgacgccgcctgcccagtgcgagcacgcctccacttgcactgcgggctgcggccctgccgaatctggaaggtgtcgagaagaaatagatccttgcactccatgccgctatgatcagcgctggccgcagcaggcggcgggggcgggcaccggcgtccctgcccacgaccacgaccgctgcttcccgccggaccgagcactccatctcctgctgttattgtgactgcaagatatattccttaaacgacgccctcttcaatttggggtggaagtatgctagatatatgagagcatggttttctgtaggtgtttatctatctctcattgctttagtcagtatatccttgtgggtttagcaggtcccatatcttcggatgtaatgtggatgaagttaagctttggttatattttcccccctaggagtggattccttagtgcctggttacagaacctactgacttcaggtctcaacatatctattgtagacaccacaatcattataatgtcaacaatcctgtctattgtttttcatgagtttggacatgccattgcagctgcaagtgagggactacagattgaatatgttgctatatttgtcgctgtactttttcctggggcatttgttgctctgaactatgacctactacaaaatatgcctctcttttccatgcttcggatttattgtgcagggatttggaataatgttatgctctgtacagcatgtgtgatgataacattgttacttcctgtgatgttatatcctctctatgtgagtggtgatggcctcatggtaagtctacttctagttctatgtgtttacattattttaattttggcaatcttcacaatctaaaagtctgtcagaacaggtcatggaagtccctgaaatatctcctatgtcagaatacttgtccactcatgatgttattctttctgtggatggtctgaaaataaccagaactgatgattggatcaagattctgaaccaaggtactacagcgaaatctagggatcctgaattccttgaaggctctcatagatatgttgccactagttctaccaagggttattgcgtgcccgattcatggatagatgcaagcaaaaatctctggcagataagagacaagctgccttgcccagatgaactgatagccttcgaaaaagttatctgtaacgtctcaaccattttgacagagaagactagcataggtagtgaccagaaggaagttgagggaaaatattgtttgattgcgaaagatgtagtaaagcttagaagatgtggaaacggatggcacatgactgaagatgatgaaagtagctgtgcatgttttgaggatgagcactgtttggtacctgttctgaacccaggcttttcatggattgaggtctcctatgccaggccatactctttgagatgtttacaaaaaggaggaaatttgttatcatcacatactgcaaatagtaactttggacagagtccttgtgaaggatcttttgtttatgtgggtgatctgtcatcagcagcacgttcggttaggttatcccgctaccgacctcgatgggcacttctacttttcattgcagacatcccatatatcttggaaaatggtttaagtagcttgcttcatgcatctgcagcattggctgtaatcaattgcctaccggtgtattttctggatggtgaagcgattctggagactaccttaagctatgtagcttggtttaccccaagactgcaacgcagaattctaaaagtatgcagcgtggtgtggacgggtttattagtcattactttctcaagtatttgttattccacagtgctacattatggcgtatagcaaataacccatgtaattttgtcttgaacaaagagaagatcattttaatggaacatgccaactgtactctgtccattgtaaattataagttgttttgacttttatatatacataacttttgttaggctatcttcagtagactatccacgtactcatattcaagcttcactccttgaatagtgtagtctgtagtgtaaaatagtgttttaggtgactatatggataaactgttggatatgacgtatctacactaggt

SEQ ID NO: 25063 - DNA, 1854 bp, Zea Mays
acaagctcctcctcctctcctccctacacactccagagccagaggcagcacgtgctgccgtgctcgagcacagctaggccgcagctgcatcaccatggcgggcgcgccgctgcggagatcggaccttgacttcgccgacgtctttggcggcccgccgcgccgcgtgtctgggaacgagcaccgctcgcagcgcggctcgcaggacacctcgtcgttcgagtccgcgacgagggcggggagcggcggaccggacacgcccgttttcggggaccgggggagctccgaccgaagaaggcagctcggggaggagttctacaaggacatattccccgggagcgaggcagcgtcgcccaggcggagcggcgccggggattgggggaatgtgttcggcgcgcaggcttcgcctgtctccacggcccgcccgcgatcgagcttctccattcggttcaacagaggcatggacagttcaatgcctacttctccctctcagcaaatgtccaacagaaacgatgatggcacatcttatgcttatagtgttccaacttcacccaatgcatccatgaacaattatcttgctcaaggggcagcccgacaagattcgaagaagaatcccttctcatggcatcgctatccatttctatctaggttccgttctcaaagtggagaaaagaagagcacatctaatcatgtcagctcaatggacaatgaatttgaagggactcctgttaacttggaaagtatcatggccaataacaagttccatttttccttctacaagtgggcaggcaaaggagccttgttagtgttgccagctactgcacaagaaaagtccgtagacatcattggactgagaagcttccctcaagtggtcattcaaggtattgatctaattgattgtgaagacagcatgtcaactgccaccggaacagccaaaaatcagacagattacgaagattcgaaatctggaaaacatagcgcaaactcagcaaccaaggatggagctattcctttactctttgaagactacatgcaaggaacgaaacagagcaatgatcatacaaagaatgatgtttcatcaactaccctgagttctaaaatttctcgatcaccttcaggggagagaagtcgtagtagcagggtgaaggaaaagatgaagggtttcataaaactatttagccctgagagttcaccaaagcgcaaacgagcaccggaaacacaaaggcaaacatctgtggggaaaaatggaaccaaaactgaactgcatgataagttcagcatgtccagtttggaggccagtgaggatgtggaaacgatgactgaagtgcaagagaggttggacaaaccagttttgacagcgaatagtaaaatggatacagctacgggaagtaatgaggccgcttctaatgagcccatccatgatgatacaaaagacaaagcggccaacacaatagagcatgaggacattgaagatcttgatggatgtgtggttgagcatttttctgaagatcatgttcttcataatgatcaggaaaaggagctaataaagatatcagaagctaaaattcgcgaatggtctaggggaaaagaaggaaatattaggtcattgctttcaacactgcaatatgtcttatggcctgagagtggatggaaaccagttccacttgttgatataattgaaggagcagcagttaagaaggcttaccagaaagcattattgtgccttcatccagataagttgcagcaacgaggtgctgccatgcatcagaagtgtatagcagagaaggtttttgacattttacaggtgctattaattactgctttcccttgttgaaacactccagcagtccaaatatg

SEQ ID NO: 25064 - DNA, 2227 bp, Zea Mays
atgtgatcggatgtgaattatcagcttacacagtgatgtcatcccaagattctattggcacggtgctcaagtgtatgcagaagggtgcggtggacttccttgtgaaaccagtgagaaagaatgaactgcgtaacttatggcaacatgtgtggaggcggcatgcaatgaattgccagacaaatggatcagaaaataatgcagccagcaatcatattagtgccaacgttgctaatgggtcaaagacaggagaaaacagcgacgaggaaagtgatgcccaaagctttggtagcaagagggatactgaaattcatagtgttgaggcggtacaagatattcgtagagatgaagtggctggctcatccaaaaataacgaactacaaaataagtcttatgatggagtaaacacaaaagtggatgtgtcaaaatataccaatggtgctccaagtggaagtgagaagaatgtgcggtccaaatgccttaacggtattacttctgcaaaggtggctgagcaaattatggataatgccttgaggatcacggatgcaagttcacgccgtccaacaaatcttggcaatggtttggctatgactgagccagcagctgacagaaaatgtcaatcttcggtcatggaaaataatgctgtcacagaaaataaccctggtgataagtcgaagggtgctgcaataggtcatgctgattcttgcccctccgaatttatggtgaccaacttggggaaggaacaccatcttaatggttacaaaaaccaagaattcagggaaaaagatatctttaatcactcgaattcctctgccttttcaagatatggcaataaaaggatagaaccatcaggtgagattcagtttttcccttctccctgcgtcattgggcaagggcatgttaatggcaagaacccagttttccaacccaatggggtgttgctgcctcccaatgaacataatacaggtgagagtacaaggcaagctcgaatttctctggacagtaggacagagggtgctgccatcctgtgttccactagtgccagggaagatgctggtgcaaatagttcttcccatagaaaggacagtatgagccatccctcatatgggtttatacctgttccaattcctgttggtgccacgatgccgtaccattatggtgcgattctgcagcccgtatactacccacagagtcctcttatgcactgtgattcagctggaatcaacaaggcagcaatccagcatgcctctgggcaacctaattaccatgaagctcccggtaaaccatctcatgttcttattgaacacaaacagtcagaggaaaaccaccagttgcatcattcaagacaaattcttcgggaatcaggagaaccaattgacatggcgagagctcacgtggatcgtgctaaccagactgcaagctgcagccaaggtatctgtaaaggaagtggatgcacatgtagtggtgaagccgatatcaacgcaaacacaatggttgccctagagagtggcaacgagagtggaatccaaaatggtgacaggtctcgccgtgaagctgcgttgatgaagtttcgcatgaaaaggaaagatagatgcttcgagaaaaaagttaggtatcatagcaggaagaagctcgcagagcaaaggccaagagttaagggacaatttgtaagccaaaagctgaactcagctacaacaacagacgcagaagctgactcgtgaccggcgtcaagtcatcactgtaacttattcttcccttcccaccaggtgtgggcaatcggacttgtaagactgaaggctggcagaagttttttcccttccatggttagcctttctgcacaatgggtgaactcttgtgtcgggtgtttggtgccgttgtggccttatttttgtaaagtgcatcaaattgacaaatgttcagaggggaatgggttgggggtttaggaaaacggtgcagctgccagatttcgcctatgtacttagatgtttgtggggggtgagaaagcagagcctgtacagcttattcacccattttgttgccattacactagtagtgacttgtactatgacaacagtagacattgttgtacagccttaccagtcagcagcgggtctttctcattttatttattagttattaatcctgtgggtaatcatgtcgataaggcgccgccctgtatgcagggacagttgttgatttgtttgatccaatccaatcatccagcgttttg

SEQ ID NO: 25065 - DNA, 422 bp, Zea Mays
ccgcaggcgcaacaaaattcgcatcggcatcgcaatctcgctcgcagggaggagagggggagcctctaaccctaaccctacctgcctctgtcgcaatcgccatggccgccggcggagagccctcccccctgtcccctgccaaatactctcgcttgcccgacgacgcccagcccgacgcatccccgaagcgccgcaagcgccaccaccgccaccaccaccaccaccaccaccgtcgacaccgtcacgccgattccccgatacccgaggcggccgacgaagaggtagaggagggggagatactcgacgatgcttcctccgtctctgctatggaggtcaatgccgagtccgccgccccacagtcttcccttgctccgttgctctcgagggtaccacagccatctgaaaaacacacaccactgact

SEQ ID NO: 25066 - DNA, 1382 bp, Zea Mays
cgccccaaaccccggccaccaatcacccaccactacaacctgcgatcaatccgggaatcagccccgattcctaccagctatgccattggaactacaataaataaatcctgaaaaggcccgggaggagtttcggacagtaagtcaaaaaaatggaggaacaggagtaaaagatttcatggatagcatgggccttggggtgcttgttgagcagcttggagagttaaaattgggggaattgttggacacaccaccacctggcttggatgaagcaattgcaatttctaaggttatgcaattccttgaagcacaagaatacagcatgtttagtcgcattgtatttgacactgcccctacgggccatacactccggttattatccttgccagatttcttggatgcgtccattgggaaaatcttgaagctgaggagtaagattgcttctgcaacatcagctattaaatcagtatttggacaagaggtccaacagcaggatgcagcgaacaaattagagcaactcagagaaaggatggtcaaagtaagagagcttttccgcgacacggaatcaacagagtttataatcgtgacaatcccaacggtgatggcaatcagtgagtcatcaagactgcattcttcgttgcaaaaggaaagtgttcctgtaaggagactcattgtgaaccaagttctgccaccttcaacatcggactgtaaattctgttctataaaaagaaaggatcaaacgcgtgcattggatatgatacggactgacccagagttaaaaggtttgaacattatccaagcacctcttgtggacatggagattagaggtgttccggctctcaattttttgggtgatatactgtggaagtaacttcagttatgggaaacaggatcgcttataagggtgcttaattggccaatatcactgttagcctgctgcacaattgcactgctctgcaactagcaatctgtgggctcttctggttgtttccagctaacaattgcacaataagcttaagttgtttccagctacaatacagcacaacacattctccatggtgcgttaaatctgagtagaaagcaccaaattggagggttttgctgcactcctgcactagcatttgatgacctgttactcttggcagtgatgcagattggatttagccccaaattaggctaattgaagtgaaatgctgtaatatttatccttttatcaattatccccaagattaatagcaacacttgtggccttttggttcggcgactttgtaaaactcttcgtttcttatgtgccatctcaattttgtacaagaaatgtgttttctcttctccctcactggggcagttattcaggatattttaagctttggtttagctgccttgca

SEQ ID NO: 25067 - DNA, 3748 bp, Zea Mays
ccgcaattcaacacgcgaagctaaaaaagaaaaaaacaattcgaaacccccgacctacgcgaggacaaaacagcaaaaccaaagcgctcagccgctcgcgaggagcgaaaggcgagcgcgcagccgggcgcccgtggcggaggcgaaacccccgccgccgcatcgccctgagaccctccggttcggcccgggccgagctcgagcccgcgcaatctcgccgccggcgggcttgatctgatccaaggccaccgcgcgccggcgcgggcggcgaggaatggggagcgtggacggccgcggggtcgaggggatccacgaagctaatcggcgcgcgcagttgattggatggatgaatgccttactcccggaattcagtttgcctccggattcatcgagtgaagagctgcgagagctgctcagtgacggcgtggtcctgtgccgtcttgtgaacacactcatcccgggggttcttgagggatcctgggagggttatgcaccgtcagatcagaggttaggcaacgtgaagaaattcctctcggtggtctctgatatggggctgccaggcttcagtttgaaagatcttgatgagggattaatgtcttctgtagtggaatgtctcttggttttgaggggcagtgtggatcctagattaggtgatgatattccaccagatgttaccagaactcctttgagaaaacaatggggagttcaggaaatggacaagcctcaagttcccgctgcagcactagggaaaagatcccctgcagaggacatgagaaacggcgttgcagattccaaaacccatcagaaaacttctgtcttttctggacaaaaggttcgtgaagttttccaattaaaacgcggatcatattcagatcttactgctgccaagatttcagagatgatgcactctaatagcttagataatgcaccgacacagtcgcttattagtgttgttaatggtattttggatgaaagcatagaaaggaaaaagggagaaataccacatcgtgtagtttacttactgcggaaagtcgttcaagagattgagcaccgtctctgtattcaagcagagcacataagaagtcaaaatgttaccatcaagacaagagaacaaaagtactgttcaaaaattaaagcacttgaaatgttggtaaatggcacaaatgaagaaaaccagatggcaataaacaggcttcagatagtcaagaatgagaagtcacaaatcgaagagaaaaaagaactctgtgagaaagatgttcaacgattaatgaaagagaaagaatattccaaaagcatcataatgaacctaacaaaagatatggaagccatgaatagattgcatgagcagcaacttgagcaaattggaagaaaggcaaaggaaatggaggaacaattaaccaccagggtaaaagaagtagagtatctcttgctacaatcgaataagaaagttgaagaacttgagattgcttctaggctaaaatcacagttatgggatcagaaagagaacatttttcagagttacatggataatcaacaattagttatcaaggacataagaatattgtcacagtcatatgaaaatgatatgtatgcacttcaaatgcagtggagaaatgaaatctctaatttaggatctgggttaaaatgtttggttgatgccgctgaaaattatcataaagtcctgacagagaaccaaaagttatttaatgaagtgcaagaactaaaaggtaatataagagtatattgtcgtgttaggccatttctttccggtcaagataaaaagtccaccacaattgactacatgggggaaaatggtgagcttcttatatcaaatccatttaagcaagggaaggacggacatagaatgttcaagtttaataaagtgtttactccatttgcttcccaagctgaggttttttctgacatacaaccactgatccgatcagttctggatggattcaacgtttgtatttttgcatatggccagactggttctggcaaaacttacactatgagtgggcctaccacatcaaaacaagattggggtgtcaattatcgagctttaaatgatttgtttgatatttcactaagtaggagaaatgccttctcatatgaggtgggggtacaaatggttgagatatacaatgaacaagtccgtgatctgctatcaaatgatattgcacaaagaagacttgggatttggaacacttctcaacccaatgggcttgttgttccagatgcaagcttgcactcagttaagtcgacatctgatgtattagacttgatggagattggacaagcaaatagagcagttggttcaacagcgctaaatgaacgaagtagtcggtcacacagtattctaactgtacatgttcgagggatggatttgaagaatggatcaacctctaggggttgtttgcatcttattgatcttgctggtagtgagagggtagagaagtctgaagtaaccggcgatagattaaaagaagctcaatacattaacaaatcactctctgcgttaggtgatgttatttttgctttgtcacagaaaagtgcccatgtgccttatagaaacagcaagttaacacaagttcttcaaagttctttaggtggacaagcaaaaactctaatgtttgttcagataaatcctgatgttgagtcatattcagaaactataagtactttaaagtttgctgaaagggtgtctggagtagagttaggtgctgctagaagtaacaaggagggaaaagatataaaagagctattggaacaggttcttgtacttcttgacttgtcactaactagagtttatttgtttccaattctgtagcaattttggttggaaaaacagtatactgaaaaaagggcaaacttttacatgaatgctatgttagtatttatcaaggttcaactttcgaagcatggtttgcatactactcaaaggttgcgtctttgaaagacacaattttgcgcaaagatatggaaatagagcagatccaggtcatcaaagacaaagtaaaatccccaaatttgttgttagatagaaatgtgcctggcttgacgaagactacagcaaaccaacctagccaactattatcaggcgaacgaatgcttaagtctagtgacagagttctatcggatcgtcagagttacggcgaggtgaatgtagatcctaaccaccatgtgatggatactgcaccagtgagcatagatgaagcaggatatgagaacaatgcatcggatgatggtttatcgggtgaaaccgagaatgataattcagctgctgagatgacagcggaacggctgcatagatttccatcaagaataagcaggttcactctcacaaagaacgggcagccatctatgtctagatcgaacccaaaggatgctaagactccaagcaatacgaaagctccatcgagccggttgacaggaggctcttcagccaggtctaaaagacggcagtagagcacgatcatgttgctcgttttgatgtgcattgtagttgaaatgtgaatttgatgggtagttgtaggaccgttttatgattgtaactttagaaaatgtcagacactgatggcagaatatttgaggcatttgtttgatcatttgcttatgccgagcaaaacagcaaacaatgctcgattgtatgtgaaacactctgacctgtgaccatttgaatgtcggtgcgcctccggaagtccggagttgtgtatataccaccaaattgccggcctaaaatttccag

SEQ ID NO: 25068 - DNA, 2918 bp, Zea Mays
ctctctacacgcccacaagctggtgaccaggatccccccacccaaaactccgctctcatcccaccccccctccactccactaccacggcggcacggcctgcctctgcagctctgccctgctccgcacccctcgctctccaaccccaacgcgcggcgttgctaaaattcaccgcagcgcttactccagtttggccacctcaccacccgccgccgctgtttaagaaggccccgcgcccgatcggggatcacgaaccttggccgccgctgccggagtgggggtaagcgagagccctcctgcttggggcgtagatttccggcggccatggggggcgccgtgatggtcgccatcgcggcctctatcggcaacttgctgcagggctgggacaatgcgacaattgctggagccgtcctgtacataaagaaggaattcaacctgcagagcgagcctctgatcgagggcctcatcgtcgccatgtccctcattggggcaacagtcatcacgacgttctccggggcagcggccgactgcgttggtaggaggcccatgctggtcgcctcggctgtcctctacttcgtcagtgggctggtgatgctttgggcgccaagtgtgtacatcttgctcctcgcaaggctcattgatgggttcggtatcggtttggcggtcacacttgttcctctctacatctccgagactgcaccgacagacattcgtgggctgttgaacacgttgccgcagttcagtgggtcaggagggatgttcctctcctactgcatggtgtttgggatgtccctcatgcccaaacctgattggaggctcatgcttggagttctgtcgatcccgtcacttatttactttggactgactgtcttctacttgcctgaatcaccaaggtggcttgtgagcaaaggaaggatggcggaggcgaagagagtgttgcaaaggctgcggggaagagaagatgtctcaggggagatggctcttctagttgaaggtttgggggtcggtaaagatacacgtattgaagaatacataattggtcccgatgatgaacttgctgatgaagggctggctccagatccagagaagatcaaactatatggacctgaagaaggcctatcttgggttgcccgacctgttcggggacaaagtgctcttggaagcgcgttaggtctcatctctcgtcatgggagtatggcggctagtcagggtaagcccctcgtggatcctatggtcactcttttcggaagtgttcatgaaaagatgcctgagatcatggggagcatgaggagcacattgtttcccaactttggcagcatgtttagtgttgccgaccagcagcaggtgaaagctgactgggacgccgagagtcaaagggaaggtgaagattatgcttcggatcatggtggcgatgacatcgaggataacctccaaagcccacttatttctcgtcaggcaacaagtgtggaaggaaaggagatcgctgcacctcatggtagcatattgggtgctgtgggaaggagcagtagcttgcagggaggggaggcagtaagcagcatgggcattggcggaggatggcagttggcgtggaaatggaccgagagagagggcgaagatgggcaaaaggaaggtggcttccagcgtatttacttgcatgaggagggcgtacaaggcaacaggggttctatattgtcattaccaggcggggatgttcctcctggtggtgagttcatccaggctgcagctcttgtgagccaaccagctctttactctaaggaactgctggagcaacgtgctgctggtcctgcgatgatgcatccatctgaagcagttactaaaggtccaagatgggccgacctatttgagcctggggtgaagcatgcactgtttgttggcataggaatacagatcctgcaacagtttgctggcatcaacggcgttctctactacactcctcaaattcttgagcaagcaggcgttggtgttcttctgtcgaacctcggccttaacgcttcttcggcatcaatcctcattagcgccctgacgaccttactgatgctcccaagcatcggcattgcgatgaggctcatggatatgtccggaaggaggtttctcctcctcgcgacgatcccagtcctaatagtcgcgctactcgtcctggtggtgtccaacatcgtggacgtgggggacgtggcgcacgcggcgctctccacggccagcgtcatagtctacttctgcttcttcgtcatggggttcgggcccgtccccaacatcctctgcgcagagatcttccccaccacggtccgcggtgtctgcatcgccatctgcgccctggccttctggctcggtgacatcatcgtgacgtacactctccccgtgatgctgaacgtcgtcgggctcgccggcgtctttggggtgtacgccgtcgtgtgcgtcctagccctcgcgttcgtgttcgtcaaggtgcccgagacgaagggcatgcctctcgaggtcatcaccgagttcttctccgttggggcaaagcaagccaaggaagaggaggaggaggaggccagggaaggttgatcacccggacggccggacccagttaccggcaccgcctgtggggatttttgtggtctgcacacttcactgtggttggtcctgtgatgatgtatttgtgaaaaaaaaaactttgggtagggggcagagatgatttggctgtacaatgtgaggcttgattctgccaaaggctggccttcagaactaggaagggtgtctgttatcttcttttgttgcttggagaccttgtgcttgtgttggttggaattttgttgcctatgtaactagtggtgtatgacagttatgctattggtttctttgtgttggtgccttcctccccatatgggcggccctgtatttgccgcagccgagtgcg

SEQ ID NO: 25069 - DNA, 2674 bp, Zea Mays
cttccccatcctcactctcccgtcatccagcctagtagcctaccgtttcaatttttgaactcccggtccggcaaccctccccagccagcgttccactcactccggcatcgcttcgaatctccgcgcggcggcgggaccgcgtgaccgacgcgcggcgctgccccttcagaaagccgcatggacgccgccgaccccctctgcgccatctcctcgactgcgcgactccttccgcggacccttggccccgccattgggccttccccctcgaacccccgcgacgcgctcctcgaggccatcgcactcgcccggtctctgaaagggtctgaggagctggttaagcaggctacaatggtgccgaaggagcacggggacatccaggctctctaccatgatgatggagtgaaaggctggcctcctgcaaatggcagcaaagagcaacagggaagaaggccagcactggatcgtaaacgggctcggtttgctatgaaggacactggaagcaaaccggtgcctgttgtggaccaatctaagttatcaaatatttcagatccaatcacattcttcatgaccttggatcggcttgaagaagccgaggaggagatcaaacggctaaatggagaggcagaaaaacgcacattgaattttgatcctgtagatgaacccattagacagcctggtttacgtgggagaaaatcagtccgcagtttcaaggtaattgaggatgttggtactcaagatcccaatgaggcaccggcttcccaaacagcaactatgacaggatctcagttgtcacaggatgttatgcatgctgttgcgggcaaaaatggacgatctgtttcctcaagatctagtgaagctatttcagagaaagaagatttagatgaatctgaagaggaagagtttatccggaagaccttagggattaaagaaacaaggaaagaaagagttagtcttcgtaactccattcttggagttaggtccctaagaagcaatactgaacaaaaaggttcaatgaaggtccaccctccagaaagtcatttgcctcagactcgccaagatcgaatttcagagttagagaaacatttgtttcctggaggtgcagcaaatgctaaatgcacagatgatgaatctgaagggtcaccagatattgtgatgggtgaaccatcattggtgcattattcttctgatgttctgatgactgatgagaactttactgcaagtgacgttgacagggagaccccaaatctgggtgccagagcagcagaccctgttcttgatcctgaaccaaacttgcctgatcatgcatatgaaaggcaacctggaggttcctcacttggtttgtacagagacacagaagttggagttgccaaagaaaatgagacatgtaacaggagcaatatatctgtggaggaagatgatgtgccaatagactatataactattggcaggtctactaatgaaacagaagtttcttcttctcatcctttggagggcagctcgacagaagaattggtcactaaaccaggtagacatgcggctccagatggtatctgtaggacttcacatgcagctgaggatagcattcaacatctagaagcggtcaaagagggtggtgtcctacaagataagtcaagccagttgttggagatgcctcaggaagatattaatccactgaatcaggctcagatgcatggtggaagcactaagaaatcggcacctgatctatccccgaccaaacagaagaagcaacaggcagttcaagaaaggaaaaggaagcaacagtcaaagaggggcaagaaagtggctggtgaatccctggaaataccccaaacaaattttgaatcggagaatcaacctcataatgacgatgtcaacattgagaaacagacaattacgagtagcacactctcaccaaatggtgccaaggggcaaaagggagctcaaaggagaaaccagaccaaaaaaaggaatcaaagaaaaatccttggagatgctgaccttgcatgccagcctggagtgagaaaaagctcaagaacacgctcaaggcctttggagtattggcttggtgaaagattactatatgggcctatacatgacaatttgcatggagctattggcatcaaagcatactctcctggccaagatggcaagagatcattgaaagtgaaatctttcgtgcctgaacagtattcagatcttgttgctaaatctgcaaggtactgaagccaagattttccaaagaggatcacgccttgtgacctgttgctttgtcacctcactatgggatgttgacatgtattggtagaactgcagtactgcacaacgaaatgcatgttaacttaggcaggtatcaaatggatgagtatctatctagtttggatgcgctactacccattcggctactcgatacgtggagtctagggtgtcaattgacattggtacttgatagtaagacagttttaggttcagactcttgaaaattgattttgtttgtcttctcgttttcagatttaagatgcgataccacagataaaaatcttgggtaattggaggtaaaaaaaaggatagcacacctaaatatcataatgatgttatgatttttttattcagtgttatggctcatgccgtcaaggtatcatgtggtgtgatagtatcttgatgttaagatctgtgg

SEQ ID NO: 25070 - DNA, 1174 bp, Zea Mays
ggcgtgcgtttccgcttctggaatccagttctttgctttgcccttcctccgcccccttcctccccccgcgctgcctgccgtaggtacgggaagggaaaaaagtcggcgccaaatctccgcatccattcgcacgccgcgattcttgtgcgcgatccgccgcgcgatgatgatcccgtggggcggcgtggggtgttgcctcagcgctgcggcgctgtatctcctcgggaggagcagcggaagggatgcggaggtgctgcggtcggtggcgagggctggcagcatgaaggatttagctgctatcttggacactgcaagtaaagtcctaccacttgtagttgccgtctctgggagagttggttcagacacaccacttatatgccaacaaagcggcatgagaggtgtgatcgttgaggaaacggcagaacaacacttcttgaagcacaacgatgctggatcctggattcaagattctgcagttatgctttctgttagcaaagaggttccatggtatctggatgatggaactggacgtgtatatatggttggtgctcgttctgcagctggtttaattttaactgttgccagtgaggtttttgaggagtcagggaggacacttgtacgtggaactctagattatttacaagggttgaagatgctgggagtaaaacgaactgaaagggttcttccaactggaatctcattgacagttgttggtgaggctattaaagatgatgttggaactattagaattcagcgaccgcataaaggacccttctatgtatcaccaaaaagcatcgatcaacttattatgaatcttggaaaatgggccaagttataccgccttgcttcaatgggctttgcaacatttggtgccttccttcttgcaaagcgtgcaatacaacattttctagaaagaaagcgccggcatgaactgcaaaaaagggttcttaatgcagcagcacaaaggcaagctagagaagctgaagggagcattggttcatcggacacagagcctaacagtaaaaaagaccaattagtgttggacatatgtgtcatatgccttgagcaagagtacaatgctgtttttgtgccggtctaaaagggttaaaaaactggataagcattgttttgcatcatacttcaccaagaagcccgaggaaatagtcgaactgca

SEQ ID NO: 25071 - DNA, 3580 bp, Zea Mays
cgacgtcggctcaacctccgccagcgaccgtgtcgtttcgttgcttttgctgaaccttggagggagggacgagggcattcgcgatccctgctgaacccgcctttccctctccccattttttgaaagcagaaaaaacacaggctcacggacctctccttgccgtcggcggcgacttcgcgatgttccagatgctgggcctccgcggggggagccccagcgctggcgaggcgacccccgtcatgagcggggacggcggcgcggtcgcgggtcccgcgcggccgctgcgcctggcgtactgcgacgagaagggcaggttcgtgatggaccccgaggcggcggcggcgctgcagctcgtgaagggccccgtcggggtcgtctccgtctgcggccgcgcgcgccagggcaagagcttcatcctcaaccagcttcttgggcgaagcagcggttttcaagtggcttcaacacatcgtccttgcacaaagggactttggatgtggagtacgcctttgaagagaactggtttggatggaactgaatacagtcttgtgttgttggatactgaaggaattgatgcttatgaccaaacggggacctatagcatccaaatattttccttggctgttctgctgtcgagcatgttcatctacaaccagatgggaggtatagatgaagctgcattggatcgtctctcactggtcacggagatgacaaaacacatacgtgtcagggcctcaggtggaaggtccactgcatctgaacttgggcaattctctcctgtctttgtttggttgttgcgagacttctacctggatttgacagaagacaacagaaaaattactccaagggattacctagaactagcactaaggccagttcaaggtggaggaagggacatatctgcaaagaatgcgataagggagtccatccgtgcccttttcccagatagggaatgctttactcttgtgcgacctgtgaacaatgagaaagatctccaacgcctggatcaactttctctgagtaatttccgaccagagttcagatcgggtctggatactttcacgaaatttgttcttgaccgaacaagaccaaaacaacttggagctagtacaatgacaggacccatcctcgctggactgacacaatcatttcttgatgccattaatagcggtgctgtccctacgatatcttcatcatggcagagtgtggaggaggcagaatgtcggagggcatttgattctgctgtgggcacttacaattcttcttttgaccataaaacatatatagaagaggactctttgagagaagcacatgaagatgccatgaggaaggctatcagtgtttttaatgcttctgctgttggtgctgggtcagctcgtttaaaattcgaaaagcttcttcacagttctctcaaaaaggccttcgaggactacaaaaggaatgcttttctggaggctgacttgcaatgttcaaatagagtacagaacatggaatcaaaggtgcgagcagcatgtaaccgtccggatgcaaagttagatgacataatcaggagtatgagtcaaaggcctatggtcctggaaaatggaaaatgcttgtcacattcttacagcaatgtatcgctggccctgtcctggactttttcaaaagacagttggagcatatagatgctgaaaggaatgccctgagattgaaatgcaattcaagcgatgataagttggcattgctcaggaagcaacttgaagcaagcgagggtcacagagctgagtatgtgaggcgctatgaggaagttctgaatgataaacagaaaatttcgaaggattactctactcgtataactgaacttcagatcaagagtagcaagttggaagaacggtctttgagcttgtcttcttctcttgaaaccgccaaacgggaatccaatgattggaagagcaaatatgatcatggtattttgcagcaaaaggcagatgagagcaaattaaaatcccaaattgcttctctggaatctagggtgaatatcagcgagggcaggttgtcggcaacacgtgaacaagctgattctgctcaagaggaagcatcagagtggaaacgtaaatatgaagttgctgttagtgaggccaaaacagctctgcagagagcggctgtagcacaggaacgcacaaataagaaagtgcaagagagggaagatgctttgaggtcagagcttgctaaccagctatctgagaaggaagaggaaatcgccagattacatgcaaaacttagtcaaacggaaattcatgctaccagtttgatctcgaggcttgaggccaccgaagcaaagttgaagagccacgagtcggattcgttggctttgaaggaggagatcagattattgactgataacctggagtctgttagaagtgaagcgatgtcgcgtgagaaggaagtcaggatcctggaacaggaaaagaaccatcttgaggagaagtatctgtcacagtgcaaaaagtttgatgagatagatattagatgcaaggaagctgaaagggaagcgagacgagcaacagaattggctgatgtagctcgtacagaagcttcttctgctcaaaaggataagggggaagctcaacggctcgcaatggagaggcttgcactgatagaaagaattgagcgacaggttgaagctctagaaagagacaaggctaagatggtggaagagatcgagagacttcatcagtcagagaaggatgctgtgtccaaggtcgcattgctcgaaagaagcgtcgatgagcgggaaaaagagattgatgagatgttgaagcggaataaccagcaaagatccagcacggttcaagtgcttgagagtctgctggcaacagaacgtgaagcatgcgctgaagccaataagagggcagaggacttgtcattgatgttgcaagcaactcaaggcaaactggacatgctccaacaagaaaccacacttgatagcaagctcaagacctctgcaaggcgcttaaggggtgaaggtacagagtctgtacatgatatggatatcgacgaagacaatggtaggcgccggaaacgatcaaaaagcacaacaagccctttgaagagcaatcacacagaggatggtggatctgtatttattggcgaagatacttgcaacgggagtcagcaagggacagaaacagaagactacaccaaatttacagtgctgaaactgaagcaggagctgaccaagcgcgggtttggtgcccaactcctccagttgaaaaatcccaacaagaaggatattgttgccctgtatgaaaagcatgtcgtcggcaagtagtacttgtatgctttctagacttccatgtagtgttcaaacatgaatttacacgatcgtgattgaagcgaaacaatgcatgtaacttaatttaaatctcctgtatctgtatttctccaatggcgcagttcattttaacacatcggcgaatacctgtatcattttagcacatcggcgaatgacataactactgtagagtacagatggctggtcagactgaacctcttctttttcgtatatgtgggtggtttgagtgtcgagtaacaaaaaaaaaaa

SEQ ID NO: 25072 - DNA, 7859 bp, Zea Mays
aaattaataaaaaaaagttagaagcgagaagacgatggaagaatccatttctcaaacaaaaatgctattaatgatcgcactcgacttgacactggagtcaatcttggttcatcaaagtaaaaaaggcagaaaacagacacgatgacatctgtttttgacgccttgattaaacacgtggccagcggcctgctacagcctactgcctacagatgcaaatcagtaccaggcgtgctctccgtgagctctacgcctctacctgtgtcttggcgacgactgggcgaccgacgacgcagccgtaggacaggcgaccgacgacgcagccgtaggataggcgaccaggtcttcctgttggctcttgcccttcgccggcgacgagcacccgccaggtcttgacacatctatcttgactggataacttaccttgttaatgaaggtttctctgatattccggtggcctagcagttactgtggaggatattcatttgtgtttatcatttatttggtcttgttcagggccacaacgacattgggaacaagtgtatgacatacaaacagtaaaatgggaaggaaagggtcagaagtatcaccaagcaaaaggtatcccttgaggtctgcacatagtagtggtagagttcttcgctctgccttagccaataataataaggacagtgagcctctgaatgcggctgctgctacccaagcagctgtgaaaaaaagaagtggcaaccagctagatagtcctaatagcactgtcaggctacttcgttctacatcaaaaaataaggacgaggcacatagcgggcctctaaatgacaggatcattgataagccagctgcaaataaaagaaaacatgccaatccctcacaggttggaagtcccagcagcagtgtcagggtgcttcgctctgcaataaaaaataaagatatggcgcgcagtgagcctcaaagtgacaggaccgctggtgaggcagctacaaataaaagaaaaaacgccaattcctcaaaggtggggagtctgagctctggtctcagtgtgcttcggtctgcttcaaaagctaaggatgagacatgtatcaaacctttaaatgatagtgctgctgttgaaccagcttcaagtaaaagaaaatgcaccagtccgtcaaaggtgggaagtcccagcaacagtgtcagggtgcttcgatctacttcaaaatataagaatgagacatgtaccgagcctttaaatgatagtggtgctgttgaaccagctgcaaatagaaggaaaggtgtcagtcgttcaaaggagggaagtcccaatagcagtgtcagggtgcttcgctctgcctcaaataataagattgatgtatctattgagccactaaataatagtactactggtcaaccagctgcgaaaagaagaaagaatggcagttcctttaagagcagtgccagggtgctttgctctacctcagaaagggcaaatgaggcatctagtgagcctttaaatgatagtactgctgctcagccagctgcgaggaaaaagaaaggtggtgcaatgccaaagactgataacccaaagattggtgtcagggttcttcgctctgcctcaggaaagaagaatgagacatgtactgagcctgtaaatggcagtacttctgctgaaccaactgtgacaaaaaaaagaaattgcaagccttcaaaggatcgcagtcccaagaaggactacttaaaaatttgtcaaagaattaaatatattttgaatcgaatgaagtatgaacaagcctttattcaggcttatgcaagtgaaggttggaaaggccaaagtttggaaaaaataagacccgagaaggagcttgaacgagccaaggcagaaatccttcaatgcaagttaagaatccgggaagcttttcgaaatatggactctcttttatcgaaggggaagcttgaagaatctttgtttgattcagcaggacaaatttcaagcgaagatatattttgtgccatatgtggctcaaaggatgttacttcacaaaatgacatcattctttgtgatggagcctgtgacagaggattccaccagaattgtttgagccctcctttgctaactgaagaaattcctccgggggatgaaggatggctttgccctgcatgtgtgtgcaaagcagactatatagatgcgttaaatgaacttcaaggaagcaaactctccattcatgactcatgggtgaaagttttccctgaggcagcttcaactgccaatggttctaaacaagttgatgcttctgatctgctgccagatcatataaaggacagtgctaaccttgcattggttggaacgcacatggtgaatgaaatcaggttttctgaagaggatgatagcaaagcggatgacctcggcttgccttcggaggactcaggggatggtgacttcgatccagcaggtccagattctagtgaagaccaaaatgatggattgaactcagaagagtcagatttcacatctgactctgattatttttgtgctgagattgctaaatcttgcggccaggatgaagtctcggcatctccattatcaaatgtgataaaccgtactgatagaatgaaactcagggcctacagtagacgctctaatgaagaaaaccacaatcatgcatttatggacatggagctagagcaagacatagtgctaccagttccaagcaggcggcaggttgaacggttggattacaaaaaactatacgatgaggcatatgaggaagaatcatctaattcaagtgatgaagaagagtggtctggaaaagaactcttagaaggcagtggaacagattcacttgatgagcgacttcgtcctgtaaaacggtgctctagaagagcaccagcagggcagcagaataatgaacttacaccacagagccggcctcatggttctaacagtgagcagaaaactgaagttcttcgctccaatggcagtagtagcacaggacggaagtatgatcctgaagttacccagaaattgaaggtgcattttgagaaagatccatatcctagccgtgaaacaaaagaaaatctatcagaagaactaggcttgacatttaatcaggtctccaaatggttctctagtactcgtcactattcaagggttgcttctgccaaaaaagaaatgcatcctgacagccatacttgtgagaataatgatgagacaactgtagacagcatgcaagcaaaacaacccaatgctggggtgatggaaaagttgacgggggatagaaatggcattgttcctgagaaaccgatggtgcaggacaatcttaaccaaggagcgatggaaaagttaactagggataaaaatgacattgttcctgagaaaccggtgatgcagagcagtcttaaccaatgtaataatgaagatataccgctttctggaacagaaattgagatggagtcttacgaacaagaatcatctgactcaagtgatgaagagtggtccatacttagcacaccacgaaaaacaagattacaagaccatggaaaatcatcagttactgaatcacttcgttctgcaaaacggtgttccagaagagcaccagctagggagcagaataatgaacgtattcagagtgagcagcttcatggttctgcaagtgagcagcaaactgaatttcttcgctccaatgtcagcagtggcaaggtctcaaaatatcattttggccctatagttagtcagaagcttaaggaacattttgaaaaagatccatatccttgccgtgcaacaaaagagagtctggcacaagagctaggactgacatttaatcagatcagtaagtggttctctggcactcgtcattattcaagagatgctgttgccaagaatcagaaacgcccgggagaaaatactactgtgaataataatagcacaacctttgatgacatacaagtaatagaacccaatgttgggttgatagataaaccagctgcagatgtaaatgacatgatttctgaaaagttgatggtccaaataaatcttaacgaaggcattgaagaagatatcccaccgagccaatatgccaggtgtgaagagaaaataactatgactccagctgccatctcaagggaagctggtcttccaggatatggtcctggtcctggagaaaactttcttcaggtcagttcaaggaatactagctgtgagcagagtgtgatactggctcctaccgctatcgcaagagaagttggtccaccaggatatgcgactggagaaaaccagggcaatggggctccatggaatacaagttatgagcgaagactatttatgaatcctgtgaccagctcaagagcagtcagtcctccaggatatgggcctgaagaaagccgaggcagtggcatttcctggaatacaagcagtgaacaaatattgtttatgagtcctacaaccatctcaagagaacttggtccaccaggatatgggcctagagaagaccagtgcagtggcacttcatggaatgcaagctgcgagttgggagtatttatgagtcctgtgaccacctcaagagaagacagtccgccaggatatgggcctcgagaaaaccaggagaatgacaatatgagatgcgagttgagaatgtttacaagtcctacaaccatctccagagaagttggcccaccaggatatgagcttactggaaaaaacaagggcaacggcgcttcatgtactacgaattaccagcagggagcgtttacgagtcctgaagccttcccaagagaagcctgtcctccaggatttgtgtctggagagaaccagggtaacgacactccatggtatatgagcagcaaacagatggcgtttacgagtcctacgaccaaccctagagtaggtccgccagggtatggacaggaaaaccagggcagtcgtgtttcttggaatacgagttatgagcagggagtgtttatgagttctacaaacatctcaagagaagccggtccgccaggttatgggcctggggaaagtcagggcaatatcacttcatggatttcgacaggcgggcagagaatgtttacaggtccttcaactatcccgaacgaagtcgggcagcaaggatatggcccttcaggaatcccgggaacggatggctcaaggagtatggacttgaaagcctttccaccaggatatggacctgctggagaaaaccagggcggtggtgcttcagggagcgtcataagcccccaagctcggtctgcagagaacgtagagttttcagacgacgctagaaaaaaggctatacagcgggagctgagacggcggcagaagttcaggaggaggattccgaggagtatgggagcccgatggtggtggctacggccatcgcggacctcatcaagcagcgcactgaatcacacctccggaagatccaggctgctgtctcatccaagcccatcgtcatgagggctgagtacgcccactgccccaacctcacaatcatcgacaccccaggcttcgtgcttaaggctaagagaggcgagccagagagcacaccggatgagatacggtcgatggtgaagtcactcgcgacccctccccaccgcctcgttctgttcctccagcagagcagcgttgagtggtgctcgtcgatctggctcgacacgcttaaggagatcgatcccactttcaggcgcaccatgatagtcatctccaagtttgacaaccgcctcaaggaattcacggagaggtgggaggttgatgccttcttgagtgcgagtggataccttggggataacatccacccgttcttcgtggctcttccaaaggaccgtggaacaatttccaatgaggagttccgcaggcagatctgtcatgttgatattgatgtactacgtcacttgcgagataatgtaaaaggggggttcaatgaagagaaatatggatcacacattgggttcagctgcctgaggaagtacctcgaatctgaacttcagaagaggtacaaagaagcagctccagctaccctggcattgttagagcagaggtgcactgatgtctcaatggacctaacgagattagattccaaactacaagcaacgtctgatgtctctcagctccggagatcggcaatgcttcatgcagcttctatttgcacacacttgcatgcattacttgatggatctgctgatccagatccagaaatatgggggaagactacggaggaggaacaaatgcatagtgctattggcagctggcctggcattaatacgcctgtaaaacctgccaactccagccttaagctgtatggtggtgcagcttttgagagagtaatgcatgaatttcgctgtgcaacatattcaatggaatgccctcaagtgtcaagggagaaggttgcgaacatactacttgcccatgctggaagaggtggaagcagtaggttgactgaggcagcagctgagatagctcgggcggctgcaagatcatggcttgctcctcttattgatactgcatgtgaccggcttgcatttgtcctacaaagtctgtttgaccttgctatggagcgtaaccgcgataaggattcacaacatcatcagaatgttgaagatatggatagttatgttggctttcttgctgctctccggtgctcatattataagtttgtcaaagaattgtccaagcaatgcaagcagatagtgcgtcatcaccttgattcagttacgagcccttactcccatatttgctatgacaacgactttttgagtgatgttggatccgtagcaaaccccatgagtaggtttagtcactttactggagttacatcctttgatctagcagacagtggatcagcactagaggaagctcaggagaacttgcctccaagagatcagcagcattcgacaccgcctactagtaaagggaatgagtcaaaggaggttctcagagaaagccagctaacagtacctgagacgccttctcctgatctgccatctgatatacatggtggtaggaagaaagaaaatgggatcccaaatgacggtggcccaaggaaaagacatgcaaggatggcagcgtatacaaacagaaatcaccataacagtatgattgttggagatgacatgggctcaaagtcagggtcatcatactccaccatatgcgcaatatctgctcaatattttgccaagatgcgagaagtcctgattgaaagaaatgtcccctctgcattgaactctggattcttaacaccatgccgtgaaaggttatttctggcactcggctttgagctattcgctgtgagtgatgacaagttcatggacatgtttgtcgcgcctggggcagttgatgctattcagaacgagcgcaattctcttctcaaacgtcagaagattttgctgtcctgtctgcatgagtttaagaacatatcccgggctctgtagtgatgatctttctggaattcctcaggcatgtgtattcatgtggttaacgaatcctctcagacggtacactatgccgggggcttattgcaatggcccattctttttttatccccattctcatgtcatgtatctttcttggccttaccctgttttcttgagctctgtatcactctgtcagttccttgttgacaaggtctgtatcactaacgtttgttcagattcaatactttgattatgctcgacgacaccaatacaaaaatgttcatatgaaattggaataaccgaataagacctaaattgtatcgtactcgtaaattaatttgtatgagtctatttttgaaatcgaaataatgcattacgagagccgacatcggcaatctcgacaaaattaagaaccaaaatgacatatttcgagaataaaaatgacgagggagcatgaggatcggtatggcgcatctgataagtttaaa

SEQ ID NO: 25073 - DNA, 1660 bp, Zea Mays
agagtgggttggtgggtgggtccgtccccagcgagccgcggcaggcaccaattggccaccaacaacacgtccccggtcggtcagagtcagccgcgcgcgctgttcttcccacaatccacacccaccaacccctctccccacactcgtcaaccacggccacgctcgctgggcaccatggccaccgggcaaacgggaacgggaggctgaaggcctcttcaccaaacgcacggatcaggtcatcagaccagtggccagcctaccgctgcgcactggcacggcgcacctatgcccgggtccggcaagcctaaccacaccaaccaacccacagggccacacccacaccgaccgtgtccgtccgctgacgcgccgggcccggaccccgtcgctcgcacgaccgactgcttcttcaccttcacgttggccatatttgagtagcgtcacattggccgtcgcgttggcctacttggcagtggatgccaagctctcacatggctcatcttcgccttcgccttgccgccgcgcgttatataagccgccccggcaggcaaggtcggtcaatccagcaatacccgagtacccgacgcgctagctagttctattgccgcaccccagatctccaggagggactcgttcgttcagctaactacactgcacgcaatggccaccacggcgaccgaggcggcgccggcgcaggagcagcaggccaacggcaacggcgagcagaagacgcggcactccgaggtcggccacaagagcctgctcaagagcgacgacctctaccagtacatcctggacacgagcgtgtacccgcgggagccggagagcatgaaggagctccgcgagatcaccgccaagcacccatggaacctgatgacgacctccgccgacgaggggcagttcctgaacatgctcatcaagctcatcggcgccaagaagaccatggagatcggcgtctacaccggctactccctcctcgccacggcgctcgccctcccggaggacggcacgatcttggccatggacatcaaccgcgagaactacgagctgggcctgccctgcatcgagaaggccggcgtcgcccacaagatcgacttccgcgagggtcccgcgctccccgtcctcgacgacctcatcgcggaggacaactacctcaactaccacgagcggctgctgaagctggtgaagctgggcggcctcatcggctacgacaacacgctgtggaacggctccgtcgtgctccccgacgacgcgcccatgcgcaagtacatccgcttctaccgcgacttcgtgctcgtcctcaacaaggcgctcgccgccgacgaccgcgtcgagatctgccagctccccgtcggcgacggcgtcaccctctgccgccgcgtcaagtgaaaacatggcctggcctggcctgccccaccaccgccaccgacggcgccgccggccgcatcctcattccaatcataatagacgacccgcagcattaattatccaccggctttttttttggctctttcttgcccctgtaatctttctcctcctcttccttcttgggaattgtcgccgccgtttcgatacgtaaatcacgagatcggtaatacagtaatgctcctcaattttacaatatactcctactattactactgctaccgtggatggttttgtt

SEQ ID NO: 25074 - DNA, 1668 bp, Zea Mays
actttattctgtgcccattattcagataggtctctagacatggaagagagaatggccatctggactcgagtataaaagtttcaaatagagttcatagtatgaaatatgcaccttcgacaagtgcctctaatgaaggagcatcaacttctggagctgcatcgcaaacagcatctggtgtgttatctggatcaggagtgctcaatttaagaccagggagtacaacatcatcaggcccattagctcagatgttctcttccatgagcgcagatgtggcacgcgaatatcttgaaaaagtagctgatcttcttttggagtttgcacaggcagacactgtggtaagatctctgatggccagccaaagccttcttacaaggctttttcagatgtttaacaagatagaacctcctattcttcttaagattcttaggtgcattaatcatttgtcgggtgatcctaattgtctcgagacacttcaacgcacagatgcaatcaaacatctgataccgattcttgagctttgtgatggacctctggtttttcaaatacatagtgaggtcctcaatgctttgttcaacctttgcaagattaataaaagaagacaggaacaggcagctgaaaatggaatcattcctcacttgatgaattttgtcatgtcagactcacctctgaggcagtatgccctgcctttgctgtgtgatatggctcatgcttctcgcaactctagagagcagttgagggctcatggaggactagatgcgtacttaaatctgttggaggatgatgtatgggcgtgcacggcattagattctattgctgtttgtttggctcacgataatgatcatagaaaagtggagcaggcactgttgaaaaaagaggcaattcaaaagttagtgaagttcttccaagactgcccagaacagtattttgtccatatattggactctttcttgaagataataatgaaatcttctaggctaaacacagcaatggccaccaatggcttgacagcattgctcattgcaaggcttaaccatcgagacgctattgcccgcctgactctgctgaaactcataaaggttgtctatgagcatcatcctcgaccaaaacaggtcatagtagagaatgacctccctcagaagctacaaaacctgattgaagaacgcaggggtggacaacggggcggccatcaagtgttggtcaaacaaatggccacctcattgctgaaggcgctgcacatcaacacagtattgtgattttgatgggtcatgtgttttcctctcaagttagtgtttacgttttcgctagaggaagaaaaggggcgtccttctctttttgcctccttttctgctgtggtggcttctcacgagcaccagactcatttgttgtacctgatccctccttttttgggagaaaggttcaacgttttggtgcaggataaaatgggcttgctatcctccagtgctgtgtatatctagcgtatgttagtgaagaaattgcaaattagacaatctaattaaaaaaatttaaaccatattgacattttgttccgtgtgttagtagattttccctagcctgacccacttgcaccaagcaaaatggttgatatcgtggacgtctttaacaggatgcaagaaagcatcacatagttcttttgatgcattacattac

SEQ ID NO: 25075 - DNA, 2879 bp, Zea Mays
tagaaagtgagcttacacattgcatgggatatggaccacaaacaatcgaggagaaacagaagctttatacattattgaggagcctaaatgttaatggtggattagcatctgcatctatatccgagccctatacttcaacaggacagagctttgctggtggtgctcctgtagatggattttattcacctgaacttagaggtgaatttggggctggccttttggatcttcatgcaatggatgacagcgagcttctttctgagaatgctgcatcagaaccatttgagccttcgccttttatgccaaaagaaatggatgatgacgactacgatgtaatagcagaaaaccaacaaggtctagtagacaaccagagtgccttcaccaacgaaaaagaaaacactgtggtcagtgcaagagaaagtaatgtagcaaagattaaagtcgtggtaaggaaaagacctctgaacaaaaaggaggtatctcgaaaagaggaagacatcatagatgtacacaattctcaattcttaactgtccatgagcctaaactaaaggtggatttgacagcttatgtggaaaagcatgatttctgctttgacactgtcttgggcgagaatgtaactaatgatgaggtgtaccgtgagactgtggagcctattataccattaattttccaaaggacaaaagcgacatgctttgcatatggccaaacaggcagtggcaagacctatacaatgcaacccctacctcttagagctgcacatgatatggtttgtcttttacatcaacctatgtatcggaatcaacatttcaagttatggcttagctactttgaaatttatggtggcaaactctttgatcttcttagcgaaaggaggcaactcttaatgagagaagacggaaagaaacaggtctgtattgttggtttacaggagttcgaggtttctgatgtccagattgtcaaagaatacattgagaaaggaaatgctgcaagaagcacaggcacaactggagccaatgaagagtcctcacgatctcatgctattctgcaattgtctgtgaaaaagcatatcccagttactgaaacccggagacagagagaccgagatgctattgaagcaaagaatacaaagcatgtggggaaaatgtcatttattgatcttgctggaagtgagcgtggtgctgatacaacagataatgacaaacaaacaagaattgaaggtgcagagatcaacaagagccttttggctctcaaggaatgtattcgggcactggataacgatcaaatacacattcctttcagaggaagcaagctaacagaggtgcttcgggactcctttgttggaaactcccgtacagtgatgatttcttgcgtttcaccaagttcaggttcatgtgaacacacactgaatacgttaagatatgctgacagggttaaaagtctttcaaaaggtggtaacacaaaaaaggagcagtttgctgtgcagtctgtatcatctggcaaggaatctacctacacatcgtaccctttatcatgtgaagctgaagagactatggagcagactcaagaaattaggcctgttgattcttctaggaaaggtgttgacagtttcacttccaattcttccattgagcctgagaaaaactcctattgtatgattccaagctatccacataaaggaaaagaagaaactagtactagatctggtttgaatgatagggagagaggggacttgaaatataaccaggctggttttaatagtaaaacacattcacttcaggaatcaataaattcacaagaagaggtgaaagtgacaaaagtctcaccaccccggagaaaagctaacagggatgagaaatcagaaaggcaggtcaactacatgaaaaaagaaagtgggcctgaaattagtcggactggtgttaagcagcaacagcaacttaaacagctgcaaaggccatcatcaacctcatcgtcgcaggttttatccaagcaatctgagaaggaagatatggaaataaacacaatacttgaggaagaggcgctgatagcagctcacagaaaggaaattgaaagtacaatggagatagtacgagaagagatgaatctattagcagaggtcgatcagccaggtagtcttattgacaactacgtggcacagctaagctttctgttgtcgcggaaggcttctggtttggtaagccttcaggcacgcttggcacggtttcagcagcgcctcaaggaacaggagattcttagccgtcaaaaaccattgagatagtttaaaccgcccaaaatggaaacctttcggtttgtcgttgatcgcgagaagcctcggatactggaaactgccatcgattgcgacagcctcggatcatggcctccaacatcgccttttagggatctaagggtgaaaggatgggagatggaaatgtgggctgatgaagtgcgcattcattattgattttgaggttttatgaaccagtttactaatttttcttttactgaaaagggtgcttgagtgtattttctatcgatgtcatgggtttgtcaacgtttgccattttcttttgtacgagtatagttgtaactgttgttcgaataccggtagtgaagtgctgcgagtgaggaaataaccttgccttgccgttatggtgttgtatcttttgttgatatttatttcgcatcaacaaaagaaaagcagcgttcgataaatgtctacaggatttgctttgtaccttgggggtgccctgtttattgtgactacaagtctgtgatatgcattttttatacctttattttttgtacctttttctgattgaatccgaaatccacacaacacccgaagccaaatgtcagacaaaaatagtgctcaggcaaaaaaaaa

SEQ ID NO: 25076 - DNA, 1551 bp, Zea Mays
aaggtacgaaagcccaacgggccccaaacagtccagaaggggctctcacaccggatccgctctggctccaacaacgtgatgggctccatggaagcgtcgaccgcgccggagaacggctcctccgctgccggtggcggagccggcggcacggcgtgcaacggggcgggcgccgcgtctaacggaggaggcatggagaggcggctgaggtcctcggccgcgtccgcgtcgtgggcggcgcaccttcccctggaggtgggcacgcgcgtgatgtgccggtggcgcgaccagaagctccacccggtcaaggtgatcgagcgccgcaagggctccgcgtgctcttcccccgccgactacgagtattacgtccactacaccgagttcaatagaagacttgacgagtgggttaagcttgatcagcttgatcttgacactgtcgagaccgttgtcgatgagaaagtagaagataaggcaacaagcttaaagatgacacggcaccagaaacgtaaaattgatgaaacacatgtggagcaaggacatgaggagcttgatgcagccagcttgcgggaacatgaagaattcacaaaggtgaaaaatatcgcgaagatcgaactggggagatatgagatagacacatggtatttctctccttttccaccagagtataatgactgcccgaagctgtttttctgtgaattttgcctcaacttcatgaagcgcaaagaacagcttcagaggcacatgaagaagtgtgatcttaagcaccccccaggtgatgaaatctatagaagtggaactctatcaatgttcgaggttgatgggaagaagaacaaggtttatggacagaacctttgttatctggctaagctatttcttgatcacaagacattgtactatgatgttgatttgttcttgttttatgtcctctgcgaatgtgatgatcggggatgtcatatggtgggatatttctctaaggaaaaacactccgaagaatcttataatttggcttgcattctcactctccccccataccaaagaaaaggatatgggaagttcctgattgctttctcatatgaactttccaagaaagaaggtaaagttgggacaccggagcgccctctctctgatcttggtctgctcagctatagaggttattggactagagtgcttctggaaattctaaagaaacataagggaaacatatctataaaggaactaagcgacatgacggcaataaaagcagatgacatattgagcacgctacagagcctggacctaatccagtaccgcaaagggcagcacgtcatctgcgctgacccgaaggtcctcgaccgccacctcaaggcggcggggcggggcggcctggacgtcgacgttagcaagctcatatggactccctacaaggagcaaggctaaaaggcgaactgctccgtgtctcagatttagactcgctgaccgatgcgatgcagtccctgtacatagcatctccccacagctcacttgacttgacttgactcgtatcagagcgtggaaccagcagcgaagtgatgctgg

SEQ ID NO: 25077 - DNA, 673 bp, Zea Mays
atgcctcctggctcgccgtcgtcgcccacagaccccacctcttccaaggtggttcctccgcctagttactgtagtcatggctcccctgccatcattctctccttcctctattgtctccttcctccagacagagaggcggcactggtacaggtgctaccgggcgaggtggagcctaatcgcatcccatggaggaccaccctccaatggatccaggacgtgaggcaccaaatcaatggagccgcgcaggtggtaccagcgaggtggagcccggtcgcatcccatggaggacaaccttccaattgatccagggcgtgaggcaccaattcagtggagaggtaagcgacgccggatctggcagctttcaggttgtcccccctcccccagcgcgcagacacattctcctgcaagcatcgtcgagctcaattttcaggatgtcatgtgactaataccagcaggcagcagactaggtttagtcagatggcagtagaaaaacaagaatcgtgactgcaatggcaaatggaagatggaatggaactcaaattttgatggtcggtcaagtgtgtagacttgaaatcatatatacctagttaggctcaactttagcgcaaactgttggtgaccatgttttttagttagtattttagtttggatttagagtacacttatgtatgag

SEQ ID NO: 25078 - DNA, 2606 bp, Zea Mays
cggatctgtcacaaattgattatgcaaacacgtagcaagttaggcagagcaccatttgcaacatcgtttcttttcaccgagtaccaatatgttggtatcttcatggctatcttcgctgttgtgatcttcctcttccttggttcggttgagggattcagcacgaagagccagccctgcacatatagcaaggacaagtactgcaagcctgcgctgttcactgcactctttagcactgtgtccttcttgcttggagccatcacctctctggtctctggtttccttggcatgaagattgccacatatgcgaatgccagaactaccctggaagctaggaagggtgttggcaaggcttttatcactgctttccgctctggcgctgttatgggtttcctgcttgcatcaagtgggcttgtggttctgtacatcacaattaatgtatttaagttgtattacggtgatgactgggagggtctttttgagtccatcactggctatggtcttggtgggtcgtccatggctctcttcggaagagttggtggaggtatctacacaaaggctgctgatgttggtgccgatcttgttggaaaggtcgagaggaacattcctgaggatgatcctaggaacccagctgtgattgctgataatgtcggtgacaatgttggtgacattgctggaatgggatctgatctctttgggtcatacgcagagtcttcttgtgctgcccttgttgttgcgtctatttcatctttcggaatcgaccatgatttcactgggatgtgctacccactccttgttagctctgttggtatcattgtctgcttgatcaccaccctttttgctactgatttctttgaagtcaaggctgtgaaagaaattgagcctgcacttaagaagcagctcatcatctccaccgtcctgatgacttttggtattgctctaatcagctggttggcccttccagctaagttcaccatctacaacttcggtactcagaaggaggtttccaactggggtttgttcttctgtgtttcaattggtctgtgggctggtttgattattggttttgtcacagaatactacactagcaatgcatacagtcctgtgcaagatgttgcggattcgtgcagaactggtgctgccactaatgtcatttttggtcttgctcttggatacaagtctgttatcatcccgattttcgctattgctgttagcatctatgtcagtttctccattgctgcgatgtacggcattgcagttgccgctcttggtatgctgagcacaatcgcaactggtcttgctattgatgcttatggtcccatcagtgacaatgctggtggtattgctgagatggctggaatgagccacagaatccgtgagagaactgatgctcttgatgctgctggcaacacaactgctgctattggaaaggggtttgccattggttcagctgctcttgtgtccctggcgctttttggtgcctttgtcagcagagctggagtgaaggtcgtcgacgtcctctcccccaaggttttcattggtttgattgttggagccatgcttccgtactggttctctgccatgaccatgaagagtgttggaagcgctgccctgaagatggtggaggaggtccgcaggcagttcaacaccattcctgggttgatggagggaacagccaagcccgactacgcaacctgtgtgaagatctccactgatgcttccatcaaggagatgattcctccgggcgctctggtcatgctgactcccctcatcgttggaaccctctttggcgtcgagactctctccggcgttcttgctggtgccctggtttctggagtgcagatcgccatctctgcttccaacaccggcggtgcatgggacaatgccaagaagtacatcgaggctggtgccagcgagcacgcgaggaccctcggtcccaagggatccgactgccacaaggccgctgtgatcggtgacaccattggtgaccccctgaaggacacctccggcccgtccctcaacatcctcatcaagctcatggccgtggagtccctcgtgtttgcccccttctttgccacccagggtggcctgctcttcaagtacctgtaaaagggacaacaccaagcacacagcagaagtatacgatctcccgaccgaccgtggacaatatcgaataactcctgccaaatcgccagttccttttgtgtactgtgcgctagccgccgcctagctgcactgctgtatttttgtttcaggattgctgctgctgttcgcattcaatctttgggcctcccggagccgccggaggcgcgttttactgttagccttactactcttactccctgtagctccacgtagaagaaaccgatgtcctgcgtctggcaatttttcttagtcccttgatgatggcgatgatgctgaaacctttttttgaacaatgatacatgatgattgttgcgttgtactggtggtaaatcacggtccgtattggcctgttctgttggtgcccatttccaatcatccaatgtcgtgctctgcgttatacgattgctgtttgtactgtcatagctgctgccgacaaggtcataaagaaccttaaacttgaagcc

SEQ ID NO: 25079 - DNA, 2188 bp, Zea Mays
gtttccatcgccatcggtgctgctcgagctcgactgctgcagctgctaccagtagtgagctgtgtgtgtgtgtagtatatacaatattcgtataaactgctggtctcaatcgagtcgtcgcccaatcggttgaatcggggagcagaggcatcgcccccacgcccaatcatccgcccccaaatccccagaagcacccacccctccgcgcgcgagatcccacgcgcgtccctcccacagtcccaccaccccccggggacgcggactccctcctccgtcctccccccccccccgcggtcccagcccagcggtggccctgcgacgaccgatggacgcggcggcgaagaagatgacgcggagcatctcgcggcagctctcgtcgggggcggcgcggctgtggcgccagctgtcgctggacccgcacaccccgcgccgcggcggcccgggcccggtcccagcggcgggggccgggcagacgcggttcgcgatcgccaggcagtcgtcgctcgacccgacgccgcgcggcgggccggacgggtcgtcggcgcaccagcagctcgcggtgccggagaacctggacgccaccatgcgcctgctcttcgccgcgtgccagggggatgccgccggggtcgaggagctgctcaggagcggggtggacgtcgacagcatcgacctcgacggacgtacggcgctgcacatcgcggcctgcgaggggcagggggaggtcgtgcgcctgctgctcgactggaaggccaacatcaacgcccgcgaccgctggggtagcacgccagcagcagacgcgaaacattacggccattttgaagtatataatactctgagagcaagaggagcaaaagttccgaaaaccagaaagaccccgatggctgtgtcaaatccgaaacaagttccagagtatgaactgaacccacttgaactggagtttcgaagaggagaggaggtcacaaagggtacatatctggcaaaatggtatggctcgaaagtttttgttaagatactagacaaagacagcttctcagatgctgaaagcataaatgcgttcaaacacgagcttaccttacttgagaaagcacgacatcccaatttggtccaatttgttggagctgtcacgcaaaatgtcccgatgatgattgtttcagagtaccatcaaaagttatattgagatgaaaggtcggctgaagcctcacaaagctataagatttgctcttgacattgcgaggggactgaattatctccatgagtgcaagcctgagccaatcattcatggaaatttgtcgccaaaaaacatcattcgggacgatgaaggacaacttaaggtggctggttttggatcactgagtttgagtaaagtttctgaagataaagtacaaatggctcagccagttacaaaatttgacaatgtatacatcgctcccgaggtctacaaaaacgaaccatttgacagaagtgtagatgtatttgcatttggtctcattctttatgagatgattgaaggagctcctgcttttcacccaaagccacaagaggaagcagctaagatgatttgcttagaggggctgagaccaccattcaagaataaaccgaaatactaccccagtgatgtgaaagagttgatacaagaatgctgggatccgatgccttccgtcaggccaacattcgcggagataattgtgcgcctgaacaagatacatgcgaactgtgctaagcagggtagctggagagacaccttcaagcttccatggaaacaaactggagagagataattgtaaagccccgcgaggctgccgtgtcaagatttcgccccttcccttcagcaagtgtgagtaaacacgagtcaagaaacgtacagagttacaaacagaaaggcaaagttcctatttagttcaggtttcagaccagtttgtgctttgtagcctgtataactgtatctaggcttatgccaccggcccaatttctcttgagctatcttcatccaaacgggaacaacagagtattaatcagtattctgaacattcagggcgtgcctattccttttgaactcctacgtgaacgttgtaaattctgcacgatttcctttcgtgccttttgtgtacgttgtgctgaaagagaaccagaggcatacgcatatcccgagaaaatgctgcagcgacgaaggaaaagcacagcgaagaaa

SEQ ID NO: 25080 - DNA, 2453 bp, Zea Mays
aatcctatgtcggtagtcgtttgattgatctttttattggaacagcacatatacaaccaccagcaagccaatcatcagatggtctgcctgacatccgtcctgctttcagacatgaaatgagaacaatggaagagtagtcgcagatatggtgtgatcaagtgtgatccactggtccggcaaggcttggatagaacagcaaagcacatggtcattccgtacatgcctatgttgattcccccaatctgttggacaggatatgacaaaggagcacacctctttttaccatcatatgtaatgcgcacccatggtgctcggcaacagagggacgctgttaaaagagctccaagggaacagatgcaatttgtttttgaggccttgaatactcttgggagcacgaagtggagggttaacaaaagagttcttagcattgttgacagaatctggtcaaatggtggccggcttgctgacttggttgatcgtactgatgttcctgtaccggagaagcctgacactgaagatgaaaccttgctaaagaactggaaatggcacttgagggcagccaagaagaagaacagtgaaaggcattctcagagatgtgatgttgaactcaaacttgctgttgctagaaaaatgaaggatgaagagggattttactatccacacaaccttgattttagaggtcgggcttatccaatgcacccttatctgaaccatttgggttcagatctttgtcgaggggttctagagtttgctgaaggtcggccacttggcaagtcaggattgcgttggctgaagatacaccttgcaaatttgtatgctgctggtgttgataagttgtcatatgatggccggattgcatttgctgagaatcatttggaggaaatatttgattctgctgataggcctttagaaggcagacgatggtggcttggggctgaagatccattccagtgcctggcagtatgcatgaatctcactgaagctttaagaagctcgtctccagaaacaacaatctcacatattcctgtgcaccaggatggctcttgtaatggtctgcaacactatgcggcacttggaaaggataagttgggagccattgctgttaacttagtcgctggagaaaagcctgcagatgtttacaccggaatagctaacagggtgatggaaattatgaggatggatgcacaaaaagatccttctgtagaacctgatgcagctcgtgctcgtctgatagttgaccaggtggacagaaaattggtgaagcaaactgtgatgacatctgtgtatggtgtcacatatattggagcacgtgaacaaataagaagaagactaaaggagaggggggtcattcctaatgactccgaactgtttggtgcatcatgctatgctgctaaggttactcttacagcacttggtgagatgtttcaagctgcccgtagtatcatgaactggcttggtgactgtgccaaggtaattgcttgtgaaaatgaaccagtgagatggacgactcctcttgggctcccagttgtacaaccatatcgcaaacttgggaggcatcttattaaaacgtcattgcaggttttgacccttcagcgggagacggataaggttatggtgaagcggcagaggacagctttccctccaaactttgtgcattctcttgatggttctcatatgatgatgactgctgttgcttgcaaaaggcaaggtctgaattttgcaggagttcatgattcatattggacccatgccagtgatgttgatacaatgaataaaatactccgggaaaagtttgtggaactctatgatacacctattctggaaaatctgttggagagctttgagaaatctttccctaaattaaaattcccaccgttgccggagaggggagacttcgatatgaaggaagtccttgagtctacgtattttttcaactagcacaatcaatgttaacagttgcattatacacgctgctgcccggacatatctgagttctgagtgtagatctaccaactcgaatgatgaaagctaggtcatacatgagcataacccgaagagtggctttgcagaagttatcagaagctaagttggtactctgagcattcacaaatgcatcggcatcatttatcgcgttgaagttggcaatgaggtttgctaaataaaagtgggaaccatatcaaagttaaacgagaatccctgtaaatgtaattatgtaatttttttttgtctttagtgtttttattttccttgatcttggtactgtcgagagaaattcggctgaccggtagtttgtcggctggtgctgagtagagattatttcatactttgtagtttaacaatataatttagtaataaagtgatatactagtatttttctcgttgttttagctctgcataaagtttgaaagcttttttttttctcttcaagttaaaagaatggaaactacctgtaa

SEQ ID NO: 25081 - DNA, 641 bp, Zea Mays
cacttccaacggatagtggaggcagtgcaagtggctcatttgatcaaggcagcaacattattgatgagatcagacaaggtgctacaaaaagatttgccgttcctctagtaactaggagcacactagaagttgtcataccaaatagtgctgttgcaagcctcaccatgagagctggtagcaagcttgctcaaataagcgagatctctggtgctactgtaacgctagctgaggacagacctgacatcttagagaaagttgttcgaatatctggtacccctgagcaggctagcaaagctgagaatttgctgcagggatttattctaagcattccagatgacattccttcaggctagttgaagacactctgcatgtcatagttgttagttcgtaaaattcctgtgtatattcgaggtagaatatgctgatgtcatgtgattatttgtttaattgagcagcatgtattcatgtgtggatacatgctgttttccttgtagccgttaactggctgacgggggtgtaagattagcatgtgaatttacagattgattcaacattcaattctcatgtccatatgtgaccgctgaacatgaaacctccaacttatttaattctcagtctggtgcttagctgtgaaaacagta

SEQ ID NO: 25082 - DNA, 161 bp, Zea Mays
ggccatgaagcagtggcgcgacgacgtcgaccgcctactcggtatggcgcactctggctcaaccaggaccaggtctcggtcatcccggcgtcaacatgaggcgtcggcgtctgtgcgctcgccctccgtgagggccgcaccgaccgaggacctgcgggcgg

SEQ ID NO: 25083 - DNA, 706 bp, Zea Mays
cgacgccccacgctcaaaaagcacaaatcgcttcccgcgccgccgccgcgccgccgaccggcgctcctcacctctcccgccgcacccatcgtctcccgttcccggctaaaccctgcttgagccctagacaccgcccgcctccgggaggtagagagcatgcacgccaggttcctcagcgcgccgtcccctgcctccgccgccccctccccgtacgttcgcttggccttcacgggcgcccgcccgcgccgcgcgtgttggaagccgcgaggccccgcgtccgcgtccgcgccgccgcctcggcctctccactcgctgtgcgcccgggcctccatgcagcccgcctctcccgcgcacgacgggtgtggggtcctaacagtggagattgagcatgttgatgtcaccacactggagaaactggaaaaacagggcgttgactgcgagcctaacgcctccacaatcatgattattcaggacaagtacaggcagaaaaagcatttctcaagatgcgagatcccattgcctgacttcatggaagtagatactttacgcagtatagaggaggctggagaaaagtttggctatcccctaatggtcaaaagcaagagattagcatatgatggtcgaggaaatgctgtagccaagaacaaagaggagctaccttctgttgttgcttcactaggtgggtttgagcggggcttgtatgttg

SEQ ID NO: 25084 - DNA, 1921 bp, Zea Mays
gtaacgaaagaaaccaaacttgcacacgtaccaccgcatcttgggcttccctccgccgatgcggttctgtaggttgtcgtagaaggcctcgtcccagtacagcaggtcggcggagcccggcgggcagcgcaccccgaagttcgcgaacgcgtcgttgtaggcctggcggtggaggtgctctgactccagtatgacgccgtcgcaatcaaagatgagggcctcgagagacgccgaggcggagaccatgacgagccggggcgcgcggcggaggcgcggggcgcttgaggctgatcggttgctgatgaatggatagcggcgagagccggcgacgccgacggcgccggtggggacggcgagggaagtggaaggcatcgggagggagtgaggatggagcggagtggagtaggcgccaacggcaacggtcgcttatctagctgactagctcttctcagggaatataccatccacagaaaaaaagcgccccgcctcatcccgagatcagaatcagaggccacgcggcgatggcgatggcgatgccgatggcagtggcgcgggtgaccagcctcgcctgcgccccccgacaggcgcagcatcgccgccgccatagccttgccccgccgtgcgcctcgggtgcggtggaggtgcgggtctgcacgaaccgcacgtgcgcgcggcagggtgggcgcgaggtcctggctgcgctcgcgggactcgcgccgccggcggtcgacgtggcctcctgcgggtgcctcgggcgctgcggcgccgggcccaacgttgcggcgtccgtccctgggagcgccgcggtgttcggccacgtgggcacggcggcgcgaggcgcgcagctactggagcacctcctcggccccgcggaattcgatgcggccctagggctcaccgcgctggccacgagggagaaggcggaggctgccctcgagaagggaaacgcggacgaagcggaagcccttctcaccgaggttattgggttcaatgcttgtggtggtctgcatttggtgtacatgagcaggtctaaggcgagattggaaattggggatatccctggtgcacttggggatgctgaggaagcaataagaatagctcccagatttcctcaggctcacttattgcgaggcgacgcactttttgcaatgggtgaatattctgtcgcggaagatgcctatgcagatgccttggatcttgatccatctattcgccggtccaagtctttcagggctcgcgtggaaaggctacgagagaagcttgttagtgccaataatccgtagttcattttgaagctctctctccatcagaagttcgatccacaagtaacgtagatatgttcttggtgaaggtaataatgctcacacactttgcaagccactggtcaggaattgattgttgccacagcttggaggatccaacagttcatatgaatggcttctggaattttctcatgattacatctggactgatgagaacaaactactaagtctcaactacaagtgttttgaagttcaagcatcgcctgaagtcaaagtcagatgtgcggccaacggaatgcacgagtctggcggctcaggcgcccaacgttttggttcccaccgcttccgatgcgtggcggtaaagccaagcatgcgtggaggcaactgtaggagtagccacaccagatagtactgtactgcactgctgctgccttggggcgtatagcgtttatggtcccgttatttgttgttctgcagtgaaatggaggctttgcccctcgggctgtttgacgttctgatttcactcctttgttttcaaaatgaaggtctccagacgaaaggaaaagtgaaggaattttgaaggattgaaatctaataagaaatttttctatgtgactctttggaacaaaggattgatctcctataaatcctataaaatt

SEQ ID NO: 25085 - DNA, 484 bp, Zea Mays
aaactcagaagtccgaaccggcaaagcttcggcggacccaccaggcaccagctggcaggatatattcccatgcttatcttggcgttggcggagagtggattggcacacgctttcctttcctgcagacaagctgtaaatctcgccgagctcgtcgtcggagaccaaggagaagagcaagggggggcgcagaggcagaggcttgccagcctacctagctcgtcggggccctatggagatccagcaccaccgggggctgggcaactccaaggttgtgaaggtgcagagcgaggaggcgtgggatctgttcactgatcaagcgagcaacgagggccggcccgttgttgcccatttcggggcgtcatggtgcgtgacgtccctgtccatgaactacaagtttgaggagctagcgcagacccaccccgaggtcttgttcctctacgtggacgtcgacgatgtccaggtcccctttcggattcttaggaaa

SEQ ID NO: 25086 - DNA, 1446 bp, Zea Mays
ctcagaccctcacggtcaccctcatggcctcacccactcaccctctcggtctctccctctctcctagtttccccaaaaacgaaaccctagcgccgccgccccggtggccgtggacccctagagtagaaaaatagagcaggcgtcggtggccgtggacctgtggaggagagcaggcgccgccgcgccagtgtgctgcgtcgccggcgagtgagccaaccactgtccactggtctgctcttgtttattcaatggccacgaaaggatctcatccagccgagctttctccccactatgtacctcatcggtgcacttgaagaagcgtcattgagcaccgttcggagattccccttcccagcatcatcgcctgaccaagatttgacacagttcatctgtcgctcgagccataacgggcgtgatgtgatgaagaaactgaattttgtagtggaaatgaggtactcacatcgtgaatctttctaaaattgtggttatcaatgtgcactaggatcctgcaacaaacagatagacataaacctgctcataacctatactatatacatatacacactgtttcatcggaggtattgtgaggttccgccggcgtctcggcacaagtgaaccacgatctgcatctcagtcgtctccccaagcaccatcgcctatcatggatgcctacaggcaccagttgcagccagcaaaagcaaacttacaagtgaggtggttcctcccgcggattcaccagtaataaattatccaatgctttagacctagcaaagtgctacaaagaaaagggaggcctacaaagaagctttttgttaatgacgttgattagaaggatggaggggctgactgtgctgcagccaaagctaggcttattagctcctgcaagatcactggaatagatagttcagaacaaataagtgacattttgcgtggcattgaaggaagagtgatactgctttggtcatgtcttcttccacatgtgcattgagatctgtggtgagctatgtaattgacccaaaaggcacttcaagcgggcaggaaagtctaaggcccttactaagtacttccaaggtgttctggacaaagaaatcttgtacattaaaacaggaggatacaagaagctggagtggttgtctgaaggcttttgaactgtttgaagcgttagtgtagctttggtgcttttgtgactgatcagctctggagcagctagagtgatgtagttgtgggattttgaacaatagctagagtgatataaaacattagtgatgtagttgtgggcttttgaactgtttcaagctgaagtgatgtcgctgtggtgcttttgtgactgatcatctctggagcttttgtgaatgatctagctagctatctgtaaatgatctagttgtgaatgatattataattgtgatgcttttgtgaatatataattgtggtgcttttgtgttt

SEQ ID NO: 25087 - DNA, 1386 bp, Zea Mays
ccacggtccaaaccaaacacggacccgaaccgcatgtctcctccccctcccagacacaaccctcccattgtcttcccctcctctcctcacgccgaccactccattcctcatcgccgcctccgcttactaatccccacaaccgcaccgatccatcgctcgccttaggttttctgctcgactacctcctggtgctccaccgttctggctcgattcgcgccgagggcggttgctccgagctcttagccacctgtcgccgctgtagcctgctgctgcgggggtgctctgccgtcggctgccgctggtgtcgaggaatagggttttgggactgccaggcagaggagggtgcattggttggcttgcgcatggggatggtgcccaacgggctcctgcccagtgcgtctgccgggatgacgcgacggctcgaccccgagcgctgggcggtcgcggaggaccgcacggcggagttgatcgcgtgcatccaacccaacgtgtactccgaggggcggaggctggccgtgtaccactacgtgcagcggctcatcatgaactgcctctcctgccaggtttttacctttgggtcagtccctctcaagacttacttacccgatggtgacattgatgtcactgcttttagtaatagtgaagaattaaaggagatttgggcaaatcttgtccgggatgcattggagcgtgaagagaaggatgaaaacgctgaatttcatgtaaaagaagtccagtatattcaggcagaggtcaagattataaagtgtcttgtggaaaacattgttgttgacatctcatttaatcaagtcggtggactatgcacactatgttttcttgaagagattgacaacttgatcagccaaaaccatttattcaagaggagtatcatattgataaaggcatggtgtttctacgagagccgtattcttggagctcatcatggtcttatatctacttatgcattggagacacttgttctgtacatatttcatatattcaacaactctttcactggacctcttgaggtgttgtaccgtttcttagaatttttcagcaactttgattgggagaaattttgtttgagcttgtggggcccagttcctattagttcacttccggatatgactgcgatccccccacggatggacagtggtgagttgttgctgaacaagtccttcctcgatacttgtagttctgcatatggagttgtgcctcacacccaggagaaccagggtcaaccatttgtttcaaaacattttaatgttattgatcctttacgtacaaacaacaatcttggaagaagtgtcagtaaagggcacgtccctgctggatggaggtgcagaaggtggcgttgagatggagggtgtgggtctcatgattcct

SEQ ID NO: 25088 - DNA, 4031 bp, Zea Mays
  misc_feature (4030)..(4031): n is a, c, g, or t
ggtttcgctttcctgctcccatcttctcctctccccccttcgcggccaagccaaagccatgcctccttcgacttctacttcccccaccacgtcacaacagggcctccacaccgcctccctccgcccccttccgcttgcgcccacgaaccctaaccctaaccccgtcgccgccgcgggacctacccggctagcactcgcaccgcgccttcggcgtcatattcggcgcctgcgctctccgtcctcgcgcggcgagccggggtgctagggttttctagatggatccacgccgcgcacccccgcggggcgggggcgccaacgggctctcttactccacgctgttcaatctcgagcctttgctgaacttcagggttcctgtaccggaagatcttgcccgctacgagaatagcagctcaaatgggagtccaagcagtgaagggatccttattggatcagtacaatggtgtaaatgatgcttcccatggcctgcaccggaagcggaaaaggcatcttgacggtgccagcgatgatgatgaggcagatgcctatagtaacaaaataactgaggagcaataccgtgctatgctcagtgaacatgtccagaagtaccggaggtcaaagttcaaggagggtgcttttagttctgatcctcctcgtgtggcaacccctcaattaaaacacaaaaatggtggtaaaaaaaatatgaagcgcataagtgatttcagcgatgatgtggcattagatgggatagaagcctcacatgaatataatgggatagagtgtattaaaactcatggcggttttaataagcttgttgcaactcttgattccacttatttagatatgggggatagtacacgttacttagttccagagggttatgataagttagcatcatccctcaatctccctgtttcttctgatatacgtgtcgaggaacacttcttgaagggcatgctagatttacgcaccctagcagcaatgcttggtactgaccaaaggtttgaggcttccaatcgtggtggaatatctgaacccctgccacaatttgaatctctcaaagaaagggtaaaggtgcaggaattttctcttcaagttaccaaggacccctttgcaattccggaaggatcagctgggaggatacgaaggtatattatatcagaagctggcgatttgcaggttcattatgttagagtcatggaaaaaggagatacatatgagattatcgagcgtagcttaccgaagaagcaaatagtaaagaaggaaccttcggtaattatgaaagaagagtctgaaaagacttacaaactatggcagtctcttgctacaaaaagcataccaaagcatcacaagaattttactgctttgataaagaaacgacaagtagatgcgaagcgcttctctgatagttgtcaacgagaggtaaagctcaaagtaagcaggtcactgaaactgatgaggtgtgctgcagtacgcacaagaaagtttgttaaggatatgcagatgttttggaaacgtgtagacaaagagcagtatgagttgaggaaaaaagaggaaaaagaagctgctgaagctttgaaacgggaagaggagctacgtgaagccaaaagacagcaacataggctaaattttctgctgtcccaaacagagctttatagtcatttcatgcagaacaagactggtggttcagcgccgcctgatgaggaagatgtccctgatgaagaagatcctgaggaagctcaattgaaaagagaggccttgagagcagctcagcatgccgtctctcaacaaaagatgaagacaaatgcatttgatagtgaaattgtgaggcttcgtcaaacttctgattctgctcttccaactgatgattcatctagcatggaccctagcaagattgatctattacacccctcaacaatgcctgagacgtcttctgtgcagaccccggagttgtttaagggtgtattaaaagaatatcagttaaaaggcttacagtggctggttaattgttatgagcagggcttgaatggcattcttgctgatgagatgggtcttggcaaaactgttcaggctatggcattcctgtctcatttggctgaggacaaaaacatatggggcccctttcttgtggtggctcctgcatctgttgtgaataattgggctgaggagttgattagattctgccctgacctaaagatacttccttactggggtccagagaggatgattcttcgaaagaatatcaaccccaagcgtctgtatcgcagagatgctagctttcatattcttattacaaactatcagatacttgtgaatgaagagaagcttttgagacgtgttaaatggcaatacatggtattggatgaggcccaggctatcaaaagttcaagcagccagcgatggaagacattactgagcttcaactgtagaaaccgtcttcttcttactgggacaccaatacagaacaatatggctgagttatgggcacttcttcatttcattatgcccactctatttgacagccatgaacagttcaacgagtggttctcaaagggtattgagggtcatgctgagcatggaggagctttgaatgaacatcaacttagtagattgcacgctattttgaagccctttatgctccgccgggttaagattgatgtcattgctgaaatgaccaaaaagaaagaagaaattgttccctgcaaattgagttctcgtcaacaagttttctatcaagccataaaaaataagatctcgcttaacgagttgcttgctggaagtcgtggcagtctaaatgacaagaagttacttagcctgatgaatattgtcatgcagttacggaaggtctgcaatcaccccgagctgtttgagcggaatgagggaagctcttacttcaactttgctgaaatcccaaactcacttctttctcccccatttggggaattgcaagatgtacactatgcaggcaagagaaatcccataatctttgagattccaaagttagtttatgagggaatcatctccaacatggaaaattctggaaacatctgtggatttcagaatggatatttgaacaggctgtttaatatatttttgcccagcaatatctatcgctcagccattccagaagttagttcatcaaaagagtctcttctatcatctggtgcatttggctttacacgtttgtcaaatctgtgcccagttgaagcttccttcctggctactgcttcattgtttgagagactagtcttttcagtaatgcaatggaatatgaactacactgctgaaattctggatgaattccttgattcagaagataccggcatccagtccagtcataatgattccacaaaagttcgtgcagttgcccgtttgttgctttcttctacaaaggtcaagcccagtttgcttaggacaaagattgggactgggccaattgatggcccatatgaagcactggtgctttctcatcgcgacaggctcgcttcaaacattaggcttcttcgttcagcatatgcttttattccgccagctagagcaccacctataaatgtttggtgtgctgatcgaaattttgcctataagttcaccgatgagatgtatgatccttgggccaagaaactgttcctgggatttgctcgtacttctgagttcaatggtcctagacaaccaattgctcctcatcctttgatacaagaacttaatactgatttgcccatcattgagccgatgctgcagctaccctataggatatttgggtcttctccaccgatgagtaattttgatccagctaaaatgctcactgattctgggaagctccacaccttggatatgctactacgacgccttcgagctgaaggtcatcgtgtgcttctttttgctcagatgactaaaatgttggacattcttgaggattacatgaatttcagaaaattcaagtatttcagacttgatgggtcttcagccatctcagaccgccgtgacatggtccgagattttcagaacaggaatgacatatttgttttcttgttann

SEQ ID NO: 25089 - DNA, 5387 bp, Zea Mays
cgcgcgctttgcttgtcgtccttccgcagcctccccagtccccaccggccaccggcatcaaggcatcaccaccaatctttcggaagttcccacgctgctctgagtgctctctcgtctcccctccccaaacccccaccccgacgcccagatctaccctccccatttacagcttcctctccggccccgcgccctagggcacggcgtcgcctgaacctgtcggcgccggcgcgatgcgagtaccatgctgctcgttatgcaacgtcagatatgacgaggaggagcggacgccgctgctcctccactgcggacatggattctgccgcgcgtgcctctcccgcatgctagcggcagcccccggagccacgctgccgtgcccgcgatgccgccatctgaccgccgtaggcaactcggtctctgcgctgcggaagaacttccccattctctctctcctctccacatccccctcatccccgtctttcctccactccgactcggggtcatcctctgacggctccgaagacgaggacgacttcttcgcgcgccccagtcgccgccccgcgcccgcgcccgctgccgcaccgcccggatgcagcttcttcgacctcgcctcgcacccggacctcaagctcgcccgtcgcatcgggagcggcccgcccgggcccgccgggcaggaggtgtgggccggcacgctgtctcgtggcggtggggtcaagcggtgcaagcaccaggtggcagtgaagagggtgcccctggccgcaggggacgggctcgaggcggagatgcggcagaatggtggacgccttacgctggagcagattctcaggtatggagcagatattgctcgtggaatagcagaactccatgcagcgggtattgtttgtatgagcataaagccgtcaaacattcttttggatgcacatggacatgcattcgtttcggattacggtctttcagcaattctgaagaaccttactagtaggagagtacctgatgactccagtgctggcattgatgctacactgcttagccccaattatacagctcctgaggcatggggaccactgaagaagtcactgaatatgttttgggatagtgcaaacggtatatcaccagagtcagatgcatggagttttggttgcacgcttgtggaaatgtgtactggtgctgttccatgggctggactgagtgcagaggaaatatgtaagtctgttgtaaaagaaaagaagccaccgcctcaatattcaagagtagtaggtgtaggacttcctggggagctgtggaagatgattggtgaatgcttgcaattccgagcttcaagaagaccatccttccaggacatgctgaaaacttttcttcggcatcttctggacataccacggagcccacctgctagtcccgaaattgattttgcaaatgaaaacttgcccaatggcatgcaacctccaacaacctccatcttagagatggttcatgataatccaaatgccttgcatcatcttgtatgcgaaggagatgctgctggtgttagggatctacttgcaaaagctgcatcagagagaaacgatagtttaatccgttctctcttagaagcacaaaatacagatgggctcactgccctacatttagcatgccgccgaggctcggcagagcttgtggaagctattgttgcttaccaagagaatgtagatatattagataaggatgaagaccctcctatagtatttgctttggctgctggctctccacgatgtgttcgtgcacttgtaggcaggtctgctagtataaattctaggcttagagaaggcctgggtcctactcttgcccatgtctgtgctcatcatggtcagccggagtgcatgcaggagctgctgatggctggagctgatcctaacgcagtagacggggaaggtgaatctgtgctgcatattgccgtggccaggagatataccgattgtgctattgttatactggaaaatggaggctgcagatcgatgggcatatcaaattctcaacataaaacgccattgcatttatgtattgagacatggaacacagctgtggtaagaagatgggttgaagttgcatctttagaggatatagcagaaacgattgatgtacccagccctgttggtacagctttatgcatggcagcagctcttaaaaaggagcatgagaaagagggtcgagagttagtaagaatattgcttgctgctggtgctgattctacggcacaagatgatccacactgtagaactgcattacatactgcagcaatgatcgatgatgtggagctggttaagattatactggaagcaggagttgatgttaatataagaaatgctcaaaatacaaccccactgcatgttgcacttaatagaggtgcaaactcatgtgttggcttgcttttagcagctggtgcaaactgcaacatacaggatgatgatggtgacaatgcttttcacatagctgctgatgcagcaaaaatgatacgtgaaaacctggcttggattgctcaaatgctactacagccgtcacctgctgttgatgtgagaaaccaccgaggttggacactacgagactttcttgagaggcttccacgagaatggatttatgaagaattgatggaaacacttgaagataaaggagtccatctctcaccaaccatatatgaggttgcagattgggtgaaatttagaagaactgttacttcacctgcttttggctggcaaggtgcaggacctagaagcattggttttgtccagtctgttgttgacaatgaccaccttgctgtgtcattttgtactggagaagcccatgttttgacaagtgaagttatcaaagttattccattaaataggggccaacatgtgcaactcaagcctggtgtttcggaacctagtatttatctggatgctgagataattgaattagtaggtatactgaactggagatctaccatgtgtcttttatttggatggcgcggtcaatcacgggatagcattgggacagttctctgtgttgatgacgatggaatcttgagggttggtttcccaggagcttctaggggatggagagctgatcctgctgaaattgaaagggttgaagaatataaggttggtaactgggttcggattcgtccctcactgacggttgctgtacatggcatggagtcgattactcctggaagtgttgggattgtatactccatcagaccagatagcagtcttctattgggcctttgctatttgtccaatccatggctgtgtgaaccagaggaggttgaacacgtcgacccattcaagattggggaccaagtatgtgtaaagaggtctgttgcagagcccagatatgcatggggtggtgagactcatcacagtgttgggaaaataattgacatcgagagtgatggtctgctcatcattgatattcctaatcgggctgcgccatggcaagcagatccatcggacatggaaaagattgagaactttaaggttggcgattggattagagtcaaagcaacagttccttcacccaaatatggttgggaggatgtgactcgtaatagtattgggattgttcatagtctacaagatgatggggatgttggtgttgctttctgcttcagaagcaggctttttctttgctcggttgcagatgtcgagaaggcacagccatttgaagtaggggagaaggttcatgtgtcaccttccatatctgagccacgcctcgggtggttaagtgaaactgcagctactattggagccatatcaaggattgacatggatgggactttaaatatcaaggtttctggccgaaaaggcttgtggaaggttgctcctggtgacgctgagaggctttcagcatttgaagttggagattgggtccgcctgaaaccaagtattgggagcaggcctacctatgactggaatagtgttgggagaataagcattgcagtagtccatagcattcaggactctggttacttggagttagcaggttgtttcaggaatgggaaatggttaacccataatacagacattgagaaagtgcagaccttaaaaattggtcagcatgttcgattccgtgctggaatttcagagcctagatggggatggagagatgcgaaccctgattctagaggcgtcatcgctggtgtacatgctgatggagaggtaagggttgccttctttggtgtgcctggattgtggagaggcgaccctgcagatcttgaaattgagaatatctttgaggttggagagtgggttaggctgacgaacgatgtggaacaatggagatcgctcaaacctggtagcattggtgtggtgcatggggtgggatatcaaggtgatgcttgggatggaaccattcatgttgctttttgtggtgagcaggaaaggtggattgggccttctagccagcttgaaggagttagcaagtttgttgttgggcagcgtgttcgaatcagaggctgtatccgccagccaagatttggttggtccaaccataatcattcaagtatagggacaatctcatctattgacgcagatgggaagctgaggattcatacaccagctggtgccagggcttggttgatagacccagcagaggtggaagaagtggaggaggaggaagtctgtgttggggattgggtaaaggttaaggactccgttggaaccccagtttatcaatggggtgatgtgaaccacagcagcataggggtggtccaccgggctgatgatggagagctctggattgctttctgcttctgcgagaggctatggttatgcaaagcatgggaggtggaaaaagtgaggcccttcagacaaggtgacaaagtaaggatacgacctggtcttgtatcccccagatggggttgggggatggagacctacgcgagcaaaggcgaggttgtaggtgtggatgcaaatggaaagctgaggataaagtttcggtggagggatagactttggattggggaccctgctgatattgttcttgatgatgtccacttattgacggaggcttctaatggcttggctttttgttcataggcttgtggtattctttcgataccatatctgatatattgcacccatccattttgcagcatttcaaatttagcaaaatcttaacctgcagtggacttgcaagttgcacataactatcatcgcatcggcatgccagggtgtatttcatgttgataaccggggaatgagaagacaacgatagtgtagagctggtaaccatcacctagttttttcttctttggtttacatgtataattatgcctcctgacacctttttgggtttcagtgtatcatataccagtgtacaggttcggacctgaacattaatttaattgatagtggtcttgtatgtttacttga

SEQ ID NO: 25090 - DNA, 2152 bp, Zea Mays
aagaaacgggaaagggcccggcccaccgtctacctacggccgccctcgagtatttggagccgctccgcttccgccagcgcccagcagagcagcctgagccagcagcccgagttcgattacctcttcaagctgctgcttatcggcgactccggcgtcggcaagagcagcctcctcctccgtttcaccgccgactcctttgaggacctttcccccaccataggtgttgacttcaaggtgaagatggttaccattggtggcaaaaaactcaagcttgccatctgggacacagccggacaagagagatttaggaccttgaccagctcttactacagaggggcacagggggttattatggtgtatgatgtcactcggcgggaaacgtttactaatctttctgatatatgggcgaaggaaattgacctgtattcaaccaaccaggactgtataaagatgcttgttggaaataaagtagataaggaaagtgagagagctgtgacaaaaaaggaggggattgaatttgctagggaatacggttgtttgtttctagaatgcagtgcgaaaacaaaagtaaatgtagaacagtgctttgaggaacttgtgctaaagatattagacacgccaagcctcctcgctgatgcttcgtctggggccaagaagaacatcttcaagcagaagcctccggaagccgatgccgctgcaagcagctgctgttaacatgcttttgccatgctaattccgcgtcctcccgtggatgatgacgatgatatctttgtttggtgtgtcggtttattgtttcttcttcttttggtcctgtatatgctgaatttattacacccacacataactgtacgttggcagcagctatataatatatcgttttttgttgtttctttttgttttgtttaaaagagagagagagagaatagtatatgttttgttttgtttccgtgctccagttgagagagagagagagagagaaatgaagatatttgagaggagtatggatggattcacgggtgggcaagggcaagggaagaggccaggccatcgcaggcaacacccgtgccgtgtgtcgtgtcgtgcgaggtcacgggtcactccagccaaaaaacagatgatgatgatgatgatgtgccatgctgcggggcaacaagaaactgaacaccacggaaatccaaggaccagccagcgcccgccctcgtcccttttgtatgtctggagcagatcagacgacgacgtccattcccaagaccaccacagcgtcgtccgccaggtgctccgggacgtctcctgccgcgcgcgccccggcgagctgctcgccatcgtcggccccagcggcgccggcaagtccaccctgctcgagatcctcgcggggcgcctctccccgtccccgccgccccacctgctacgcatcgacggcgccgccgcccacagcgccgacctccgccgcgtctccgcctacgtcacccagcaggacgtcctcttcccgctgctcaccgtgcgcgagacgctgctcttcagcgcgcgcctccgcctaggcgcgcgcctgccctccaaggacatgcacgcccgcgtcgaggcgctcctcgacgacctcaccctgcgccgcgtcgccgccaccaggatcaaggacctctccggcggagagcgcaggcgcgtctccatcggcgtcgaggccgtgcgtgacccgcccgtgctcatcctcgacgagcccacctccggcctcgacagcgcctccgcgctccacatcgtcggcgcgctccgcgccatggccgaggcgcgtggacgcaccgtgctgctcagcatccaccagccgggagcgcgcatcgtcaagatgttcgactccgtcctcctgctagccgccggctccgtcctccaccatggcaccgtcgaccagctccgcgccctgctcggggacgcgggccttcacctgcccccgcacgtcgatgacgtcgagttcgccatcgactccgtggacgcgcttcgccgccacgccagcagcagcctgcaggcgccgtcctccggagaccgagagggccggtgcacgctgcagcgtctgttccagctgcacggcaagcaggtggcggacgcccccgtggccgtgaccatgatggctagccgctacgccaactcgcgggcgcgggaggtggcg

SEQ ID NO: 25091 - DNA, 2757 bp, Zea Mays
actatacatcgattcgtgatctcggtctttccaaaccaacaggtgttgcctgcccaagtgcccagcctcgcttctccagtcaattctcagcctcgtcctccgcctccgctcccgctctctcctctccttggcctccgcttccgctcctgcctggaggctgcatcaaaccctaccgctccggacctcccggctggccgcgagatgcgacgcctgtccggcccctaatccttctcctcgatactgcccctcgcccgcccgcccgccggcatgggccgctacgggcccttccctgccgccgccggtgatggcgggggctgcctgcccctgccgattgtagcggctgaaggcgcgctggctgtcctggacggcgccattgcgaccgcggccttcgtgcagttagcaaggattcataggcacaaccagctacaaggatggactcggcaaaagatattccattttatgattggtctatcaaacatagtattcctagtatatttcgtgtctaccatcattgctacttgtcagagatggatttgctgggtacatggatgtggatttgttctcatggctagtccacagatattgcttcttgcttctttcctcttgctactgtcattctgggttgacctgtgtcatcagacaaatgatgaagacgaagaagatggaaggagtcagagtcaccatgaagctttactagacagaacaaaagcgaaacctggcattcatcctgttaatatccgtcagaggtgttgcccaggaatacagcttggaagccggcaaaaatttgtgattttggtgcttctactgtcatttgttgttatgcttgcctttgccatcctcatatgggttggtagaggagacaatcctatcgattcttctctactgaaaagggtttatttggatgtattttcagtagtagttattgtacttggtggtgctctggcatgttacggtgcagtgttattctcgaagatgagcaaagttcgttctgaaactgtatcaactgagaagtggaaggttgccagtttagctgctgtctcgctgatctgtttctcgtcttctgctatacttgcacttgtgactaatgttccagtgcttttgtattggtactcaacagatgtggacatcatcaacaatgctgttattttgtttatatattacttcataggtatctttatttttctttatgcctagcaacaacacacctgttgttatggtcgctagatcggtgagggattggagagggaattcgatggtcggagctgctggtggggaggtggttcggtactgttcacagggcgccggccggggggcctctgcccacggccgagcaagaggggagtttcccttctaattcttgcttattttatttctcatccattgattacataaataggccggctggccgctcctatctagctagagatccttatctccttaaaactctcaacaaactactaactgataactttcctagataatctcaactaatatcctaaataatctcaactaatcttctaattttatctctaactatccttatctaatcccccttggagggcccatggttgctgctgccgcagcccctccgtaggcctccattggccctgacaactgttgtctcatctacagtcctcttcactaatgtagtttgtgtttccaatgccgtttatactcaaaagcggatgttcttgttattaagcactgttttctatgcattttgttgtcatcactcatcaggtatatgtacttacgcttctaggccagatccttttttccttgcatccatatccccagtcccacctgcaagcattcatgtgatttggtgttggacttggcactatttttctgtaagggcattacaattcactttcctttgtgtgtttgggtttatttgaatctctatccatgtctttgcagcttattgccaagctgtattttacgaagcaaatgacatgctgcttggtttgtagatgcaaattattgttgtgaatatatcttgaaaatttgtacttggtgcacttgcgctgtgcatgtcgaagtgcaatgtagaattattttaaatgaaaggatgaaggtagaaaccatggtgtatgttagcttgtttacacattaaaaatctagactagactacctcttgagttttctcttttccaactgtgcttatttactggatcattggtgtatatttcttgtaggctcgtcagtgccatcaggatttgttctatggatcatgagagagatgcctcatcggcaggtagttgaaagatccgtagaatcgagggtggttactttgttcagggaaagaccatcaactacgcaggatccacagtggaggacagctgtcacatcctcaaacaaggccctcaagtcaagcccaatttaacctgaagacaaaccatcgacagtgatacctcacgttctgcttaatgtgctgggactaataccaacacgtcagggtcacaactggcgtctgctggcattgcgctaactgatgcatttagaactgaaggttggggccatatttgaagaattaacaaaatgtaaatagctttggcagttactttacccttttagatgtaacaaactcatcccgttggttacatgtaccttgttttatttagcgcttcatctaatttaccgtagaaggcatgtgttcaaccgatctttgggctgtttggttcttttagtcacttctaaattttaggtactaaactttagttcctagaaattctatttaaaaactctattttagtc

SEQ ID NO: 25092 - DNA, 214 bp, Zea Mays
ctttaattcccatgatccacaacctccaaaagcctataattacagggaggaacaaggatctcatccatacctagggtttccccaagaaatcatcaagaagagatggggaagaacatctccttgatcctctcttcctcttcaattcaacgtgcccctccttttctcgatccttgctgcgtagggggagatcttgggggaggaagcaatggatgat

SEQ ID NO: 25093 - DNA, 2667 bp, Zea Mays
ccgatgaccactgcctgccgccgtccgtttggctcgccaccatttcttccctgcccttccctgtttcctggcctggctttataatctctcggtcgctactgattgcccgggtcactacttccttcggttttactatcccttcgtttccgctagccttctccttccagagcaaccgcgccattcgtctcctccgtctcgttcgtagtgcaacacatacagcctcgtctggtgaagtgaaagaacgacaagatctgtggtacggcggtgccggccgacatccacccactgtgctaccccttgcggttccagccagcgcagcgatcgattcccgctggccgctgccgtcggtgcctgcccggtcctccactcctcccgctactagtactagtaccagcacactccactgtccactccactgccagtgccatcccattcccatccgagctgcagcgctcgacgacggggagaatagcgtggcgtgggcggcgccatgaagtacagcaaggaagataagcccgagagggcgggcggcgccggcgcagggtccagggcggtgccggtggcgctcgtcgtcgtcgtgctctgcgccttctccttctacctgggcggcatctacagcacgggacggagcctgctggactccatccagccggcgccgacggctctcctcgccctcggcgccgccacgacgacccgccgtccctccgacgacggccaggctcggccggcactggcgtccacggccgccgtggcgttccccgagtgccccgccgactaccaggactacaccccctgcaccgaccccaagcgctggcggaggtacggcaactaccgcctcagcttcatggagcggcactgcccgccgccgcccgaccggcaccatgttccccaacggcgtcggcgcgtacgtggacctgatgcagggcctggtcccgggcatgcgcgacggcaccgtccgcaccgcgctcgacaccggctgcggcgtcgccagctggggcggcgacctgctggggcggggcatcctcaccgtgtcgctggcgcccagggacaaccacgaggcccaggtgcagttcgcgctggagcgcggcatcccggccatcctcggcatcatctccacgcagcgcctgccgttcccgtccgccgccttcgacatggcgcactgctcgcgctgcctcatcccctggaccgagttcggcggcctctacctcctggagatccaccgcgtcctccgcccgggcggcttctgggtgctctccggcccgcccgtcaactacgagaaccgctggcacggctggaacaccaccgcgcaggcgcagaaggccgacctggacaggctcaagaagatgctggccagcatgtgcttcaagctctacagcatgaagggggacatcgccgtgtggcagaagtccgccgacgcctgctacgacaagctcaccccggtcaccacgcccgccaagtgcgacgacagcgtcgaccccgacgccgcctggtacgtgcccatgcgctcctgcgtcacggctcccagccccaagtacaggaagctggggctcaacgccacgcccaagtggccccagaggctcagcgtcgccccggagcgcatcagcgtcgtcccgggcagcagcgccgccgccttcaagcaggacgacgcccggtggaagctcagggtcaagcactacaagacgctgctgccggcgctggggagcgacaagatcaggaacgtcatggacatgaacaccgtgtacggaggattcgcaggcagcctcatcaaggaccccgtctgggtcatgaacgtcgtctcctcctacggcccaaactccctcggcgtcgtctacgacagagggctcatcggcgtcaaccacgactggtgtgaggcgttctcgacatatccacgcacctatgacctgttgcatcttgatggcctgttcacagcagagtctcacaggtgcgagatgaagtacgtgctccttgagatggaccgtatccttcgtcccacgggctacgccataatccgggagagcacctacttcctcgattctgtggcacccattgccaaagggatgcgatggagctgcgagaagcacagcagcgagaacaaggccgacaaggacaagatcctcgtctgccagaaaaagctttgggcaggaaagcagtgacgagagaggatcatccttcttccttccgagtataaaaaagtaggcatccagatcggccaacaaggcaagaggcgcttcaatacacatggaagatgagcgagtacttctgatacaaagagtgttcggcagttattatcaaaataaataagccgagtaaaactccatataggatccaacagttaccatttttcattaatcacagtttaattctttttctgtaccgacagtttgtaggcaaggagtgggtcaattcatataccatatggtgagcaaatgtaagtttactccacactagatgtgtatagcttggttggtgctactgctatcgatgtaatagcgggccacgtatttacttcacatgttttgtggatcaatatactatgactgtgatgtcctaaagcgacggattttgttgagtgctgctatcagttgacgtcgcaatgcattgttcttgagcaagcaattcctctgaaattgaaatagaaacaaacaagaaaaaggaaccggtaatgca

SEQ ID NO: 25094 - DNA, 2376 bp, Zea Mays
gggcaccgggcgcaccagtgcaccaccgcatacggccgtgcgcttcctttccttcccccgccgccgcagatcttccccgcagtcccggttcccgttcaccacctccgaaccagaggaggaatggccatctactccttcctttctgttcgcaagcgcccagttgttgtcgtcgccgccgtcaccctcttcattgtcgtatcctctctcttcctcctcttcagccccgcaccgacagcgctcccgtttttctcctcctcctcttcccacctctcctctcaagcttcaattgctgccgtctcctctaacgcatttccacctgagaccccaacctctgttgtctccaactgggtcagcagcaacacttctgctgatcgcgtctctgctgacgcatctccgcccgtagtcggaaccgccatcgcgtctgatgcggtcagcaacagcacggctgacccgcctaggccagataccaccgccgctgctggcgacgcgaaggctgatgtgtcccaaccagatcacggcatgccccctgccgccactgaagcgagtggatcggcaggcaacggtgagacagccgcgggagtctcgagcgagagggatgaggaggggcaaggcggcggcggcgccgtggaggagctaccatcgtgggagctgtgcaaggtggggaagggggtggcggccgcggactacatcccctgcctcgacaacgtgaaggcggtcaaggcactcaagtcgctgcggcacatggagcaccgggagaggcactgcccgacagatccgaggccgaggtgcctcgtgccgctgcccgagaggtaccggcgtccggtgccgtggccacgcagccgtgacatgatttggtataataatgttcctcatccaaagttagtggaatacaagaaggaccagaactgggtcaggaagtctggtaactattttgttttccctggaggtgggactcaattcaaaaatggcgtggcttcatacattaaattcattgaacagattttaccaaacattcaatggggaatccatacaagaactgtccttgatgttggatgtggtgtggccagctttggtggatatttgcttgataggaatgtcattaccatgtctgttgcacccaaagatgagcatgaagctcagatacagtttgcactggagcgtgggattccagcatttttggcagtgattggaacacaaaagcttcctttccctgataattcatttgatgtcatccactgtgcaaggtgtagggtccactggtggaaaaccattgttggagctcaatagagtactcaggcctggagggtattacatttggtctgcaacacctgtctatcgcaaaaacccaagagatatagatgattggaatgcggtggtagctctgaccaaatcgatctgctggaggacagtggtaaggtctcgagatatcaataagatcggagttgttatataccaaaagccgacatcaaattcatgctcccttgagagaaaaaataatgaaccacctctgtgctctgagagtgatggatcacgtttcccttggtataaacctctcgatagttgcctctttcctgcagttccgagttcaggtgaagggaatagttgggccgtctcgtggcctgaaagacttaatattaagcactcggctacatctaacaattcttccattcagtttcctcaagaaaaaattgattctgatacaagttattggaaggaccttgtttcagaaatatatctcaacgaatttgcagttaattggtctagtgttcgcaatgttatggacatgaatgcgggttttggaggatttgcagcatcaattatcaatcgaccgttgtgggttatgaatgttgtacctgttgatcagccagatacattgcacatcattttcaacagaggtctgattggggtatatcatgactggtgtgaatcttttaacacatacccacgaacttatgatcttattcacatgagttatctcttagggccccttacgaaaaggtgccacatcattgaagttgcagctgaaattgacagaatacttagacctggtagatggtttgtgctgcaagacactatagacatgataagaaagatggaccctgttctcaggtctttgcattacaagactacaattgtcaaacatcaatttcttcttgccaccaagggtttctggcgccctggcagtataggttcttagtcatgatgattccggcttccacccaaaatgtgaaatttgtcgaggaaatttcgacagtgaatttgtacgaggtggatcgcaagatcgagaaccgacgacggtaaacgcacaaacgacacgagtttagacaagtccgaggtctcaatgcgagataataccctacatctagtatattggtg

SEQ ID NO: 25095 - DNA, 1089 bp, Zea Mays
ccgaactcaaggcgtgaggctggagctgtgcgcgccggaccgggcgggcctgctgtcggaggtgacgcggacgttccgcgagaacgggctgctggtggcgcaggcggaggtgtcgacgaagggcgaccaggcgtgcaacgtgttctacgtgacggacgccgccggcaaggcgccggaccggggcgccatcgacgccgtcagggagagggttggcgcggaccgcctcgtggtgagcgaggagccccgcccgccgcagcagcagctgtacccggacgcctccgggccaggcagcggcggcggcggtggcctcgggctggtatacctcggcaacctcgtgaggaggaacctgtacaacctcggcctcatcaagtcgtgctcgtgactcgtcaaggccggccgggtgctcgggtcgagacgcgcgtcgtggaggggacggacggacggacacgcgccattgctctgtgtacgtactgtattgtacatacagggcaccgacgccgtggcgtggcctggagcaggatggctagccgtacgtagggaaactctgtagccgtgtactgtagatagacaaaaccgtcgtcgctggcagtggtagggggggggtgcattcatcgtgcgtgggacgattcgttatttattactgtacctgttattctttccgttcgttgggtaaccacacctctctctctttgctatttcttgtctgtcctttgtgccgtggctgacgagtatactccagtacggacacgcggctagaccgatgctttcctgctcggatccatcatattcccagagccttttttttaagggtccgaggaagatgtgtgggggtgaccagggcagagtcggccagatgcccaaatgtgtctagtgttgctttttatcagctgtcctagatttggctaatcttgcttttaccagtttttggatctggatgtgggggtgggtggggaaagattagttaggtgcgcagtagtagcttgcaagtgaaaccatcaaggtgatggattgcaatctgagcaaggtgctacgtacgtaggagtacaagtactactaggctaggcctcctgttgtctcgtttcctcttgt

SEQ ID NO: 25096 - DNA, 2969 bp, Zea Mays
cgacgatgaggacggagactgaatgaatcacgggatttccgaaggcctggaagccgtcaagccgatatgcgacacaagcccaacccttcctgacgctccacgcgctcgtctctctccttccttccatcctccctccctccttccctccctcgctcgcctctggaggaccctcgccatcctgcccaagcgcaccaccaaacccccagcagcggcgctagggttcgcgcctcggcgcgtcggcaccgtcacctgcggcgatggcggggcaggagcgtaggacaatcgatctggaggagggatgggcgttcatgcagaagggcatcaccaagctgaagaacatcctcgagggcaagcccgagccgcagttcagttccgaggactacatgatgctctacacgacgatatacaacatgtgcacgcagaagccgccgcaggactactcacagcagctctacgacaagtatcgggagtcgttcgaggagtacatcgcctccatggtactaccttcattaagggagaaacatgacgagtttatgctgagggagctagtgcaaaggtggtcaaaccataaagtcatggttcgctggctgtcacgcttcttttattaccttgaccgatacttcatatcaaggaggtcacttacaccacttaaagaagtgggccttacttgcttccgagagttgatctatcaagagattaaaggacaagttaaagatgcagtgatagctctgatagacaaagaacgtgagggtgaacagattgaccgggctctgttgaagaatgttttggatatttttgttgaaattgggttgggtcaaatggagtgttatgagaatgactttgaagatttcttgctcaaggatactacagagtactactctgtcaaagctcaaagctggattcttgaggactcatgcccagattacatgattaaggctgaggagtgtttaaagcgggagaaggagcgagttggtcactatttgcatattagcagcgaacagaagttattggagaaagtgcaaaatgaattgcttgctcagtatgcaaccccgctgttagagaaggagcattctggatgttctgctttgcttcgcgatgacaaggttgaggatctttctaggatgtacagactcttctccaaaatctcccgtggtctggagcctatttcaaacatgttcaaaacgcatgtcacaagtgagggtacagccttggtcaagcaagcagaagattctgctagtaataagaagccagagaagaaggatatggttggcatgcaggaacaggtctttgtgtggaaaatcatcgagctgcatgacaaatatgtagcttatgtgacagaatgtttccagggacatacactcttccataaggcacttaaagaagcctttgaggtcttctgtaacaaaggtgtctctggcagttcgaatgctgagttgttggctaccttctgcgacaatattctgaagaaaggctgcagtgaaaagctcagtgatgaagccattgaagatgcccttgagaaggttgtgagattgctggcatacatcagtgataaagacctgtttgccgagttctataggaagaaacttgccagaagattacttttcgacaaaagtgctaatgatgagcatgagagaagtattctgacaaagctcaagcaacagtgcggggggcagtttacttccaaaatggagggcatggttacggaccttactgtcgctagagatcaccaaactaagtttgaagagtttgtagctgggcatccagagttgaatcctggcatagatttggctgttactgttttgacaacgggattctggccaagctacaaaacttttgacataaaccttcctgcggagatggtgaaatgtgtagaggttttcaaggaattctatcaaacaagaacgaagcacaggaagctgacatggatttattccttgggaacctgcaacatcaatgctaagtttgatgctaaacctattgagctcattgttacgacatatcaggctgcattactactactgttcaatggatccgaaaggcttagttattctgaaattgcaacacaattaaacctgtcagatgatgatgtagtgcgtttgctccattcactttcttgtgcaaaatacaagatccttaacaaggaaccagcaaatagatccatctcgcccaatgatgtttttgagttcaattcaaaatttactgacagaatgagaagaattaagattccactgcctcccgttgatgagaagaaaaaggttgttgaagatgttgacaaagacaggaggtatgcaattgatgcatcaattgtgcgcattatgaagagccgcaaagttatgggtcatcaacagctggttgctgaatgtgttgagcagcttagccgcatgtttaagccggacttcaaagccataaagaagaggattgaggatctcatcacaagggactatttggagcgcgacaaggacaacgccaatacgtacaaataccttgcctgattggtggttagtgacaaagtccaaaacagctccgggactatgcgataccactgggatggcaatcttcctgcaatgtcgtgatgcgtattctggctccgttgtcacctgttggtttgtggaggcagagtggattggtcagctagctgacggaagtcactgactcactagaagctattaagtggttttgtacttactgagtcaaatatatgtcatacgttgaaaccatgtttcgtaattatgaatagtttctttaaaattaaattttgcgcaatcaaatgcctttctctgttgcctaaggacagtcacgctctgatatgcgatcatttcacatttaccgagtcaaatagacgtatgtatatagaaaccataccagtatacttaagttcattttagctcgttataaatgttctctctctcttaacgtccagccatcagtcgaaatattgattcttgtgtaaatgacatctattttttttt

SEQ ID NO: 25097 - DNA, 1805 bp, Zea Mays
taagtgcttcactcactcctgtcctctcctctcgaccagctgacctcgctgacggagcacacagccacgccgcagcgccgcgtgggtgtctgtctatagccttgtaggtcgttcgcaggtaggtaaccgtaacctagctagctcgtcgggatgatgatgatgagcggtcgagcggccaccgcggggcggtacccgttcacggcgtcgcagtggcaggagctggagcaccaggcgctcatctacaagtgcctggcgtccggcaagcccatcccgtcctacctcatgccaccgctccgccgcatcctcgactccgccctcgccacgtcgccgtcgctcgccgccttcccgccgcaaccctcgctggggtgggggggctgcttcgggatgggcttcagcaggaagcccgccgacgaggacccggagcccgggcggtgccggcgcacggacggcaagaaggcgctgctccaaggaggcgtacccggactccaagtactgcgagaagcacatgcaccggggcaagaaccgttcaagaaagcctgtggaaatgtccttggccacgccggcgccggcctcctccgccacaagcgccgccgccgccgccacctcctcgtcccaggcgccgtcctaccacagcccggcccccgccgtgccgtaccacgcgccctacggcgccgcgtaccatcacacgcagacgcaggtgacgatgagccccttccacctcctccacctcgagaccacccacccgcacccgccgccgccgccgccgccgccctactactacgcggaccagagggactacgcctacggcaaggaggtcggcgagcgcgccttcttctccgacggcgcgggcgagagggaccggcagcagcaggccgcggggcagtggcagttcaagcagctcgggacgatggaggcgacgaagcagccgtgcaccacgccgctgctcgtccccgccgccgggtacggccacggcgcggcgtcgccgtacggcgtcggtcaggccaaggaagacgaggaggaggaggaaacgcggcggcagcagcagcactgcttcgttcttggcgccgacctgcggctggcggagcggccgtcgggggcacatgacgccgccgcgcagaagccgctccggcatttcatcgacgagtggccgcacgagaaggggagcaataaggcggggtcgtggatgggggggctcgacggcgagacgacgcagctctccatgtctatcccgatggcggccgctgccgacctccccgtcacctcccgctaccgtacgtgatggcggcgcgcactatgagtgattgccagcaagaaatgttttgtggttgctgcgacctcgaggtggcgaggccacatgaaaaaaaaatactggagctggaacacgagtggttctttcctgtgccgttttgctcagggccggtcggcacggtttgaagaagttgggaagagaagtaaaataaacctccttgggagtgttacgtttcctgtaattgcttgcttcctttgctgtacctgtgagacgacgcttagtgctagaagtgagggcctttcctgatctcagctctggtctggatttgccttttcccgctgtcggattcctctgcctgtctgtgatggtttgtctgtgatggtttgtgctcagagcctgcagcgaatactaaaccgcagtaattaatcaccatgcttcacccgacaatacggccattacggggtagctgcgctgaccttacctgtgcgattgcgttgcgtgtgtgcatgtggcgcctgcgcgcacccgggttctcgtgccacgtagcttgtgggag

SEQ ID NO: 25098 - DNA, 1350 bp, Zea Mays
aaaagcagtactgcagtagaaaaaaaactccctagaggtcgaccgagacccctgcggacctgcgcttcggccgttgcggaccgcaggagtgacgattccatggcggaggagatggcgcaggcgcaaccgagactcacggcgccacgttcggtccgctgtattgtcaagctaggtggagcggcgattaccaacaagggcgagctggagagcatcaacgaggagaacctacggtcggcatgtgcgcagctgcggcatgccatgtccgaatctgacggcgatggcgccatggagaaggttctgggaatggactggagtaggaagcccggagatcctgtcgacccggccgttgacgcggagtggatcgcggggatagctaggctggggctcgacactaacttcgtcgtcgtgcacggggccgggtcttttggccactttcaagcaagtagatctggagttcataaaggagggttacattcgacactggtcaaggctggctttgttgctacaagaatttcagtgacatctctcaaccaggaaattgttagagccctagcaagagaaggaataccatctgttgggatgtcaccatttgcttgtgggtggtctacccaacaaagaaaacttgcatcagcaaatgcttctcaaatatttcagtcactccatgcaggttttgtcccagttttgcacggtgatgcagttcttgatgaattattggactgtaccatattgagtggggatgtcattatacgacatcttgcacagcttctgagtccgaaatatgtagtatttctgatgtccatggagtgtatgatcgccctccaactgactcaaatgcagtacttctgagagaaatagaggtggatgacattggaggctggtcgattgtaaaacctgcattgctgcaaggcaacactaaaggagtggagatatcagttgcagcacatgacaccaccggtgggatggagaccaaaatactggaggctgcagtgatagctaggcttggaatagacgtgtatattaccaaggctggaacagaacactcgctgagggccttgaagggagatgtgagcaccgactcggaagattggcttggaactattatacgctcttccaaatagatttcttgttgcaaaaacattcggactggtttactggcgattttcccgatgttatatgagcagtgatgagccttgggctttcgatgatgatccagcacgggtctattccctactgtggtcgtagtttggtttacaagcgtcagcctgatgttacaaatgccgttcagtaaatttgttttgttttctgaaaagataagatgcattggtcgcaagagaggaaaaaattgatttt

SEQ ID NO: 25099 - DNA, 4382 bp, Zea Mays
gcgcaaacaagttcgcatcgccatctcgctcgcagggaggagaggggagtctctaaccctaaccctacccgcccctgtcgccatagccatggctgccggcggagagctctccccctcccccgtgccccccgcatcccccatcaagcattctcgctcacccgacgatgcccagcccgacgcatccccgaagcgtcgcaagcgccaccatcaccgccgccaccaccaccaccgtcggcaccgtcacgccgattccccggtacccgtggcagccgacgaagaggtagaggagggggagatactcgaagatgccaccgccgcctctgccatggaggtcgatgctgagtccgccgccccagaggctttccttgctccggagcactttggtaatggtgctgatacagactcaaacacagatgcaaccaagatgcaagctcctgctctgcctacccttccatcctcagaagatggaaggaggtcacttcatgatgcccctgagtctgaaagaggagatattctttcaagtgatgttgaggacaacaaaggacatgaacgaaggcaaagacaaaaccgttctaaatctccaaagtctagaagggagaaggaaaggaggcacaaagatgaccatcacacttcatcttcaaaagattatcattccagaaatcactctagaacatctccttactcaaggcatcaaagtgaagctcattcgagagatctgtacttgagatatagagagaaaggtgattacactaatggttctcgtgcaaatcttagggatggttctgatcatgagagcaatgatcggaatgggaagtctggcagacatacgactaggacccacgggagtgaaagagaaaggagcagcagccatggtattcatgatagacatggtgacaggtacagtgacagacgtgccagccaggaaaggcatagagacgataggatatatagagacaaaatcgattcattagaagctgctcctaggcacagagaaagaagcaggagtcatagtagatcggatccaagggaaaatacacgtcttcgtgatcaaagcagggagagggaaagacggagtggtagttcaaggcatagggatcatgacagcaagagggatacaagtaaagatcggcatagagaatctgacagggttaacagtgcacatgaaagggatagagggagagaggctagggacagggaatggcatagggtcaagggaagtgaaactcatagagctaaggaaggacgggacaaagttagcgataatgataggcacagggattcaacacgctcaaaatatagcgtgtctgatggttacaaagagaggacaagatctggggagaaaggtagagatgctgaccataaaaaccggaagtttgaagaaatgaaggaaaattctctcaaggaggaagatgaagaggagtaccaagagaaaatagaacagcagttagcaatgcaggaggaagacgaccctgaaaaaatcaaagaggaagcaaggaggaggaaagaagctatcatggcaaagtacaggcagcagcaatcgcagaaagaggatatggaatctaaaccaagtggcaatgatgaagaagtaagagcaatggatggaaacgaagctatacatcagaaagatgatatcgatagcagctttatgggcaatgtcgaagctgaaaataagcatgattcttcagaggtatttgatggcaagacaggctttaatgtgggaaggtctcctgctcacaattatgcttcaactagcacgggagcattcactgatgagaggacaataggtgtttcaggtcttggagagggttctcccaagagtgagagatcagcagacatgttttgtgatgacattttcggagaatcacccaccggaattagaaaattgggaaaggatgatggtttgcatattgagagaaatgctcttcatgacaactgggatgatgcagatgggtactacacttatcggttcggagaattgctggatggccgttatgaaatcatagcagcacatgggaagggtgtgttctcaacagttgtgcgggcaaaagatcttaaagcgagtaaggatgatcctgaagaagttgccatcaaaattattcgcaacaatgagacaatgtacaaggctggtaagcaagaggtttcaatattggaaaaacttgcaagtgcggaccgtgaggacaaacgccactgcgtgcggtttatttctagtttcatgtaccggaaccatctttgcttagtttttgaatctctcaatatgaatcttcgtgaggttttaaagaaatttggtcgtaatattgggcttaaactgactgcggtgagggcatattcaaagcagcttttcatcgccctgaagcacctgaagaactgcaaagttttgcactgtgatataaaaccagataatatgctggtgaatgaggctaagaatgtgctcaaggtatgtgattttggcaacgctatgcttgctggtatgaatgaagttacgccttatcttgtcagccgtttctatcgggcacctgagatcgttcttgggttagcctatgatcaccctttagacatgtggtcagttggttgctgtctatatgagctttataccgggaaagtcttatttcctggtccatcaaacaatgccatgcttcggcttcatatggaattgaagggtccattccctaagaagatgcttcgaaagggtgcctttactatgcaacacttcgatcaagatctcaattttcatgctaccgaggaggatcctgtgacaaaaacggctgtgagaaggttaattttgaacattaaaccaaaggatgttggttctttgtttccgaactttcctggcgaggatccaaaaatgctatccagttttaaggatcttcttgataaaatatttacattagatccagaaaagaggataactgtatcgcaagcacttagccatccatttatcactggcaagtgacacaagatgacgattcctcttgaccttgaacttagcatcttcactgtaaaatacattttgggttcctcttgtctaatcatcaacgtttctgtcttgtgtcctgggagctctgagaaaaagtacatggatgaagcacggaacttcggaagagatggctatctgcagaccttgttgcatgcacttatcatttggatatattctgttgcttgattctgccagggcctctgctatgtgcacattttatatgcttaagggccaacataagaaggtaccctggttaatatctgggtaacttaatgtgtttgaacccatcaacatattgttttctctgttgtattaagttgagagatgacatctatattgaattttataccattcatatgtcctgactgttgtctttctattagcatatgtacaatattaaatctattgttaaattttctggatagttattgccaaatttaggcacccatagtttcttatctaatcctcccagatttgtaactacatatggccacacacttgtagatcagtagtggatggacagaaagtaaatgtatgtaaagtaatcaaatacaagcacatgaaccagtgtctacattctgtttgcaccattaaagtagaacagttctttgagaatttgtttgctttttctaaattagttgtaacaaagcttctaatatttttacctacttatcttcatggagtatcaattgaaaatcggttttgcttttatgttattgaggtcctgggatggaggtcgctggaccctctactcacttgccatgtattcaagtgcaggagagatgcgtatcatttcattgagtaaagaggctacagggaaagaaatccaacatagcccgcccctcctccctctaagcacacaagacctgaaaggttctcagcctgttagcaccatggaatgctcttatttgtgattgcctgcagcaccgccatcataacacttgcaatgatgccattaaaaagacatcatactgatgtttccagatctctcaagccaccaagatagttgaggcgcaatggaaataatccaagcctgccagattggtaaccattctttagactgccatttagtaagtcaggttgaacctattaccatctataaggacttgttcggttagctctcaatccatgtggattgagtgggattggatgggtttgaatcccaaacaagtcaaacttcttctcaattttttccaatcccatccaatccatatgtattaggaataaccgaacaagccctaagtgggcatgcaaatggcattgtgttggattggaccattgtaaacggtttctcgtgttggatgcaagcattctgtagttgttttgagttgttttttattatctgtagtacttgctgggtaaatctaaagaactggatttgtgtcaggcctggttcaattgatatgga

SEQ ID NO: 25100 - DNA, 1517 bp, Zea Mays
caaaatagcatcattacatgcttgcttgcacacctgcattgctataatcatgtcagaactgatgaacctggcggatcggcaaatgtcgctccaaagaaaaggagaagaaaggatgcatcaagtacttatctggagactaatcatcttgctccagttgattattttgatattggctatgtacctggaaaatcctctgcaagaggtactgcgaaggtgggaaaacaattagctagtagcaacataggttcttatggtcaataccacgaagacaatagagtggtgaagaataaaaccagtggtcctggaggagcccctagaagaaaatcttctgaattctcggttggtgatgctgcagcacgcgctaaggttattaaggatgtctcagatgctcctttggagctaagagacttggaaaagcaaaaggctgcaccaccacctgtttcctatgcacataagtcaaaaaccagtgaggcatttgattatgcttatccagctgacagggataaaggcacttcagcacaacttggtttccaacaaagaaagcacccagttgttggtagggcaggttcatgtattaaacccaaaggcaccaggcttgagcgaggtattcgtgacctccagaagattgctgcagaatcttgcagagttatggcctcaaggtttcatggatagtgttggaatcaaagatgccatttatagatgaaaggagcgaagaagattatactacagccagcaaaaggttcgcagcgaagagagaatgaaaaggaagaggctggctgcagcagcaaagctggaagatggcttcccagttgtaatgcgagctggtgttgccccacaagtttcacaaccacccataacaaacaacatcacataccagattatggacagaaccaggggtttaaattttttgacagggctcgtgaaacgagctccagtggaattcctgatgacggcaacagaaatattggcgagatcaagaagaaaagaaaacctgaatacgatgttgtagatacacaagctaacctaccaaaggctcccttaccgcatgggagagaagcaaaagccttctaagcctgctgacgaggccagtgctggtagcctgccctccacgtcgacaactcaaactgtgcttggcctaccctaccatcggtgcttggtcataaccaacaacctaactgatcatttcggcatattgttggacatttggttatccttataggctcttttcagctgctgtacaaaattatggcatttccatgtgttcagcatccatggtcaaggccatcacctttccgagtcgagaggatatttgaccatttgcaattttctagcattgcttggttcctttggccaggttatctgtgccacgctgataaatatggtcagatgcagatttgcacccctacaaatatcggttgtaattatgaatcgtttctgagacatgcgttcatattgtgcgatttaaaatctcattcagcgaggtgcagatttaatatcattgacaaccgcacaaaaca
